(19) United States
(12) Patent Application Publication
(10) Pub. No.: US 2024/0352428 A1
(43) Pub. Date: Oct. 24, 2024

(54) BACTERIOPHAGES WITH IMPROVED ANTIMICROBIAL ACTIVITY

(71) Applicant: ARMATA PHARMACEUTICALS, INC., Marina del Rey, CA (US)

(72) Inventors: Sébastien LEMIRE, Culver City, CA (US); Angela B. SORIAGA, Culver City, CA (US); Katrina Tram Anh NGUYEN, Playa Vista, CA (US)

(21) Appl. No.: 18/294,138

(22) PCT Filed: Aug. 2, 2022
(86) PCT No.: PCT/US22/74446

§ 371 Date: Jan. 31, 2024

Related U.S. Application Data
(60) Provisional application No. 63/228,504, filed on Aug. 2, 2021.

(51) Int. Cl. C12N 7/00; C12N 9/22; C12N 9/88; C12N 15/11; C12N 15/90

(52) U.S. Cl. CPC C12N 7/00; C12N 9/22; C12N 9/88; C12N 15/11; C12N 15/90; C12Y 402/02003; C12Y 402/02011; C12N 2310/20; C12N 2795/00022; C12N 2795/00033

(57) ABSTRACT

Provided herein are bacteriophages engineered to express an exopolysaccharide (EPS) depolymerase for treating bacterial infections. In some embodiments, the EPS depolymerase comprises alginate lyase. Also envisioned within the scope of the invention are compositions comprising one or more of the bacteriophages, methods for treating bacterial infections, and kits comprising the compositions described herein.

### CROSS-REFERENCES TO RELATED APPLICATIONS

[0001] This application claims the benefit of U.S. Provisional Application No. 63/228,504, filed Aug. 2, 2021, which is incorporated herein by reference in its entirety and for all purposes.

### SEQUENCE LISTING

[0002] The instant application contains a Sequence Listing, which has been submitted electronically in ASCII format and is hereby incorporated by reference in its entirety. Said ASCII copy, created on Jul. 27, 2022 is named “054249-520001WO_SL_ST26” and is 3.51 megabytes in size.

### BACKGROUND

[0003] There is an increasing demand for alternative antibiotics as the number of bacterial strains resistant to traditional, small molecule antibiotic treatment regimens are becoming more numerous. Bacteriophage therapy uses bacterial viruses, or phages, to target and destroy bacteria at various sites of infection. Recent advances in biotechnology have allowed for the fast expansion of existing phage libraries in order to generate potent and specific phages that can target and destroy a bacterium of interest. Pseudomonas aeruginosa (PA) is an opportunistic pathogen that can potentially cause severe chronic and acute infections, especially in immune-compromised patients, with the potential for biofilm formation. Additionally, there are strains of PA that are antibiotic resistant, increasing the difficulty in treating these chronic infections. In some instances, PA infection may occur in the presence of cystic fibrosis (CF) or non-cystic fibrosis bronchiectasis (NCFB). Bacteriophage treatment approaches that can circumvent traditional mechanisms of antibiotic resistance, avoid the toxic side effects of traditional small molecule therapies, and can be effective against biofilms, are especially attractive.

### SUMMARY

[0004] Alginate, a major component of Pseudomonas aeruginosa biofilms, is a polysaccharide with two units: β-D-mannuronate (M) and α-L-guluronate (G). These units can be linked in homopolymers (polyG, polyM) or a heteropolymer (polyM/G). The overproduction of alginate (also referred to as “mucoidy”) is particularly prevalent in NCFB. Alginate lyases, which break down alginate, have been grouped into seven subfamilies of polysaccharide lyase (PL).

[0005] The activity of Sphingomonas A1-III from the PL5 family was previously explored. A1-III is known to break polyM alginate down into disaccharides and trisaccharides. When expressed in two phage families, A1-III was shown to have activity against preformed biofilms of mucoid Pseudomonas aeruginosa. The Alg2A version of alginate lyase, which belongs to the PL7 family and is expressed by Flavobacterium, was also expressed. Alg2A had previously been shown to degrade both polyG and polyM and showed greater activity against Pseudomonas aeruginosa lawns than A1-III. In addition, Alg2A enhanced antibiotic treatment of Pseudomonas aeruginosa biofilms. Therefore, Alg2A was cloned and expressed from phages to compare its activity to that of A1-III. The data described herein indicate that Alg2A has a stronger degradation effect on Pseudomonas aeruginosa biofilms than A1-III.

[0006] Described herein are bacteriophages, compositions of bacteriophages, combinations of phages, and use of the same for medical and non-medical applications, including in the treatment of bacterial infections and illnesses.

[0007] In one aspect, the present disclosure provides a bacteriophage engineered to express an exopolysaccharide (EPS) depolymerase.

[0008] In some embodiments, the EPS depolymerase is expressed from a nucleotide sequence selected from SEQ ID NO:20, SEQ ID NO:21, SEQ ID NO:22, SEQ ID NO:23, SEQ ID NO:24, SEQ ID NO:25, SEQ ID NO:36, or SEQ ID NO:59, or a sequence having at least 90% identity to the sequence of SEQ ID NO:20, at least 90% identity to the sequence of SEQ ID NO:21, at least 90% identity to the sequence of SEQ ID NO:22, at least 90% identity to the sequence of SEQ ID NO:23, at least 90% identity to the sequence of SEQ ID NO:24, at least 90% identity to the sequence of SEQ ID NO:25, at least 90% identity to the sequence of SEQ ID NO:36, or at least 90% identity to the sequence of SEQ ID NO:59.

[0009] In some embodiments, the EPS depolymerase is alginate lyase. In some embodiments, the alginate lyase comprises Alg2A or A1-III. In some embodiments, the alginate lyase comprises Alg2A. In some embodiments, the alginate lyase comprises A1-III.

[0010] In some embodiments, the bacteriophage shows improved host range.

[0011] In some embodiments, the bacteriophage belongs to the Genus Phikmvvirus. In some embodiments, the bacteriophage belongs to the Genus Pakpunavirus. In some embodiments, the bacteriophage belongs to the Genus Bruynoghevirus. In some embodiments, the bacteriophage belongs to the Genus Pbunavirus.

[0012] In some embodiments, the bacteriophage targets Pseudomonas aeruginosa. In some embodiments, the bacteriophage targets one or more of Pseudomonas aeruginosa, antibiotic-resistant Pseudomonas aeruginosa, and multiple antibiotic-resistant Pseudomonas aeruginosa. In some embodiments, the bacteriophage infects and kills one or more of Pseudomonas aeruginosa, antibiotic-resistant Pseudomonas aeruginosa, and multiple antibiotic-resistant Pseudomonas aeruginosa.

[0013] In some embodiments, the bacteriophage reduces biofilm mass.

[0014] In another aspect, the present disclosure provides a bacteriophage composition comprising one or more bacteriophages that express an exopolysaccharide (EPS) depolymerase, wherein the one or more bacteriophages comprise a polynucleotide sequence selected from SEQ ID NO:26; SEQ ID NO:27; SEQ ID NO:28; SEQ ID NO:29; SEQ ID NO:30; SEQ ID NO:31; SEQ ID NO:32; SEQ ID NO:33; SEQ ID NO:34; SEQ ID NO:35; SEQ ID NO:37; SEQ ID NO:38; SEQ ID NO:39; SEQ ID NO:40; SEQ ID NO:41; SEQ ID NO:42; SEQ ID NO:43; SEQ ID NO:44; SEQ ID NO:45; SEQ ID NO:46; SEQ ID NO:47; SEQ ID NO:48; SEQ ID NO:49; SEQ ID NO: 50; SEQ ID NO:51; SEQ ID NO:52; SEQ ID NO:53; SEQ ID NO:54; SEQ ID NO:55; SEQ ID NO:56; SEQ ID NO:57; SEQ ID NO:58; SEQ ID NO:60; SEQ ID NO:61; SEQ ID NO: 62; SEQ ID NO: 63; SEQ ID NO:64; SEQ ID NO:65; SEQ ID NO:66; SEQ ID NO:67; SEQ ID NO:68; SEQ ID NO:69; SEQ ID NO:70; SEQ ID NO:71, SEQ ID NO:73; a polynucleotide sequence with at least 90% identity to SEQ ID NO:26; a polynucleotide sequence with at least 90% identity to SEQ ID NO:27; a polynucleotide sequence with at least 90% identity to SEQ ID NO:28; a polynucleotide sequence with at least 90% identity to SEQ ID NO:29; a polynucleotide sequence with at least 90% identity to SEQ ID NO:30; a polynucleotide sequence with at least 90% identity to SEQ ID NO:31; a polynucleotide sequence with at least 90% identity to SEQ ID NO:32; a polynucleotide sequence with at least 90% identity to SEQ ID NO:33; a polynucleotide sequence with at least 90% identity to SEQ ID NO:34; a polynucleotide sequence with at least 90% identity to SEQ ID NO:35; a polynucleotide sequence with at least 90% identity to SEQ ID NO:37; a polynucleotide sequence with at least 90% identity to SEQ ID NO:38; a polynucleotide sequence with at least 90% identity to SEQ ID NO:39; a polynucleotide sequence with at least 90% identity to SEQ ID NO:40; a polynucleotide sequence with at least 90% identity to SEQ ID NO:41; a polynucleotide sequence with at least 90% identity to SEQ ID NO:42; a polynucleotide sequence with at least 90% identity to SEQ ID NO:43; a polynucleotide sequence with at least 90% identity to SEQ ID NO:44; a polynucleotide sequence with at least 90% identity to SEQ ID NO:45; a polynucleotide sequence with at least 90% identity to SEQ ID NO:46; a polynucleotide sequence with at least 90% identity to SEQ ID NO:47; a polynucleotide sequence with at least 90% identity to SEQ ID NO:48; a polynucleotide sequence with at least 90% identity to SEQ ID NO:49; a polynucleotide sequence with at least 90% identity to SEQ ID NO:50; a polynucleotide sequence with at least 90% identity to SEQ ID NO:51; a polynucleotide sequence with at least 90% identity to SEQ ID NO:52; a polynucleotide sequence with at least 90% identity to SEQ ID NO:53; a polynucleotide sequence with at least 90% identity to SEQ ID NO:54; a polynucleotide sequence with at least 90% identity to SEQ ID NO:55; a polynucleotide sequence with at least 90% identity to SEQ ID NO:56; a polynucleotide sequence with at least 90% identity to SEQ ID NO:57; a polynucleotide sequence with at least 90% identity to SEQ ID NO:58; a polynucleotide sequence with at least 90% identity to SEQ ID NO:60; a polynucleotide sequence with at least 90% identity to SEQ ID NO:61; a polynucleotide sequence with at least 90% identity to SEQ ID NO:62; a polynucleotide sequence with at least 90% identity to SEQ ID NO:63; a polynucleotide sequence with at least 90% identity to SEQ ID NO:64; a polynucleotide sequence with at least 90% identity to SEQ ID NO:65; a polynucleotide sequence with at least 90% identity to SEQ ID NO:66; a polynucleotide sequence with at least 90% identity to SEQ ID NO:67; a polynucleotide sequence with at least 90% identity to SEQ ID NO:68; a polynucleotide sequence with at least 90% identity to SEQ ID NO:69; a polynucleotide sequence with at least 90% identity to SEQ ID NO:70; a polynucleotide sequence with at least 90% identity to SEQ ID NO:71; a polynucleotide sequence with at least 90% identity to SEQ ID NO:73.

[0015] In some embodiments, the EPS depolymerase is alginate lyase.

[0016] In some embodiments, one or more of the bacteriophages are engineered. In some embodiments, two or more of the bacteriophages are engineered.

[0017] In some embodiments, a second bacteriophage of the one or more bacteriophages comprises a naturally occurring phage. In some embodiments, two or more bacteriophages of the one or more bacteriophages are naturally occurring phages.

[0018] In some embodiments, at least one of the bacteriophages target Pseudomonas aeruginosa.

[0019] In some embodiments, the one or more bacteriophages of the composition targets one or more of Pseudomonas aeruginosa, antibiotic-resistant Pseudomonas aeruginosa, and multiple antibiotic-resistant Pseudomonas aeruginosa.

[0020] In some embodiments, the one or more bacteriophages of the composition infect and kill one or more of Pseudomonas aeruginosa, antibiotic-resistant Pseudomonas aeruginosa, and multiple antibiotic-resistant Pseudomonas aeruginosa.

[0021] In some embodiments, the compositions further comprise a storage medium for storage at room temperature or a temperature at or below 8° C. In some embodiments, the composition is stored at a temperature ranging from −20° C. to 25° C. In some embodiments, the composition is stored at 2° C. to 8° C. In some embodiments, the composition is stored at room temperature. In some embodiments, the storage medium is for storage at 4° C., 0° C., −20° C., or −80° C.

[0022] In some embodiments, the storage medium comprises a cryoprotectant. In some embodiments, the cryoprotectant comprises glycerol. In some embodiments, the composition comprises between about 5% and about 50% glycerol. In some embodiments, the storage medium comprises about 20% glycerol. In some embodiments, the cryoprotectant comprises sucrose. In some embodiments, the composition comprises between about 5% and about 30% sucrose. In some embodiments, the composition comprises about 10% sucrose. In some embodiments, the cryoprotectant comprises dimethylsulfoxide (DMSO). In some embodiments, the DMSO is at a concentration of between 2% and 10%.

[0023] In some embodiments, the composition further comprises a pharmaceutically acceptable carrier, diluent, excipient or combinations thereof.

[0024] In some embodiments, the composition is a liquid, semi-liquid, solid, frozen, or lyophilized formulation.

[0025] In some embodiments, the composition comprises between 1×10⁸ and 1×10¹² PFU per milliliter of each bacteriophage.

[0026] In some embodiments, the one or more bacteriophages of the composition reduce biofilm mass.

[0027] In yet another aspect of the invention, provided herein is a method for treating a Pseudomonas aeruginosa infection, comprising administering any of the compositions described herein to a subject in need thereof.

[0028] In some embodiments, the composition is administered at a dosage of at least 3×10⁸ PFU of total bacteriophages per dose.

[0029] In some embodiments, the method further comprises administration of an antibiotic. In some embodiments, the antibiotic is selected from the group consisting of fluoroquinolone, carbapenem, aminoglycoside, ansamycin, cephalosporin, penicillin, beta lactam, beta lactamase inhibitor, folate pathway inhibitor, fucidane, glycopeptide, glycylcycline, lincosamide, lipopeptide, macrolide, quinolone, oxazolidinone, phenicol phosphonic acid, streptogramin, tetracycline, sulfonamide, imipenem, meropenem, amikacin, ciprofloxacin, levofloxacin, tobramycin, azithromycin, aztreonam, colistin, inhaled tobramycin, inhaled aztreonam, and inhaled colistin.

[0030] In some embodiments, the method further comprises administration of one or more CFTR modulators. In embodiments, the CFTR modulator may be selected from, but is not necessarily limited to, ivacaftor, lumacaftor/ivacaftor, tezacaftor/ivacaftor, elexacaftor/tezacaftor/ivacaftor, or any combination thereof.

[0031] In some embodiments, the bacterial infection has become resistant to one or more antibiotics selected from a fluoroquinolone, carbapenem, aminoglycoside, ansamycin, cephalosporin, penicillin, beta lactam, beta lactamase inhibitor, folate pathway inhibitor, fucidane, glycopeptide, glycylcycline, lincosamide, lipopeptide, macrolide, quinolone, oxazolidinone, phenicol phosphonic acid, streptogramin, tetracycline, sulfonamide, imipenem, meropenem, amikacin, ciprofloxacin, levofloxacin, tobramycin, azithromycin, aztreonam, colistin, inhaled tobramycin, inhaled aztreonam, and inhaled colistin.

[0032] In some embodiments, the bacteriophage composition is administered via inhalation. In some embodiments, the bacteriophage composition is administered via nebulization. In some embodiments, the bacteriophage composition is administered intravenously.

[0033] In some embodiments, the bacteriophage composition is administered at least once a day. In some embodiments, the bacteriophage composition is administered for at least one day.

[0034] In some embodiments, the subject is human.

[0035] In some embodiments, the subject suffers from cystic fibrosis (CF). In some embodiments, the subject suffers from non-cystic fibrosis bronchiectasis (NCFB).

[0036] In yet another aspect, the present disclosure provides an assay for determining alginate lyase activity of an engineered bacteriophage, comprising administering an effective amount of any of the engineered bacteriophages described herein to a Pseudomonas aeruginosa biofilm and determining reduction in biofilm mass.

[0037] In yet another aspect, the present disclosure provides a method for treating a bacterial infection comprising: (a) selecting a subject having a bacterial infection, and (b) administering to the subject an effective amount of any of the bacteriophages described herein, or any of the bacteriophage compositions described herein, thereby treating the bacterial infection. In some embodiments the subject is selected based upon having previously received a previous therapy for his/her bacterial infection. For example, the subject is selected based upon having already received at least one round of antibiotic treatment for the infection that did not completely resolve the infection or based upon having an infection by a bacterium that is resistant to one or more antibiotics.

[0038] In some embodiments, the bacterial infection is a Pseudomonas infection. In some embodiments, the bacterial infection is a Pseudomonas aeruginosa infection.

[0039] In some embodiments, the bacterial infection is characterized by a biofilm.

[0040] In some embodiments, the subject has cystic fibrosis (CF). In some embodiments, the subject has non-cystic fibrosis bronchiectasis (NCFB).

[0041] In some embodiments, the composition is administered at a dosage of at least 3×10⁸ PFU of total bacteriophages per dose.

[0042] In some embodiments, the method further comprises administration of an antibiotic. In some embodiments, the antibiotic is selected from the group consisting of fluoroquinolone, carbapenem, aminoglycoside, ansamycin, cephalosporin, penicillin, beta lactam, beta lactamase inhibitor, folate pathway inhibitor, fucidane, glycopeptide, glycylcycline, lincosamide, lipopeptide, macrolide, quinolone, oxazolidinone, phenicol phosphonic acid, streptogramin, tetracycline, sulfonamide, imipenem, meropenem, amikacin, ciprofloxacin, levofloxacin, tobramycin, azithromycin, aztreonam, colistin, inhaled tobramycin, inhaled aztreonam, and inhaled colistin.

[0043] In some embodiments, the method further comprises administration of one or more CFTR modulators. In embodiments, the CFTR modulator may be selected from, but is not necessarily limited to, ivacaftor, lumacaftor/ivacaftor, tezacaftor/ivacaftor, elexacaftor/tezacaftor/ivacaftor, or any combination thereof.

[0044] In some embodiments, the bacterial infection has become resistant to one or more antibiotics selected from a fluoroquinolone, carbapenem, aminoglycoside, ansamycin, cephalosporin, penicillin, beta lactam, beta lactamase inhibitor, folate pathway inhibitor, fucidane, glycopeptide, glycylcycline, lincosamide, lipopeptide, macrolide, quinolone, oxazolidinone, phenicol phosphonic acid, streptogramin, tetracycline, sulfonamide, imipenem, meropenem, amikacin, ciprofloxacin, levofloxacin, tobramycin, azithromycin, aztreonam, colistin, inhaled tobramycin, inhaled aztreonam, and inhaled colistin.

[0045] In some embodiments, the bacteriophage composition is administered via inhalation. In some embodiments, the bacteriophage composition is administered via nebulization.

[0046] In some embodiments, the bacteriophage composition is administered at least once a day. In some embodiments, the bacteriophage composition is administered for at least one day.

[0047] In some embodiments, the subject is human.

[0048] In yet another aspect, the present disclosure provides a method for making an engineered bacteriophage, comprising providing a bacteriophage and incorporating an exopolysaccharide (EPS) depolymerase into the bacteriophage.

[0049] In some embodiments, the EPS depolymerase is alginate lyase. In some embodiments, the alginate lyase comprises Alg2A or A1-III. In some embodiments, the alginate lyase comprises Alg2A. In some embodiments, the alginate lyase comprises A1-III.

[0050] In some embodiments, the bacteriophage belongs to the Genus Phikmvvirus. In some embodiments, the bacteriophage belongs to the Genus Pakpunavirus. In some embodiments, the bacteriophage belongs to the Genus Bruynoghevirus. In some embodiments, the bacteriophage belongs to the Genus Pbunavirus.

[0051] In yet another aspect, the present disclosure provides a kit comprising any of the bacteriophages described herein, or any of the bacteriophage compositions described herein, and instructions for using the same.

[0052] In some embodiments, the kit further comprises an antibiotic.

[0053] In some embodiments, the kit further comprises a means of administering the bacteriophage or bacteriophage composition. In some embodiments, the means comprises a syringe, a transdermal patch, a slow-release device, a spray, a nebulizer, an inhaler, or a respirator. In some embodiments, the slow-release device comprises a mini-osmotic pump.

[0054] In some embodiments, the kit further comprises a second bacteriophage or bacteriophage composition.

[0055] In yet another aspect, the present disclosure provides a bacteriophage composition comprising one or more bacteriophages engineered to express an exopolysaccharide (EPS) depolymerase, wherein the one or more bacteriophages belong to the Genus Phikmvvirus, Pakpunavirus, Bruynoghevirus, and/or Pbunavirus.

### BRIEF DESCRIPTION OF THE DRAWINGS

[0056] Embodiments will now be described, by way of example only, with reference to the accompanying drawings, in which:

[0057] FIG. 1 shows various degrees of bacterial clearance by different variants of an engineered bacteriophage of SEQ ID NO:2 on a preformed biofilm, compared to a saline control (PBS).

[0058] FIGS. 2A-2B show the alginate lyase activity displayed by various transgenic phages. FIG. 2A shows a top-lit view of phage spotted on preformed lawns of mucoid, alginate expressing strains of Pseudomonas aeruginosa (strain 15844) where activity presents as a crater or indentation lawn at the site of application. FIG. 2B shows a bottom-lit view of the same plate seen in 4A, where phage spotted on preformed lawns of mucoid, alginate expressing strains of Pseudomonas aeruginosa (strain 15844) can be seen as circular indentations on the lawn at the site of application.

[0059] FIG. 3 shows Western blotting detection of alginate lyase (AlgL) A1-III-His₆ in lysates of APBP1-1, APBP1-2, and APBP3-2.

[0060] FIG. 4 shows the position of the N-terminal fragment A1-III of Sphingomonas sp. Alginate lyase Aly and several variations of this fragment.

[0061] FIGS. 5A-5D show the difference in expression and activity between the A1-III fragments 70-399 and 54-412. FIG. 5A shows a Western blot of the 70-399 fragment, showing that it expresses poorly in E. coli. FIG. 5B shows Western blot of the 54-412 fragment, showing that it expresses well in E. coli. FIG. 5C shows activity of various clones on 2% seaweed alginate plates. A1-C7 is a clone with the correct sequence of A1-III with a C-terminal His tag. A1-C4 is a clone with a frameshift mutation resulting in no expression of A1-III. A1-III expression was performed by induction at mid-log after RT incubation (not shaking) for 30 min with 0.5 mM IPTG. A1-III-His₆ was purified from cell lysates using Ni-NTA affinity columns and spotted on a plate containing 2% alginate with commercial alginate lyase from Sigma-Aldrich as a control. FIG. 5D shows activity of the A1-III protein expressed and purified from clone A1-C7 on preformed lawns of mucoid, alginate-expressing strains of Pseudomonas aeruginosa (strain 15840). AL10 is 10 ng of alginate lyase purchased from Sigma-Aldrich as control, A1-III 10 is 10 ng of purified A1-III. 50, 1, 0.5 and 0.1 refer to the amount of A1-III spotted in ng.

[0062] FIGS. 6A-6D show that alginate lyase A1-III is expressed as a fusion protein with gp13 when engineered downstream of APBP4 gp13.1. FIG. 6A shows a Western blot of lysates of engineered phages carrying the A1-III alginate lyase payload (left) and a table identifying the contents of each lane (right). Box indicates bands corresponding to the fusion protein. FIG. 6B shows the DNA sequence around the C-terminus of A1-III illustrating how trans-reading the TGA stop codon of A1-III-His₆ could lead to an in-frame fusion protein with gp13 through a 19 aa-long “anti-terminated linker”. FIG. 6C shows the putative sequence of the A1-III-His₆-linker-gp13 fusion protein generated in lysates of APBP4-4. Residues in bold correspond to the A1-III-His₆ sequence, underlined resides correspond to gp13, grey residues denote the putative linker and the black highlighted tryptophan residue is a likely way for the cell to misread a TGA stop codon of A1-III-His₆. FIG. 6D illustrates that APBP4-4 shows no activity on a mucoid lawn of alginate-producing Pseudomonas aeruginosa strain 15844, indicating the fusion protein is non-functional.

[0063] FIG. 7 shows Western blot expression of lysates of engineered phages carrying the A1-III alginate lyase payload (left) and a table identifying the contents of each lane (right).

[0064] FIGS. 8A-8B show results from cloning two codon usage matrices for alginate lyase A1-III into phages. FIG. 8A shows a sequence alignment between the two different codon usage matrices. FIG. 8B shows alginate lyase activity of phages expressing the respective payloads on a mucoid lawn of P. aeruginosa 15844.

[0065] FIGS. 9A-9I show examples of alginate lyase activity profiles from lysates of engineered phages expressing various configurations of A1-III; FIG. 9A shows activity of A1-III⁷⁰⁻³⁹⁹ engineered into APBP4-1, FIG. 9B shows activity of A1-III⁷⁰⁻³⁹⁹ engineered into APBP17-1, FIG. 9C shows activity of A1-III⁵⁴⁻⁴⁰⁸ engineered into APBP1-4, FIG. 9D shows activity of A1-III⁵⁴⁻⁴⁰⁸ engineered into APBP4-5, FIG. 9E shows activity of A1-III⁵⁴⁻⁴¹²-His₆ engineered into APBP18-1, FIG. 9F shows activity of A1-III⁵⁴⁻⁴¹²-His₆ engineered into APBP1-2, FIG. 9G shows activity of A1-III⁵⁴⁻⁴¹²-His₆ engineered into APBP3-6, FIG. 9H shows activity of A1-III⁵⁴⁻⁴¹²-His₆ engineered into APBP1-1, and FIG. 9I shows activity of A1-III⁵⁴⁻⁴¹²-His₆ engineered into APBP3-2.

[0066] FIGS. 10A-10E show that Flavobacterium Alg2A (accession number AEB69783) expressed from multiple phages has alginate lyase activity whether it retains its N-terminal signal sequence, is tagged with a C-terminal His₆-tag, or is encoded by 4 different genes. FIG. 10A shows an alignment of different versions of Alg2A protein cloned in a variety of phages. FIG. 10B shows alginate lyase activity by phages expressing the full-length Alg2A with a C-terminus His tag on mucoid lawns of alginate-producing Pseudomonas aeruginosa strain 15844. FIG. 10C shows alginate lyase activity of phages expressing the shorter signal sequence-deleted version of Alg2A²³⁻²⁸⁸ without a His₆-tag. FIG. 10D illustrates the percent identity between the different genes coding for the Alg2A²³⁻²⁸⁸ protein and cloned in APBP3. FIG. 10E shows alginate lyase activity of APBP3-derived phages expressing Alg2A²³⁻²⁸⁸ from SEQ ID NO:37, SEQ ID NO:38, or SEQ ID NO:39 on mucoid lawns of alginate-producing Pseudomonas aeruginosa strain 15844.

[0067] FIG. 11 shows alginate lyase activity on a preformed mucoid lawn by a cocktail of phages engineered with either A1-III or Alg2A.

[0068] FIG. 12 shows that growth of phages APBP1-1, APBP1-2, APBP3-1, and APBP3-2 is not altered by expression of alginate lyase protein A1-III.

[0069] FIGS. 13A-13F shows results from a host range improvement assay using different bacteriophages with or without alginate lyase activity. Phage dilution increases 10-fold in each spot from top to bottom. FIG. 13A illustrates that phages all show the same titer on their host, Pseudomonas aeruginosa 7299. FIG. 13B On Pseudomonas aeruginosa strain PS 30, APBP3-1 shows clearing down to the 10⁻² dilution while its parent APBP3 does not plaque at all on this strain. Similarly, APBP1-1 and APBP1-2 plaque on the host (Pseudomonas aeruginosa strain PS 30), while their parent APBP1 does not. FIG. 13C APBP1-1 and APBP1-2 show improved clearing on the Pseudomonas aeruginosa strain 7176, compared to their parent APBP1. FIG. 13D The apparent titer of APBP1-1 and APBP1-2 is ˜2⁸ PFU/ml on Pseudomonas aeruginosa strain 15843, while the apparent titer of APBP1 (their parent) is only around ten-fold lower at ˜2⁷ PFU/ml. FIG. 13E On Pseudomonas aeruginosa strain 15839, APBP3-1 shows clearing while its parent APBP3 does not plaque at all on this strain. APBP1-1 and APBP1-2 also produce clearings on the host while their parent APBP1 does not. FIG. 13F APBP3-1 shows increased clearing compared to parent APBP3 on this Pseudomonas aeruginosa strain 15840. APBP1-1 and APBP1-2 also show improved clearing compared to APBP1.

[0070] FIG. 14 is a graph showing the ability of different phage strains expressing no lyase (WT), A1-III (Eng-A1-III) or Alg2A (Eng-Alg2A) to disrupt biofilms.

[0071] FIGS. 15A-15D illustrate the suitability of various loci in the APBP6 phage genome for engineering of A1-III. FIG. 15A Representation of the recombination between pLIX36 and APBP6 to integrate A1-III between gp038 and gp039. FIG. 15B Representation of the recombination between pLIX46 and APBP6 to integrate A1-III between gp005 and gp006. FIG. 15C Agarose gel showing insertion of A1-III in APBP6, when grown on a pLIX36-containing strain (left) then passaged on a strain without (right). FIG. 15D Agarose gel showing insertion of A1-III in APBP6, when grown on a pLIX46-containing strain (left) then passaged on a strain without (right).

[0072] FIG. 16 is a Western blot showing that engineered phages ABP4-6, ABP18-2, ABP6-3 express alginate lyase protein Alg2A²³⁻²⁸⁸ (left) and a table identifying the contents of each lane (right).

[0073] FIG. 17 is a Western blot showing that engineered phages APBP3-5 and APBP1-5 express alginate lyase protein Alg2A¹⁻²⁸⁸ and Alg2A²³⁻²⁸⁸, respectively (left) and a table identifying the contents of each lane (right).

[0074] FIG. 18 is a Western blot of lysates of engineered phages carrying the A1-III⁵⁴⁻⁴¹² or A-III⁵⁴⁻⁴⁰⁸ alginate lyase gene (left) and a table identifying the contents of each lane (right).

### DETAILED DESCRIPTION

[0075] As noted above, there is an antibiotic crisis in the world. Bacterial illness is an ever-present concern, while increasing antibiotic resistance means the number of available and effective antibiotics continues to shrink. The embodiments and aspects of this application provide exciting alternative solutions to the use of standard antibiotics. These embodiments and inventions are the result of significant, non-trivial inventive effort, and the solving of technical challenges and hurdles.

[0076] As a result, embodiments and aspects described herein generally relate to novel and inventive bacteriophages, for example, effective for treating Pseudomonas infections, alone or in combinations. Described are methods of treating Pseudomonas bacterial infections generally, but also certain types of infections, for example, respiratory infections, infections associated with fibrosis, pneumonia, etc. Storage and manufacturing compositions and methods are described. The various embodiments and aspects present exciting and critically needed solutions for the antibiotic crisis across the world.

[0077] It is to be understood that the present disclosure is not limited to particular embodiments described, as such may, of course, vary. It is also to be understood that the terminology used herein is for the purpose of describing particular embodiments only, and is not intended to be limiting, since the scope of the present disclosure will be limited only by the appended claims.

[0078] The detailed description of the present disclosure is divided into various sections only for the reader's convenience and disclosure found in any section may be combined with that in another section. Unless defined otherwise, all technical and scientific terms used herein have the same meaning as commonly understood by one of ordinary skill in the art to which the present disclosure belongs.

### Definitions

[0079] It must be noted that as used herein and in the appended claims, the singular forms “a,” “an,” and “the” include plural referents unless the context clearly dictates otherwise. Thus, for example, reference to “a bacteriophage composition” includes a plurality of such candidate agents and reference to “the bacteriophage” includes reference to one or more bacteriophages and equivalents thereof known to those skilled in the art, and so forth.

[0080] In this disclosure, “comprises,” “comprising,” “containing” and “having” and the like can have the meaning ascribed to them in U.S. Patent law and can mean “includes,” “including,” and the like. “Consisting essentially of” or “consists essentially” likewise has the meaning ascribed in U.S. Patent law and the term is open-ended, allowing for the presence of more than that which is recited so long as basic or novel characteristics of that which is recited is not changed by the presence of more than that which is recited, but excludes prior art embodiments. “Consisting of” shall mean excluding more than trace elements of other ingredients and substantial method steps. Embodiments defined by each of these transition terms are within the scope of this disclosure.

[0081] The term “consists essentially of” as used herein means that only the bacteriophage(s) explicitly indicated are present in the bacteriophage composition, but that said composition may also contain a further non-bacteriophage constituent, such as a pharmaceutically appropriate carrier, diluent, excipient, antibiotic (e.g., chemical antibiotic), etc., or combinations thereof.

[0082] As used herein, the term “about” when used before a numerical designation, e.g., temperature, time, amount, concentration, and such other, including a range, indicates approximations which may vary by (+) or (−) 10%, 5%, or 1%. All values in this disclosure are preceded by the term “about,” even if not explicitly recited.

[0083] When a range (e.g., dosage range) is listed herein, it is to be understood that the value may include any individual value or range within the recited range(s), including endpoints.

[0084] As used herein, the terms “mutant” and “variant” are used interchangeably, and refer to a bacteriophage differing genetically from a reference bacteriophage, but that still retains the ability to infect and kill target bacteria, e.g., Pseudomonas aeruginosa. For example, “mutant” can refer to a bacteriophage that has mutated genetically compared to one or more of SEQ ID NO:1 to SEQ ID NO:11 and/or any of the other bacteriophage referenced or described herein, but that still retains the ability to infect and kill Pseudomonas aeruginosa target bacteria. Mutants can comprise e.g., silent mutations, conservative mutations, minor deletions, and/or minor replications of genetic material, and retain phenotypic characteristics of the reference bacteriophage. In embodiments, a “mutant” may be a bacteriophage progeny. A bacteriophage progeny may be a bacteriophage obtainable after lysing Pseudomonas (e.g., P. aeruginosa) target bacteria using a bacteriophage as described herein (i.e., the “parent bacteriophage”). In other words, the bacteriophage progeny may be a second (or further) generation bacteriophage. In an embodiment, the mutants retain any observable characteristic or property that is dependent upon the genome of the bacteriophage as described herein, i.e. phenotypic characteristics of said bacteriophage and/or lytic activity against Pseudomonas species or strains. Preferred mutants retain the ability to infect and kill Pseudomonas aeruginosa target bacteria and have less than 10% nucleic acid variation as compared to the genome of the reference bacteriophage, even more preferably less than 7%, more preferably less than 1%. Alternatively, or in combination, mutants have preferably less than 7% amino acid variation in a coded polypeptide sequence as compared to a polypeptide of the reference bacteriophage.

[0085] As used herein, the terms “% identity,” “% sequence identity” and “percent identity” in relation to nucleic acid or amino acid sequences designates the level of identity or homology between said sequences and may be determined by techniques known in the art. Any of a variety of sequence alignment methods can be used to determine percent identity, including, without limitation, global methods, local methods and hybrid methods, such as segment approach methods. Protocols to determine percent identity are routine procedures within the scope of one skilled in the art. Global methods align sequences from the beginning to the end of the molecule and determine the best alignment by adding up scores of individual nucleotide pairs and by imposing gap penalties. Non-limiting methods include, e.g., CLUSTAL W, see, e.g., Julie D. Thompson et al., CLUSTAL W: Improving the Sensitivity of Progressive Multiple Sequence Alignment Through Sequence Weighting, Position-Specific Gap Penalties and Weight Matrix Choice, 22(22) Nucleic Acids Research 4673-4680 (1994); and iterative refinement. Non-limiting methods include, e.g., BLAST, Match-box, see, e.g., Align-M, see, e.g., Ivo Van Walle et al., Align-M—A New Algorithm for Multiple Alignment of Highly Divergent Sequences, Bioinformatics 20(9):1428-1435 (2004). This definition also refers to, or may be applied to, the complement of a test sequence. The definition also includes sequences that have deletions and/or additions, as well as those that have substitutions. As described below, the preferred algorithms can account for gaps and the like. Preferably, identity exists over a region that is at least about 100 nucleotides in length, or more preferably over a region that is 100-1000 or more nucleotides in length.

[0086] As used herein, the terms “treating” or “treatment” (and as well understood in the art) are used in accordance with their plain and ordinary meaning and broadly includes any approach for obtaining beneficial or desired results in a subject's condition, including clinical results. Beneficial or desired clinical results can include, but are not limited to, alleviation or amelioration of one or more symptoms or conditions, diminishment of the extent of a disease, stabilizing (i.e., not worsening) the state of disease, prevention of a disease's transmission or spread, delay or slowing of disease progression, amelioration or palliation of the disease state, diminishment of the reoccurrence of disease, and remission, whether partial or total and whether detectable or undetectable. In other words, “treatment” as used herein includes any cure, amelioration, or prevention of a disease. Treatment may prevent the disease from occurring; inhibit the disease's spread; relieve the disease's symptoms, fully or partially remove the disease's underlying cause, shorten a disease's duration, or do a combination of these things. As used herein, the term “treat” or “treating” is intended to encompass prophylactic treatment as well as corrective treatment (treatment of a subject already suffering from a disease).

[0087] As used herein, the term “administering” means oral, intravenous, parenteral, intraperitoneal, intramuscular, intrathecal, intranasal, pulmonary, or subcutaneous administration for example, or the implantation of a slow-release device, e.g., a mini-osmotic pump, to a subject. Administration is by any route, including parenteral and transmucosal (e.g., buccal, sublingual, palatal, gingival, nasal, vaginal, rectal, or transdermal). Parenteral administration includes, e.g., intravenous, intramuscular, intra-arteriole, intradermal, subcutaneous, intraperitoneal, intraventricular, and intracranial. Other modes of delivery include, but are not limited to, the use of liposomal formulations, intravenous infusion, transdermal patches, and the like. In embodiments, the administering does not include administration of any active agent other than the recited active agent. In embodiments, administration of compositions described herein is by intravenous administration. In embodiments, administration of compositions described herein is by intranasal administration such as inhalation or nebulization. In embodiments, administration may be pulmonary delivery via nasal or oral administration (e.g. by aerosolization or nebulization).

[0088] “Co-administer” it is meant that a composition described herein is administered at the same time, just prior to, or just after the administration of one or more additional therapies. The compounds provided herein can be administered alone or can be co-administered to the patient. Co-administration is meant to include simultaneous or sequential administration of the compounds individually or in combination (more than one compound). Thus, the preparations can also be combined, when desired, with other active substances (e.g. antibiotic).

[0089] As used herein, the term “lytic” or “lytic activity” designates the property of a bacteriophage to cause lysis of a bacterial cell. The lytic activity of a bacteriophage can be tested on a bacterium (e.g., P. aeruginosa strains) according to techniques known in the art. The lytic cycle is named for the process that occurs when a phage has infected a cell, replicated new phage particles, and bursts through the host cell membrane. Some phage exhibit a lysogenic cycle during which the bacteriophage DNA remains practically dormant due to active repression of bacteriophage processes. Whenever the bacterium divides, the DNA of the phage is copied as well. In this way, the virus can continue replicating within its host without lysing the host. At a certain point, conditions may change and the phage enters a lytic cycle. “Obligately lytic” refers to phage that are unable to undergo a lysogenic cycle.

[0090] As used herein, the term “bacteriophage target” refers to any bacteria species that can be infected by a particular bacteriophage. A bacteriophage recognizes the target bacterial cell surface, binds, and injects its genetic material inside the bacterial host. The genetic material from the infecting phage can be incorporated into the bacterial genome. The bacteriophage may become lysogenic, where the viral genome remains dormant in the bacterial host genome until a triggering event. The bacteriophage may also become lytic, wherein many copies of the infecting phage are produced by the machinery of the infected bacteria, and the copies are subsequently released by bacterial lysis, extrusion, or by budding. In embodiments, the bacterial target is Pseudomonas aeruginosa.

[0091] As used herein, the term “bacterial host manufacturing strain” or “manufacturing strain” refers to the bacteria used to grow bacteriophage. A method for bacteriophage production may require a production process involving at least two operating units, growth of the host bacteria and bacteriophage propagation (or infection). It is important to consider basic parameters for bacterial growth and phage infection, such as the selected substrates for the bacterium and the optimal temperature, both for bacterial growth and phage infection, since these factors may influence the infectivity of phages.

[0092] A use or method typically comprises administering a bacteriophage or bacteriophage composition described herein to a subject. As used herein, the term “subject” or “patient” refers to a human or non-human animal. Preferably, the subject is a human. Preferably, the subject or patient is in need of treatment with the composition as described herein, e.g., has a bacterial infection susceptible to treatment with the composition.

[0093] As used herein, the term “isolated” indicates that the bacteriophage are removed from its original environment in which it naturally occurs. In particular, an isolated bacteriophage is, e.g., cultivated, cultured separately from the environment in which it is naturally located.

[0094] As used herein, the term “purified” indicates that the bacteriophages are removed from nature and/or a manufacturing host bacteria. In particular, a purified bacteriophage has production impurities, such as bacterial components, substantially removed from its manufacturing or production environment. Bacterial components include but are not limited to bacterial host proteins, lipids, and/or bacterial endotoxin. The term “purified” may also refer to genetic purification in which the strain of bacteriophage is genetically homogenous. In some embodiments, the purified bacteriophage comprises a bacteriophage that is at least 99% pure, or at least 99% of the desired population of bacteriophages.

[0095] As used herein, the term “substantially purified” refers to a composition containing less than 1%, less than 0.1%, less than 0.001%, or no detectable amount of contaminants such as host bacterial proteins or endotoxin. Also, as used herein, the term “substantially pure” when used to describe a bacteriophage strain refers to the genetic purity of the composition such that the strain is greater than 99%, greater than 99.9%, greater than 99.999%, or 100% of one particular genome sequence.

[0096] Typically, a composition is substantially pure when at least 80%, at least 85%, at least 90%, at least 95%, at least 98%, or at least 99% (or any sub value or subrange therebetween) of the total material (by volume, by wet or dry weight, or by mole percent or mole fraction) in a sample is free of impurities or genetic variants.

[0097] As used herein, the “synergistic amount” refers to the sum of a first amount (e.g., a bacteriophage) and a second amount (e.g., a different bacteriophage) that results in a synergistic effect (i.e. an effect greater than an additive effect). Therefore, the terms “synergy”, “synergism”, “synergistic”, “combined synergistic amount”, and “synergistic therapeutic effect” which are used herein interchangeably, refer to a measured effect of the compound administered in combination where the measured effect is greater than the sum of the individual effects of each of the compounds provided herein administered alone as a single agent.

[0098] As used herein, the term “substantially free” refers to something having less than 10% of the substance that it is to be free from. For example, 0.01% to 10% free of the substance, including any subvalue and subrange therein, including endpoints. For example, 0.01, 0.02, 0.03, 0.04, 0.05, 0.06, 0.07, 0.08, 0.09, 1, 2, 3, 4, 5, 6, 7, 8, 9, or 10% (or any sub value or subrange therebetween, inclusive of endpoints).

[0099] As used herein, the term “obtainable” as used herein also encompasses the term “obtained.” In one embodiment, the term “obtainable” means obtained.

[0100] As used herein, the terms “pharmaceutically acceptable excipient,” “pharmaceutically acceptable diluent,” and “pharmaceutically acceptable carrier” refer to a substance that aids the administration of an active agent to and absorption by a subject and can be included in the compositions of the present disclosure without causing a significant adverse toxicological effect on the patient. Non-limiting examples of pharmaceutically acceptable excipients include water, NaCl, normal saline solutions, lactated Ringer's, normal sucrose, normal glucose, binders, fillers, disintegrants, lubricants, coatings, sweeteners, flavors, salt solutions (such as Ringer's solution), alcohols, oils, gelatins, carbohydrates such as lactose, amylose or starch, fatty acid esters, hydroxymethycellulose, polyvinyl pyrrolidine, and colors, and the like. Such preparations can be sterilized and, if desired, mixed with auxiliary agents such as lubricants, preservatives, stabilizers, wetting agents, emulsifiers, salts for influencing osmotic pressure, buffers, coloring, and/or aromatic substances and the like that do not deleteriously react with the compounds of the disclosure. One of skill in the art will recognize that other pharmaceutical excipients are useful in the present disclosure.

[0101] As used herein, the term “pharmaceutically acceptable salts” is meant to include salts of the active compounds that are prepared with relatively nontoxic acids or bases, depending on the particular substituents found on the compounds described herein. When compounds of the present disclosure contain relatively acidic functionalities, base addition salts can be obtained by contacting the neutral form of such compounds with a sufficient amount of the desired base, either neat or in a suitable inert solvent. Examples of pharmaceutically acceptable base addition salts include sodium, potassium, calcium, ammonium, organic amino, or magnesium salt, or a similar salt. When compounds of the present disclosure contain relatively basic functionalities, acid addition salts can be obtained by contacting the neutral form of such compounds with a sufficient amount of the desired acid, either neat or in a suitable inert solvent. Examples of pharmaceutically acceptable acid addition salts include those derived from inorganic acids like hydrochloric, hydrobromic, nitric, carbonic, monohydrogencarbonic, phosphoric, monohydrogenphosphoric, dihydrogenphosphoric, sulfuric, monohydrogensulfuric, hydriodic, or phosphorous acids and the like, as well as the salts derived from relatively nontoxic organic acids like acetic, propionic, isobutyric, maleic, malonic, benzoic, succinic, suberic, fumaric, lactic, mandelic, phthalic, benzenesulfonic, p-tolylsulfonic, citric, tartaric, oxalic, methanesulfonic, and the like. Also included are salts of amino acids such as arginate and the like, and salts of organic acids like glucuronic or galactunoric acids and the like.

[0102] As used herein, the term “persist” refers to the ability to remain present or continue to exist past a usual, expected, or normal time.

[0103] As used herein, “improved,” “broadened” or “broader” in the context of bacteriophage target range refers to increased host range. Host range is the number of cell types, strains, or host species a virus/bacteriophage (or combination of viruses) is able to infect. Increase of host range or target bacteria range is an expansion of the absolute number of distinct cell types, strains, or species a virus (or combination of viruses) is able to infect compared to a reference and/or non-engineered virus. In some examples, increased host range or increased target bacteria range is an increase in the number of bacterial strains or variants within a bacterial species that the virus (or combination of viruses) is able to infect. The increase in host range can be an increase of at least one or more than one strain, cell type, or species. Host range can be assayed, for example, by a standard plaque assay that is well known in the art.

[0104] As used herein, “multiplicity of infection (MOI)” is the ratio of the numbers of virus particles to the numbers of the host cells in a given infection medium. A value of MOI=1 implies that on an average there is a single host cell for a single phage particle.

[0105] As used herein, “partially synthetic” phage refers to a phage for which a limited, fractional, or substantial portion of the genome has been designed or engineered. As used herein, “fully synthetic” phage refers to a phage for which the entire genome has been designed or engineered.

[0106] Additional terms and phrases are defined below.

### Engineered Bacteriophages

[0107] In some embodiments, the present disclosure relates to one or more bacteriophages engineered to express a heterologous gene. In some embodiments, the heterologous gene may comprise an exopolysaccharide (EPS) depolymerase, an enzyme that breaks down a polysaccharide into smaller fragments. Bacteriophages of the Podoviridae family often exhibit so-called depolymerases as structural components of the virion. These enzymes appear as tail spike proteins. After specific binding to capsular polysaccharides, exopolysaccharides (EPS) or lipopolysaccharide (LPS) of the host bacteria, polysaccharide-repeating units are specifically cleaved. Finally, the phage reaches the outer membrane, deploys machinery that allows it to inject its DNA across both membranes and the cell wall, and infects the cell.

[0108] A depolymerase is a structural component of the adsorption apparatus, which facilitates binding and digestion of capsules. The name indicates that the repeating unit of a polysaccharide is cleaved and disintegrated. Biochemically, depolymerases are divided into two groups, lyases and hydrolases. Lyases, in contrast to hydrolases, cleave their substrates non-hydrolytically, meaning that no water molecule is released after substrate cleaving. Most of the well-characterized phage encoded depolymerases, which target EPS or LPS 0-polysaccharides, are lyases (Tomlinson and Taylor, 1985; Linnerborg et al., 2001; Olszak et al., 2017). They generally feature great diversity in substrate specificity. However, a particular cleavage site may be present in different polysaccharide types, thereby allowing the enzyme to act on two different substrates. The term depolymerase can refer to any generic protein that is able to degrade polymers. From this perspective, phage encoded endolysins are also depolymerases, since they cleave the peptidoglycan, a bacterial polysaccharide in general in a hydrolase manner (Schmelcher and Loessner, 2016).

[0109] In some embodiments, the EPS depolymerase comprises alginate lyase. Alginate is a linear polysaccharide that has been isolated from a variety of organisms, ranging from plants and bacteria to fungi. It is also a major component of the cell wall in brown algae and a major source of fixed carbon for other organisms. Alginate lyase belongs to the family of lyases, specifically those carbon-oxygen lyases acting on polysaccharides, whereby it catalyzes the degradation of alginate into various monosaccharide and polysaccharide products. The systematic name of this enzyme class is poly(beta-D-1,4-mannuronide) lyase. Other names in common use include, without limitation, alginate lyase I, alginate lyase, alginase I, alginase II, alginase, and alginate lyase III. This enzyme participates in fructose and mannose metabolism.

[0110] In some embodiments, the present disclosure provides bacteriophages engineered to express Alg2A. In some embodiments, the present disclosure provides bacteriophages engineered to express A1-III. In some embodiments, the EPS depolymerase sequences described herein may include portions of, or functional fragments of an EPS depolymerase gene. In some embodiments, they may include a whole EPS depolymerase gene.

[0111] As used herein, the terms “functional fragment” or “functional variant” refer to a molecule, including a nucleic acid or protein, for example, that comprises a nucleotide and/or amino acid sequence that is altered by one or more nucleotides and/or amino acids compared to the nucleotide and/or amino acid sequences of the parent or reference molecule. For a protein, a functional variant is still able to function in a manner that is similar to the parent molecule. In other words, the modifications in the amino acid and/or nucleotide sequence of the parent molecule do not significantly affect or alter the functional characteristics of the molecule encoded by the nucleotide sequence or containing the amino acid sequence. The functional variant may have conservative sequence modifications including nucleotide and amino acid substitutions, additions and deletions. These modifications can be introduced by standard techniques known in the art, such as direct DNA synthesis, site-directed mutagenesis and random PCR-mediated mutagenesis. Functional variants can also include, but are not limited to, derivatives that are substantially similar in primary structural sequence, but which contain, e.g., in vitro or in vivo modifications, chemical and/or biochemical, that are not found in the parent molecule. Such modifications include, inter alia, acetylation, acylation, ADP-ribosylation, amidation, covalent attachment of flavin, covalent attachment of a heme moiety, covalent attachment of a nucleotide or nucleotide derivative, covalent attachment of a lipid or lipid derivative, covalent attachment of phosphotidylinositol, cross-linking, cyclization, disulfide bond formation, demethylation, formation of covalent cross-links, formation of cysteine, formation of pyroglutamate, formylation, gamma-carboxylation, glycosylation, GPI-anchor formation, hydroxylation, iodination, methylation, myristoylation, oxidation, pegylation, proteolytic processing, phosphorylation, prenylation, racemization, selenoylation, sulfation, transfer-RNA-mediated addition of amino acids to proteins such as arginylation, ubiquitination, and the like.

[0112] The EPS depolymerase may be from any organism that expresses an EPS depolymerase. In some embodiments, the EPS depolymerase may originate from bacterial genera selected from, but not necessarily limited to members of Sphingomonas, Flavobacterium, Pseudomonas, Klebsiella, Corynebacterium, Alteromonas, Zobelia, Aplysia, Vibrio, Saccharophagus, Stenotrophomonas, Streptomyces, Shewanella, Agrobacterium, and/or Azotobacter. Specifically, the EPS depolymerase may originate from, but is not necessarily limited to, Sphingomonas (accession no. BAB03312), Flavobacterium (accession no. AEB69783), Pseudomonas (accession no. 1VAV), Klebsiella (accession no. 40ZX), Corynebacterium (accession no. 1UAI), Alteromonas (accession no. 1J1T), Zobelia (accession nos. 3ZPY, 4BE3), Pseudoalteromonas (accession no. 4Q8K), Aplysia (accession no. 5GMT), Vibrio (accession no. WP_017072010.1), Saccharophagus (accession no. WP_011469755.1), Stenotrophomonas (accession no. WP_049467230.1), Streptomyces (accession no. NED67686.1), Shewanella (accession no. WP_188926150.1), Agrobacterium (accession no. WP_046801053.1), Azotobacter (accession no. Q9ZFG9).

[0113] In some embodiments, the EPS depolymerase is encoded by the nucleotide sequence of SEQ ID NO:20. In some embodiments, the EPS depolymerase is encoded by a sequence having at least 90% identity to the sequence of SEQ ID NO:20. In some embodiments, the EPS depolymerase is encoded in a sequence having at least 91% identity to the sequence of SEQ ID NO:20. In some embodiments, the EPS depolymerase is encoded in a sequence having at least 92% identity to the sequence of SEQ ID NO:20. In some embodiments, the EPS depolymerase is encoded in a sequence having at least 93% identity to the sequence of SEQ ID NO:20. In some embodiments, the EPS depolymerase is encoded in a sequence having at least 94% identity to the sequence of SEQ ID NO:20. In some embodiments, the EPS depolymerase is encoded in a sequence having at least 95% identity to the sequence of SEQ ID NO:20. In some embodiments, the EPS depolymerase is encoded in a sequence having at least 96% identity to the sequence of SEQ ID NO:20. In some embodiments, the EPS depolymerase is encoded in a sequence having at least 97% identity to the sequence of SEQ ID NO:20. In some embodiments, the EPS depolymerase is encoded in a sequence having at least 98% identity to the sequence of SEQ ID NO:20. In some embodiments, the EPS depolymerase is encoded in a sequence having at least 99% identity to the sequence of SEQ ID NO:20.

[0114] In some embodiments, the EPS depolymerase is encoded by the nucleotide sequence of SEQ ID NO:21. In some embodiments, the EPS depolymerase is encoded by a sequence having at least 90% identity to the sequence of SEQ ID NO:21. In some embodiments, the EPS depolymerase is encoded in a sequence having at least 91% identity to the sequence of SEQ ID NO:21. In some embodiments, the EPS depolymerase is encoded in a sequence having at least 92% identity to the sequence of SEQ ID NO:21. In some embodiments, the EPS depolymerase is encoded in a sequence having at least 93% identity to the sequence of SEQ ID NO:21. In some embodiments, the EPS depolymerase is encoded in a sequence having at least 94% identity to the sequence of SEQ ID NO:21. In some embodiments, the EPS depolymerase is encoded in a sequence having at least 95% identity to the sequence of SEQ ID NO:21. In some embodiments, the EPS depolymerase is encoded in a sequence having at least 96% identity to the sequence of SEQ ID NO:21. In some embodiments, the EPS depolymerase is encoded in a sequence having at least 97% identity to the sequence of SEQ ID NO:21. In some embodiments, the EPS depolymerase is encoded in a sequence having at least 98% identity to the sequence of SEQ ID NO:21. In some embodiments, the EPS depolymerase is encoded in a sequence having at least 99% identity to the sequence of SEQ ID NO:21.

[0115] In some embodiments, the EPS depolymerase is encoded by the nucleotide sequence of SEQ ID NO:22. In some embodiments, the EPS depolymerase is encoded by a sequence having at least 90% identity to the sequence of SEQ ID NO:22. In some embodiments, the EPS depolymerase is encoded in a sequence having at least 91% identity to the sequence of SEQ ID NO:22. In some embodiments, the EPS depolymerase is encoded in a sequence having at least 92% identity to the sequence of SEQ ID NO:22. In some embodiments, the EPS depolymerase is encoded in a sequence having at least 93% identity to the sequence of SEQ ID NO:22. In some embodiments, the EPS depolymerase is encoded in a sequence having at least 94% identity to the sequence of SEQ ID NO:22. In some embodiments, the EPS depolymerase is encoded in a sequence having at least 95% identity to the sequence of SEQ ID NO:22. In some embodiments, the EPS depolymerase is encoded in a sequence having at least 96% identity to the sequence of SEQ ID NO:22. In some embodiments, the EPS depolymerase is encoded in a sequence having at least 97% identity to the sequence of SEQ ID NO:22. In some embodiments, the EPS depolymerase is encoded in a sequence having at least 98% identity to the sequence of SEQ ID NO:22. In some embodiments, the EPS depolymerase is encoded in a sequence having at least 99% identity to the sequence of SEQ ID NO:22.

[0116] In some embodiments, the EPS depolymerase is encoded by the nucleotide sequence of SEQ ID NO:23. In some embodiments, the EPS depolymerase is encoded by a sequence having at least 90% identity to the sequence of SEQ ID NO:23. In some embodiments, the EPS depolymerase is encoded in a sequence having at least 91% identity to the sequence of SEQ ID NO:23. In some embodiments, the EPS depolymerase is encoded in a sequence having at least 92% identity to the sequence of SEQ ID NO:23. In some embodiments, the EPS depolymerase is encoded in a sequence having at least 93% identity to the sequence of SEQ ID NO:23. In some embodiments, the EPS depolymerase is encoded in a sequence having at least 94% identity to the sequence of SEQ ID NO:23. In some embodiments, the EPS depolymerase is encoded in a sequence having at least 95% identity to the sequence of SEQ ID NO:23. In some embodiments, the EPS depolymerase is encoded in a sequence having at least 96% identity to the sequence of SEQ ID NO:23. In some embodiments, the EPS depolymerase is encoded in a sequence having at least 97% identity to the sequence of SEQ ID NO:23. In some embodiments, the EPS depolymerase is encoded in a sequence having at least 98% identity to the sequence of SEQ ID NO:23. In some embodiments, the EPS depolymerase is encoded in a sequence having at least 99% identity to the sequence of SEQ ID NO:23.

[0117] In some embodiments, the EPS depolymerase is encoded by the nucleotide sequence of SEQ ID NO:24. In some embodiments, the EPS depolymerase is encoded by a sequence having at least 90% identity to the sequence of SEQ ID NO:24. In some embodiments, the EPS depolymerase is encoded in a sequence having at least 91% identity to the sequence of SEQ ID NO:24. In some embodiments, the EPS depolymerase is encoded in a sequence having at least 92% identity to the sequence of SEQ ID NO:24. In some embodiments, the EPS depolymerase is encoded in a sequence having at least 93% identity to the sequence of SEQ ID NO:24. In some embodiments, the EPS depolymerase is encoded in a sequence having at least 94% identity to the sequence of SEQ ID NO:24. In some embodiments, the EPS depolymerase is encoded in a sequence having at least 95% identity to the sequence of SEQ ID NO:24. In some embodiments, the EPS depolymerase is encoded in a sequence having at least 96% identity to the sequence of SEQ ID NO:24. In some embodiments, the EPS depolymerase is encoded in a sequence having at least 97% identity to the sequence of SEQ ID NO:24. In some embodiments, the EPS depolymerase is encoded in a sequence having at least 98% identity to the sequence of SEQ ID NO:24. In some embodiments, the EPS depolymerase is encoded in a sequence having at least 99% identity to the sequence of SEQ ID NO:24.

[0118] In some embodiments, the EPS depolymerase is encoded by the nucleotide sequence of SEQ ID NO:25. In some embodiments, the EPS depolymerase is encoded by a sequence having at least 90% identity to the sequence of SEQ ID NO:25. In some embodiments, the EPS depolymerase is encoded in a sequence having at least 91% identity to the sequence of SEQ ID NO:25. In some embodiments, the EPS depolymerase is encoded in a sequence having at least 92% identity to the sequence of SEQ ID NO:25. In some embodiments, the EPS depolymerase is encoded in a sequence having at least 93% identity to the sequence of SEQ ID NO:25. In some embodiments, the EPS depolymerase is encoded in a sequence having at least 94% identity to the sequence of SEQ ID NO:25. In some embodiments, the EPS depolymerase is encoded in a sequence having at least 95% identity to the sequence of SEQ ID NO:25. In some embodiments, the EPS depolymerase is encoded in a sequence having at least 96% identity to the sequence of SEQ ID NO:25. In some embodiments, the EPS depolymerase is encoded in a sequence having at least 97% identity to the sequence of SEQ ID NO:25. In some embodiments, the EPS depolymerase is encoded in a sequence having at least 98% identity to the sequence of SEQ ID NO:25. In some embodiments, the EPS depolymerase is encoded in a sequence having at least 99% identity to the sequence of SEQ ID NO:25.

[0119] In some embodiments, the EPS depolymerase is encoded by the nucleotide sequence of SEQ ID NO:36. In some embodiments, the EPS depolymerase is encoded by a sequence having at least 90% identity to the sequence of SEQ ID NO:36. In some embodiments, the EPS depolymerase is encoded in a sequence having at least 91% identity to the sequence of SEQ ID NO:36. In some embodiments, the EPS depolymerase is encoded in a sequence having at least 92% identity to the sequence of SEQ ID NO:36. In some embodiments, the EPS depolymerase is encoded in a sequence having at least 93% identity to the sequence of SEQ ID NO:36. In some embodiments, the EPS depolymerase is encoded in a sequence having at least 94% identity to the sequence of SEQ ID NO:36. In some embodiments, the EPS depolymerase is encoded in a sequence having at least 95% identity to the sequence of SEQ ID NO:36. In some embodiments, the EPS depolymerase is encoded in a sequence having at least 96% identity to the sequence of SEQ ID NO:36. In some embodiments, the EPS depolymerase is encoded in a sequence having at least 97% identity to the sequence of SEQ ID NO:36. In some embodiments, the EPS depolymerase is encoded in a sequence having at least 98% identity to the sequence of SEQ ID NO:36. In some embodiments, the EPS depolymerase is encoded in a sequence having at least 99% identity to the sequence of SEQ ID NO:36.

[0120] In some embodiments, the EPS depolymerase is encoded by the nucleotide sequence of SEQ ID NO:59. In some embodiments, the EPS depolymerase is encoded by a sequence having at least 90% identity to the sequence of SEQ ID NO:59. In some embodiments, the EPS depolymerase is encoded in a sequence having at least 91% identity to the sequence of SEQ ID NO:59. In some embodiments, the EPS depolymerase is encoded in a sequence having at least 92% identity to the sequence of SEQ ID NO:59. In some embodiments, the EPS depolymerase is encoded in a sequence having at least 93% identity to the sequence of SEQ ID NO:59. In some embodiments, the EPS depolymerase is encoded in a sequence having at least 94% identity to the sequence of SEQ ID NO:59. In some embodiments, the EPS depolymerase is encoded in a sequence having at least 95% identity to the sequence of SEQ ID NO:59. In some embodiments, the EPS depolymerase is encoded in a sequence having at least 96% identity to the sequence of SEQ ID NO:59. In some embodiments, the EPS depolymerase is encoded in a sequence having at least 97% identity to the sequence of SEQ ID NO:59. In some embodiments, the EPS depolymerase is encoded in a sequence having at least 98% identity to the sequence of SEQ ID NO:59. In some embodiments, the EPS depolymerase is encoded in a sequence having at least 99% identity to the sequence of SEQ ID NO:59.

[0121] In some embodiments, the bacteriophage shows improved host range.

[0122] In some embodiments, the bacteriophage belongs to the Genus Phikmvvirus. In some embodiments, the bacteriophage belongs to the Genus Pakpunavirus. In some embodiments, the bacteriophage belongs to the Genus Bruynoghevirus. In some embodiments, the bacteriophage belongs to the Genus Pbunavirus. In some embodiments, the bacteriophage belongs to the Genus Luzseptimavirus. In some embodiments, the bacteriophage belongs to the Genus Litunavirus. In some embodiments, the bacteriophage belongs to the Genus Nankokuvirus.

[0123] In some embodiments, the bacteriophage targets Pseudomonas. In some embodiments, the bacteriophage targets Pseudomonas aeruginosa. In some embodiments, the bacteriophage targets one or more Pseudomonas aeruginosa strains.

[0124] In some embodiments, the bacteriophage targets one or more of Pseudomonas aeruginosa, drug-resistant Pseudomonas aeruginosa, antibiotic-resistant Pseudomonas aeruginosa, and multiple antibiotic-resistant Pseudomonas aeruginosa. In some embodiments, the bacteriophage infects and kills one or more of Pseudomonas aeruginosa, antibiotic-resistant Pseudomonas aeruginosa, and multiple antibiotic-resistant Pseudomonas aeruginosa.

[0125] In some embodiments, the bacteriophage reduces biofilm mass. As used herein, the terms “reduce,” “decrease,” “reduction,” “minimal,” “low,” or “lower” refer to decreases below basal levels, e.g., as compared to a control. The terms “increase,” “high,” “higher,” “maximal,” “elevate,” or “elevation” refer to increases above basal levels, e.g., as compared to a control. Increases, elevations, decreases, or reductions can be 1%, 2%, 3%, 4%, 5%, 6%, 7%, 8%, 9%, 10%, 11%, 12%, 13%, 14%, 15%, 16%, 17%, 18%, 19%, 20%, 21%, 22%, 23%, 24%, 25%, 26%, 27%, 28%, 29%, 30%, 31%, 32%, 33%, 34%, 35%, 36%, 37%, 38%, 39%, 40%, 41%, 42%, 43%, 44%, 45%, 46%, 47%, 48%, 49%, 50%, 51%, 52%, 53%, 54%, 55%, 56%, 57%, 58%, 59%, 60%, 61%, 62%, 63%, 64%, 65%, 66%, 67%, 68%, 69%, 70%, 71%, 72%, 73%, 74%, 75%, 76%, 77%, 78%, 79%, 80%, 81%, 82%, 83%, 84%, 85%, 86%, 87%, 88%, 89%, 90%, 91%, 92%, 93%, 94%, 95%, 96%, 97%, 98%, 99%, or 100% compared to a control or standard level. Each of the values or ranges recited herein may include any value or subrange therebetween, including endpoints.

### Bacteriophage Compositions

[0126] In some embodiments, the present disclosure relates to one or more bacteriophage compositions comprising one or more bacteriophages engineered to express a heterologous gene as described herein (e.g., an exopolysaccharide depolymerase). In some embodiments, the target loci for insertion of the heterologous gene in bacteriophages may be chosen based on the absence of regulatory signals, genes, open reading frames (ORFs), terminators, promoters, replication origins, or any other known features that may be essential to the replication cycle of the phage. Thus, in some embodiments the heterologous gene is not inserted any such location. In some embodiments, target loci for insertion of the heterologous gene in bacteriophages may be chosen based on the expected level of expression from said locus during the phage replication cycle. In some embodiments, the target loci comprise genomic regions that are highly transcribed. In some embodiments, the heterologous gene may comprise an EPS depolymerase.

[0127] The heterologous gene can be inserted into any suitable location, for example, as described above, one that does not unduly impact an essential gene of the virus, and/or affirmatively as described above, in a location of high transcription, for example. In some embodiments, the heterologous gene may be inserted at a specific locus and may replace an entire segment from the genomic sequence of the corresponding unmodified (wild-type) phage. Alternatively or additionally, in some embodiments, the heterologous gene may be inserted at a specific locus, while the entire genomic sequence is otherwise maintained. For example, the following table provides some non-limiting examples of such insertions into various genera of bacteriophage:

TABLE 1

| | | Insertion site into |
|---|---|---|
| | | unmodified (wild-type) |
| Genus | Strain of Engineered phage | phage genomic sequence |
| Pbunavirus | APBP1-1 (SEQ ID NO: 26), | bp Δ[1173-1274] of |
| | APBP1-2 (SEQ ID NO: 27), | reference Seq ID 1 |
| | APBP1-3 (SEQ ID NO: 28), | |
| | APBP1-4 (SEQ ID NO: 29), | |
| | APBP1-5 (SEQ ID NO: 30), | |
| | APBP1-6 (SEQ ID NO: 70) | |
| Pbunavirus | APBP2-1 (SEQ ID NO: 31), | bp Δ[1163-1278] of |
| | APBP2-2 (SEQ ID NO: 32), | reference Seq ID 2 |
| | APBP2-3 (SEQ ID NO: 33), | |
| | APBP2-4 (SEQ ID NO: 34), | |
| | APBP2-5 (SEQ ID NO: 35) | |
| Pbunavirus | APBP18-1 (SEQ ID NO: 37), | bp Δ[1173-1332] of |
| | APBP18-2 (SEQ ID NO: 38), | reference Seq ID 7 |
| | APBP18-3 (SEQ ID NO: 71) | |
| Pbunavirus | APBP19-1 (SEQ ID NO: 41), | bp Δ[1173-1273] of |
| | APBP19-2 (SEQ ID NO: 42) | reference Seq ID 8 |
| Pbunavirus | APBP20-1 (SEQ ID NO: 39), | bp Δ[1174-1327] of |
| | APBP20-2 (SEQ ID NO: 40) | reference Seq ID 9 |
| Pbunavirus | APBP21-1 (SEQ ID NO: 50), | bp Δ[1173-1274] of |
| | APBP21-2 (SEQ ID NO: 51) | reference Seq ID 10 |
| Pbunavirus | APBP24-1 (SEQ ID NO: 43), | bp Δ[1177-1332] of |
| | APBP24-2 (SEQ ID NO: 44) | reference Seq ID 11 |
| Phikmvvirus | APBP3-1 (SEQ ID NO: 45), | bp 26198 of reference |
| | APBP3-2 (SEQ ID NO: 46), | Seq ID 3 |
| | APBP3-3 (SEQ ID NO: 47), | |
| | APBP3-13 (SEQ ID NO: 56), | |
| | APBP3-14 (SEQ ID NO: 57) | |
| Phikmvvirus | APBP3-5 (SEQ ID NO: 48), | bp Δ[26198-26294] of |
| | APBP3-6 (SEQ ID NO: 49), | reference Seq ID 3 |
| | APBP3-8 (SEQ ID NO: 52), | |
| | APBP3-10 (SEQ ID NO: 53), | |
| | APBP3-11 (SEQ ID NO: 54), | |
| | APBP3-12 (SEQ ID NO: 55) | |
| Phikmvvirus | APBP17-1 (SEQ ID NO: 58) | bp 43176 of reference |
| | | Seq ID 6 |
| Pakpunavirus | APBP4-1 (SEQ ID NO: 60) | bp 50549 of reference |
| | | Seq ID 4 |
| Pakpunavirus | APBP4-2 (SEQ ID NO: 61), | bp 31289 of reference |
| | APBP4-3 (SEQ ID NO: 62) | Seq ID 4 |
| Pakpunavirus | APBP4-4 (SEQ ID NO: 63) | bp 4740 of reference |
| | | Seq ID 4 |
| Pakpunavirus | APBP4-5 (SEQ ID NO: 64), | bp 26926 of reference |
| | APBP4-6 (SEQ ID NO: 65), | Seq ID 4 |
| | APBP4-8 (SEQ ID NO: 66) | |
| Bruynoghevirus | APBP6-1 (SEQ ID NO: 67), | bp Δ[2501-2540] of |
| | APBP6-2 (SEQ ID NO: 68), | reference Seq ID 5 |
| | APBP6-3 (SEQ ID NO: 69) | |

* Δ denotes a range of base pairs where the heterologous gene was inserted and the genomic region from the bacteriophage was deleted.

[0128] The above are non-limiting examples of insertions that were done. It should be understood that while a specific location or range of base pairs is listed for some of the particular strains in Table 1, that the insertion and/or deletion could also be at any base pair within the listed range and/or could remove any range of bases therein. The insertion can also be within 10 base pairs prior to or after the listed insertion point or insertion range.

[0129] The one or more bacteriophages may comprise a polynucleotide sequence selected from the polynucleotide sequence of SEQ ID NO:26, a polynucleotide sequence of SEQ ID NO:27, a polynucleotide sequence of SEQ ID NO:28, a polynucleotide sequence of SEQ ID NO:29, a polynucleotide sequence of SEQ ID NO:30, a polynucleotide sequence of SEQ ID NO:31, a polynucleotide sequence of SEQ ID NO:32, a polynucleotide sequence of SEQ ID NO:33, a polynucleotide sequence of SEQ ID NO:34, a polynucleotide sequence of SEQ ID NO:35, a polynucleotide sequence of SEQ ID NO:37, a polynucleotide sequence of SEQ ID NO:38, a polynucleotide sequence of SEQ ID NO:39, a polynucleotide sequence of SEQ ID NO:40, a polynucleotide sequence of SEQ ID NO:41, a polynucleotide sequence of SEQ ID NO:42, a polynucleotide sequence of SEQ ID NO:43, a polynucleotide sequence of SEQ ID NO:44, a polynucleotide sequence of SEQ ID NO:45, a polynucleotide sequence of SEQ ID NO:46, a polynucleotide sequence of SEQ ID NO:47, a polynucleotide sequence of SEQ ID NO:48, a polynucleotide sequence of SEQ ID NO:49, a polynucleotide sequence of SEQ ID NO:50, a polynucleotide sequence of SEQ ID NO:51, a polynucleotide sequence of SEQ ID NO:52, a polynucleotide sequence of SEQ ID NO:53, a polynucleotide sequence of SEQ ID NO:54, a polynucleotide sequence of SEQ ID NO:55, a polynucleotide sequence of SEQ ID NO:56, a polynucleotide sequence of SEQ ID NO:57, a polynucleotide sequence of SEQ ID NO:58, a polynucleotide sequence of SEQ ID NO:60, a polynucleotide sequence of SEQ ID NO:61, a polynucleotide sequence of SEQ ID NO:62, a polynucleotide sequence of SEQ ID NO:63, a polynucleotide sequence of SEQ ID NO:64, a polynucleotide sequence of SEQ ID NO:65, a polynucleotide sequence of SEQ ID NO:66, a polynucleotide sequence of SEQ ID NO:67, a polynucleotide sequence of SEQ ID NO:68, a polynucleotide sequence of SEQ ID NO:69, a polynucleotide sequence of SEQ ID NO:70, a polynucleotide sequence of SEQ ID NO:71; a polynucleotide sequence of SEQ ID NO:73; a polynucleotide sequence with at least 90% identity to SEQ ID NO:26, a polynucleotide sequence with at least 90% identity to SEQ ID NO:27, a polynucleotide sequence with at least 90% identity to SEQ ID NO:28, a polynucleotide sequence with at least 90% identity to SEQ ID NO:29, a polynucleotide sequence with at least 90% identity to SEQ ID NO:30, a polynucleotide sequence with at least 90% identity to SEQ ID NO:31, a polynucleotide sequence with at least 90% identity to SEQ ID NO:32, a polynucleotide sequence with at least 90% identity to SEQ ID NO:33, a polynucleotide sequence with at least 90% identity to SEQ ID NO:34, a polynucleotide sequence with at least 90% identity to SEQ ID NO:35, a polynucleotide sequence with at least 90% identity to SEQ ID NO:37, a polynucleotide sequence with at least 90% identity to SEQ ID NO:38, a polynucleotide sequence with at least 90% identity to SEQ ID NO:39, a polynucleotide sequence with at least 90% identity to SEQ ID NO:40, a polynucleotide sequence with at least 90% identity to SEQ ID NO:41, a polynucleotide sequence with at least 90% identity to SEQ ID NO:42, a polynucleotide sequence with at least 90% identity to SEQ ID NO:43, a polynucleotide sequence with at least 90% identity to SEQ ID NO:44, a polynucleotide sequence with at least 90% identity to SEQ ID NO:45, a polynucleotide sequence with at least 90% identity to SEQ ID NO:46, a polynucleotide sequence with at least 90% identity to SEQ ID NO:47, a polynucleotide sequence with at least 90% identity to SEQ ID NO:48, a polynucleotide sequence with at least 90% identity to SEQ ID NO:49, a polynucleotide sequence with at least 90% identity to SEQ ID NO:50, a polynucleotide sequence with at least 90% identity to SEQ ID NO:51, a polynucleotide sequence with at least 90% identity to SEQ ID NO:52, a polynucleotide sequence with at least 90% identity to SEQ ID NO:53, a polynucleotide sequence with at least 90% identity to SEQ ID NO:54, a polynucleotide sequence with at least 90% identity to SEQ ID NO:55, a polynucleotide sequence with at least 90% identity to SEQ ID NO:56, a polynucleotide sequence with at least 90% identity to SEQ ID NO:57, a polynucleotide sequence with at least 90% identity to SEQ ID NO:58, a polynucleotide sequence with at least 90% identity to SEQ ID NO:60, a polynucleotide sequence with at least 90% identity to SEQ ID NO:61, a polynucleotide sequence with at least 90% identity to SEQ ID NO:62, a polynucleotide sequence with at least 90% identity to SEQ ID NO:63, a polynucleotide sequence with at least 90% identity to SEQ ID NO:64, a polynucleotide sequence with at least 90% identity to SEQ ID NO:65, a polynucleotide sequence with at least 90% identity to SEQ ID NO:66, a polynucleotide sequence with at least 90% identity to SEQ ID NO:67, a polynucleotide sequence with at least 90% identity to SEQ ID NO:68, a polynucleotide sequence with at least 90% identity to SEQ ID NO:69, a polynucleotide sequence with at least 90% identity to SEQ ID NO:70, a polynucleotide sequence with at least 90% identity to SEQ ID NO:71, a polynucleotide sequence with at least 90% identity to SEQ ID NO:73.

[0130] In some embodiments, the one or more bacteriophages may comprise a polynucleotide sequence with at least 91% identity to SEQ ID NO:26. In some embodiments, the one or more bacteriophages may comprise a polynucleotide sequence with at least 92% identity to SEQ ID NO:26. In some embodiments, the one or more bacteriophages may comprise a polynucleotide sequence with at least 93% identity to SEQ ID NO:26. In some embodiments, the one or more bacteriophages may comprise a polynucleotide sequence with at least 94% identity to SEQ ID NO:26. In some embodiments, the one or more bacteriophages may comprise a polynucleotide sequence with at least 95% identity to SEQ ID NO:26. In some embodiments, the one or more bacteriophages may comprise a polynucleotide sequence with at least 96% identity to SEQ ID NO:26. In some embodiments, the one or more bacteriophages may comprise a polynucleotide sequence with at least 97% identity to SEQ ID NO:26. In some embodiments, the one or more bacteriophages may comprise a polynucleotide sequence with at least 98% identity to SEQ ID NO:26. In some embodiments, the one or more bacteriophages may comprise a polynucleotide sequence with at least 99% identity to SEQ ID NO:26

[0131] In some embodiments, the one or more bacteriophages may comprise a polynucleotide sequence with at least 91% identity to SEQ ID NO:27. In some embodiments, the one or more bacteriophages may comprise a polynucleotide sequence with at least 92% identity to SEQ ID NO:27. In some embodiments, the one or more bacteriophages may comprise a polynucleotide sequence with at least 93% identity to SEQ ID NO:27. In some embodiments, the one or more bacteriophages may comprise a polynucleotide sequence with at least 94% identity to SEQ ID NO:27. In some embodiments, the one or more bacteriophages may comprise a polynucleotide sequence with at least 95% identity to SEQ ID NO:27. In some embodiments, the one or more bacteriophages may comprise a polynucleotide sequence with at least 96% identity to SEQ ID NO:27. In some embodiments, the one or more bacteriophages may comprise a polynucleotide sequence with at least 97% identity to SEQ ID NO:27. In some embodiments, the one or more bacteriophages may comprise a polynucleotide sequence with at least 98% identity to SEQ ID NO:27. In some embodiments, the one or more bacteriophages may comprise a polynucleotide sequence with at least 99% identity to SEQ ID NO:27.

[0132] In some embodiments, the one or more bacteriophages may comprise a polynucleotide sequence with at least 91% identity to SEQ ID NO:28. In some embodiments, the one or more bacteriophages may comprise a polynucleotide sequence with at least 92% identity to SEQ ID NO:28. In some embodiments, the one or more bacteriophages may comprise a polynucleotide sequence with at least 93% identity to SEQ ID NO:28. In some embodiments, the one or more bacteriophages may comprise a polynucleotide sequence with at least 94% identity to SEQ ID NO:28. In some embodiments, the one or more bacteriophages may comprise a polynucleotide sequence with at least 95% identity to SEQ ID NO:28. In some embodiments, the one or more bacteriophages may comprise a polynucleotide sequence with at least 96% identity to SEQ ID NO:28. In some embodiments, the one or more bacteriophages may comprise a polynucleotide sequence with at least 97% identity to SEQ ID NO:28. In some embodiments, the one or more bacteriophages may comprise a polynucleotide sequence with at least 98% identity to SEQ ID NO:28. In some embodiments, the one or more bacteriophages may comprise a polynucleotide sequence with at least 99% identity to SEQ ID NO:28.

[0133] In some embodiments, the one or more bacteriophages may comprise a polynucleotide sequence with at least 91% identity to SEQ ID NO:29. In some embodiments, the one or more bacteriophages may comprise a polynucleotide sequence with at least 92% identity to SEQ ID NO:29. In some embodiments, the one or more bacteriophages may comprise a polynucleotide sequence with at least 93% identity to SEQ ID NO:29. In some embodiments, the one or more bacteriophages may comprise a polynucleotide sequence with at least 94% identity to SEQ ID NO:29. In some embodiments, the one or more bacteriophages may comprise a polynucleotide sequence with at least 95% identity to SEQ ID NO:29. In some embodiments, the one or more bacteriophages may comprise a polynucleotide sequence with at least 96% identity to SEQ ID NO:29. In some embodiments, the one or more bacteriophages may comprise a polynucleotide sequence with at least 97% identity to SEQ ID NO:29. In some embodiments, the one or more bacteriophages may comprise a polynucleotide sequence with at least 98% identity to SEQ ID NO:29. In some embodiments, the one or more bacteriophages may comprise a polynucleotide sequence with at least 99% identity to SEQ ID NO:29.

[0134] In some embodiments, the one or more bacteriophages may comprise a polynucleotide sequence with at least 91% identity to SEQ ID NO:30. In some embodiments, the one or more bacteriophages may comprise a polynucleotide sequence with at least 92% identity to SEQ ID NO:30. In some embodiments, the one or more bacteriophages may comprise a polynucleotide sequence with at least 93% identity to SEQ ID NO:30. In some embodiments, the one or more bacteriophages may comprise a polynucleotide sequence with at least 94% identity to SEQ ID NO:30. In some embodiments, the one or more bacteriophages may comprise a polynucleotide sequence with at least 95% identity to SEQ ID NO:30. In some embodiments, the one or more bacteriophages may comprise a polynucleotide sequence with at least 96% identity to SEQ ID NO:30. In some embodiments, the one or more bacteriophages may comprise a polynucleotide sequence with at least 97% identity to SEQ ID NO:30. In some embodiments, the one or more bacteriophages may comprise a polynucleotide sequence with at least 98% identity to SEQ ID NO:30. In some embodiments, the one or more bacteriophages may comprise a polynucleotide sequence with at least 99% identity to SEQ ID NO:30.

[0135] In some embodiments, the one or more bacteriophages may comprise a polynucleotide sequence with at least 91% identity to SEQ ID NO:31. In some embodiments, the one or more bacteriophages may comprise a polynucleotide sequence with at least 92% identity to SEQ ID NO:31. In some embodiments, the one or more bacteriophages may comprise a polynucleotide sequence with at least 93% identity to SEQ ID NO:31. In some embodiments, the one or more bacteriophages may comprise a polynucleotide sequence with at least 94% identity to SEQ ID NO:31. In some embodiments, the one or more bacteriophages may comprise a polynucleotide sequence with at least 95% identity to SEQ ID NO:31. In some embodiments, the one or more bacteriophages may comprise a polynucleotide sequence with at least 96% identity to SEQ ID NO:31. In some embodiments, the one or more bacteriophages may comprise a polynucleotide sequence with at least 97% identity to SEQ ID NO:31. In some embodiments, the one or more bacteriophages may comprise a polynucleotide sequence with at least 98% identity to SEQ ID NO:31. In some embodiments, the one or more bacteriophages may comprise a polynucleotide sequence with at least 99% identity to SEQ ID NO:31.

[0136] In some embodiments, the one or more bacteriophages may comprise a polynucleotide sequence with at least 91% identity to SEQ ID NO:32. In some embodiments, the one or more bacteriophages may comprise a polynucleotide sequence with at least 92% identity to SEQ ID NO:32. In some embodiments, the one or more bacteriophages may comprise a polynucleotide sequence with at least 93% identity to SEQ ID NO:32. In some embodiments, the one or more bacteriophages may comprise a polynucleotide sequence with at least 94% identity to SEQ ID NO:32. In some embodiments, the one or more bacteriophages may comprise a polynucleotide sequence with at least 95% identity to SEQ ID NO:32. In some embodiments, the one or more bacteriophages may comprise a polynucleotide sequence with at least 96% identity to SEQ ID NO:32. In some embodiments, the one or more bacteriophages may comprise a polynucleotide sequence with at least 97% identity to SEQ ID NO:32. In some embodiments, the one or more bacteriophages may comprise a polynucleotide sequence with at least 98% identity to SEQ ID NO:32. In some embodiments, the one or more bacteriophages may comprise a polynucleotide sequence with at least 99% identity to SEQ ID NO:32.

[0137] In some embodiments, the one or more bacteriophages may comprise a polynucleotide sequence with at least 91% identity to SEQ ID NO:33. In some embodiments, the one or more bacteriophages may comprise a polynucleotide sequence with at least 92% identity to SEQ ID NO:33. In some embodiments, the one or more bacteriophages may comprise a polynucleotide sequence with at least 93% identity to SEQ ID NO:33. In some embodiments, the one or more bacteriophages may comprise a polynucleotide sequence with at least 94% identity to SEQ ID NO:33. In some embodiments, the one or more bacteriophages may comprise a polynucleotide sequence with at least 95% identity to SEQ ID NO:33. In some embodiments, the one or more bacteriophages may comprise a polynucleotide sequence with at least 96% identity to SEQ ID NO:33. In some embodiments, the one or more bacteriophages may comprise a polynucleotide sequence with at least 97% identity to SEQ ID NO:33. In some embodiments, the one or more bacteriophages may comprise a polynucleotide sequence with at least 98% identity to SEQ ID NO:33. In some embodiments, the one or more bacteriophages may comprise a polynucleotide sequence with at least 99% identity to SEQ ID NO:33.

[0138] In some embodiments, the one or more bacteriophages may comprise a polynucleotide sequence with at least 91% identity to SEQ ID NO:34. In some embodiments, the one or more bacteriophages may comprise a polynucleotide sequence with at least 92% identity to SEQ ID NO:34. In some embodiments, the one or more bacteriophages may comprise a polynucleotide sequence with at least 93% identity to SEQ ID NO:34. In some embodiments, the one or more bacteriophages may comprise a polynucleotide sequence with at least 94% identity to SEQ ID NO:34. In some embodiments, the one or more bacteriophages may comprise a polynucleotide sequence with at least 95% identity to SEQ ID NO:34. In some embodiments, the one or more bacteriophages may comprise a polynucleotide sequence with at least 96% identity to SEQ ID NO:34. In some embodiments, the one or more bacteriophages may comprise a polynucleotide sequence with at least 97% identity to SEQ ID NO:34. In some embodiments, the one or more bacteriophages may comprise a polynucleotide sequence with at least 98% identity to SEQ ID NO:34. In some embodiments, the one or more bacteriophages may comprise a polynucleotide sequence with at least 99% identity to SEQ ID NO:34.

[0139] In some embodiments, the one or more bacteriophages may comprise a polynucleotide sequence with at least 91% identity to SEQ ID NO:35. In some embodiments, the one or more bacteriophages may comprise a polynucleotide sequence with at least 92% identity to SEQ ID NO:35. In some embodiments, the one or more bacteriophages may comprise a polynucleotide sequence with at least 93% identity to SEQ ID NO:35. In some embodiments, the one or more bacteriophages may comprise a polynucleotide sequence with at least 94% identity to SEQ ID NO:35. In some embodiments, the one or more bacteriophages may comprise a polynucleotide sequence with at least 95% identity to SEQ ID NO:35. In some embodiments, the one or more bacteriophages may comprise a polynucleotide sequence with at least 96% identity to SEQ ID NO:35. In some embodiments, the one or more bacteriophages may comprise a polynucleotide sequence with at least 97% identity to SEQ ID NO:35. In some embodiments, the one or more bacteriophages may comprise a polynucleotide sequence with at least 98% identity to SEQ ID NO:35. In some embodiments, the one or more bacteriophages may comprise a polynucleotide sequence with at least 99% identity to SEQ ID NO:35.

[0140] In some embodiments, the one or more bacteriophages may comprise a polynucleotide sequence with at least 91% identity to SEQ ID NO:37. In some embodiments, the one or more bacteriophages may comprise a polynucleotide sequence with at least 92% identity to SEQ ID NO:37. In some embodiments, the one or more bacteriophages may comprise a polynucleotide sequence with at least 93% identity to SEQ ID NO:37. In some embodiments, the one or more bacteriophages may comprise a polynucleotide sequence with at least 94% identity to SEQ ID NO:37. In some embodiments, the one or more bacteriophages may comprise a polynucleotide sequence with at least 95% identity to SEQ ID NO:37. In some embodiments, the one or more bacteriophages may comprise a polynucleotide sequence with at least 96% identity to SEQ ID NO:37. In some embodiments, the one or more bacteriophages may comprise a polynucleotide sequence with at least 97% identity to SEQ ID NO:37. In some embodiments, the one or more bacteriophages may comprise a polynucleotide sequence with at least 98% identity to SEQ ID NO:37. In some embodiments, the one or more bacteriophages may comprise a polynucleotide sequence with at least 99% identity to SEQ ID NO:37.

[0141] In some embodiments, the one or more bacteriophages may comprise a polynucleotide sequence with at least 91% identity to SEQ ID NO:38. In some embodiments, the one or more bacteriophages may comprise a polynucleotide sequence with at least 92% identity to SEQ ID NO:38. In some embodiments, the one or more bacteriophages may comprise a polynucleotide sequence with at least 93% identity to SEQ ID NO:38. In some embodiments, the one or more bacteriophages may comprise a polynucleotide sequence with at least 94% identity to SEQ ID NO:38. In some embodiments, the one or more bacteriophages may comprise a polynucleotide sequence with at least 95% identity to SEQ ID NO:38. In some embodiments, the one or more bacteriophages may comprise a polynucleotide sequence with at least 96% identity to SEQ ID NO:38. In some embodiments, the one or more bacteriophages may comprise a polynucleotide sequence with at least 97% identity to SEQ ID NO:38. In some embodiments, the one or more bacteriophages may comprise a polynucleotide sequence with at least 98% identity to SEQ ID NO:38. In some embodiments, the one or more bacteriophages may comprise a polynucleotide sequence with at least 99% identity to SEQ ID NO:38.

[0142] In some embodiments, the one or more bacteriophages may comprise a polynucleotide sequence with at least 91% identity to SEQ ID NO:39. In some embodiments, the one or more bacteriophages may comprise a polynucleotide sequence with at least 92% identity to SEQ ID NO:39. In some embodiments, the one or more bacteriophages may comprise a polynucleotide sequence with at least 93% identity to SEQ ID NO:39. In some embodiments, the one or more bacteriophages may comprise a polynucleotide sequence with at least 94% identity to SEQ ID NO:39. In some embodiments, the one or more bacteriophages may comprise a polynucleotide sequence with at least 95% identity to SEQ ID NO:39. In some embodiments, the one or more bacteriophages may comprise a polynucleotide sequence with at least 96% identity to SEQ ID NO:39. In some embodiments, the one or more bacteriophages may comprise a polynucleotide sequence with at least 97% identity to SEQ ID NO:39. In some embodiments, the one or more bacteriophages may comprise a polynucleotide sequence with at least 98% identity to SEQ ID NO:39. In some embodiments, the one or more bacteriophages may comprise a polynucleotide sequence with at least 99% identity to SEQ ID NO:39.

[0143] In some embodiments, the one or more bacteriophages may comprise a polynucleotide sequence with at least 91% identity to SEQ ID NO:40. In some embodiments, the one or more bacteriophages may comprise a polynucleotide sequence with at least 92% identity to SEQ ID NO:40. In some embodiments, the one or more bacteriophages may comprise a polynucleotide sequence with at least 93% identity to SEQ ID NO:40. In some embodiments, the one or more bacteriophages may comprise a polynucleotide sequence with at least 94% identity to SEQ ID NO:40. In some embodiments, the one or more bacteriophages may comprise a polynucleotide sequence with at least 95% identity to SEQ ID NO:40. In some embodiments, the one or more bacteriophages may comprise a polynucleotide sequence with at least 96% identity to SEQ ID NO:40. In some embodiments, the one or more bacteriophages may comprise a polynucleotide sequence with at least 97% identity to SEQ ID NO:40. In some embodiments, the one or more bacteriophages may comprise a polynucleotide sequence with at least 98% identity to SEQ ID NO:40. In some embodiments, the one or more bacteriophages may comprise a polynucleotide sequence with at least 99% identity to SEQ ID NO:40.

[0144] In some embodiments, the one or more bacteriophages may comprise a polynucleotide sequence with at least 91% identity to SEQ ID NO:41. In some embodiments, the one or more bacteriophages may comprise a polynucleotide sequence with at least 92% identity to SEQ ID NO:41. In some embodiments, the one or more bacteriophages may comprise a polynucleotide sequence with at least 93% identity to SEQ ID NO:41. In some embodiments, the one or more bacteriophages may comprise a polynucleotide sequence with at least 94% identity to SEQ ID NO:41. In some embodiments, the one or more bacteriophages may comprise a polynucleotide sequence with at least 95% identity to SEQ ID NO:41. In some embodiments, the one or more bacteriophages may comprise a polynucleotide sequence with at least 96% identity to SEQ ID NO:41. In some embodiments, the one or more bacteriophages may comprise a polynucleotide sequence with at least 97% identity to SEQ ID NO:41. In some embodiments, the one or more bacteriophages may comprise a polynucleotide sequence with at least 98% identity to SEQ ID NO:41. In some embodiments, the one or more bacteriophages may comprise a polynucleotide sequence with at least 99% identity to SEQ ID NO:41.

[0145] In some embodiments, the one or more bacteriophages may comprise a polynucleotide sequence with at least 91% identity to SEQ ID NO:42. In some embodiments, the one or more bacteriophages may comprise a polynucleotide sequence with at least 92% identity to SEQ ID NO:42. In some embodiments, the one or more bacteriophages may comprise a polynucleotide sequence with at least 93% identity to SEQ ID NO:42. In some embodiments, the one or more bacteriophages may comprise a polynucleotide sequence with at least 94% identity to SEQ ID NO:42. In some embodiments, the one or more bacteriophages may comprise a polynucleotide sequence with at least 95% identity to SEQ ID NO:42. In some embodiments, the one or more bacteriophages may comprise a polynucleotide sequence with at least 96% identity to SEQ ID NO:42. In some embodiments, the one or more bacteriophages may comprise a polynucleotide sequence with at least 97% identity to SEQ ID NO:42. In some embodiments, the one or more bacteriophages may comprise a polynucleotide sequence with at least 98% identity to SEQ ID NO:42. In some embodiments, the one or more bacteriophages may comprise a polynucleotide sequence with at least 99% identity to SEQ ID NO:42.

[0146] In some embodiments, the one or more bacteriophages may comprise a polynucleotide sequence with at least 91% identity to SEQ ID NO:43. In some embodiments, the one or more bacteriophages may comprise a polynucleotide sequence with at least 92% identity to SEQ ID NO:43. In some embodiments, the one or more bacteriophages may comprise a polynucleotide sequence with at least 93% identity to SEQ ID NO:43. In some embodiments, the one or more bacteriophages may comprise a polynucleotide sequence with at least 94% identity to SEQ ID NO:43. In some embodiments, the one or more bacteriophages may comprise a polynucleotide sequence with at least 95% identity to SEQ ID NO:43. In some embodiments, the one or more bacteriophages may comprise a polynucleotide sequence with at least 96% identity to SEQ ID NO:43. In some embodiments, the one or more bacteriophages may comprise a polynucleotide sequence with at least 97% identity to SEQ ID NO:43. In some embodiments, the one or more bacteriophages may comprise a polynucleotide sequence with at least 98% identity to SEQ ID NO:43. In some embodiments, the one or more bacteriophages may comprise a polynucleotide sequence with at least 99% identity to SEQ ID NO:43.

[0147] In some embodiments, the one or more bacteriophages may comprise a polynucleotide sequence with at least 91% identity to SEQ ID NO:44. In some embodiments, the one or more bacteriophages may comprise a polynucleotide sequence with at least 92% identity to SEQ ID NO:44. In some embodiments, the one or more bacteriophages may comprise a polynucleotide sequence with at least 93% identity to SEQ ID NO:44. In some embodiments, the one or more bacteriophages may comprise a polynucleotide sequence with at least 94% identity to SEQ ID NO:44. In some embodiments, the one or more bacteriophages may comprise a polynucleotide sequence with at least 95% identity to SEQ ID NO:44. In some embodiments, the one or more bacteriophages may comprise a polynucleotide sequence with at least 96% identity to SEQ ID NO:44. In some embodiments, the one or more bacteriophages may comprise a polynucleotide sequence with at least 97% identity to SEQ ID NO:44. In some embodiments, the one or more bacteriophages may comprise a polynucleotide sequence with at least 98% identity to SEQ ID NO:44. In some embodiments, the one or more bacteriophages may comprise a polynucleotide sequence with at least 99% identity to SEQ ID NO:44.

[0148] In some embodiments, the one or more bacteriophages may comprise a polynucleotide sequence with at least 91% identity to SEQ ID NO:45. In some embodiments, the one or more bacteriophages may comprise a polynucleotide sequence with at least 92% identity to SEQ ID NO:45. In some embodiments, the one or more bacteriophages may comprise a polynucleotide sequence with at least 93% identity to SEQ ID NO:45. In some embodiments, the one or more bacteriophages may comprise a polynucleotide sequence with at least 94% identity to SEQ ID NO:45. In some embodiments, the one or more bacteriophages may comprise a polynucleotide sequence with at least 95% identity to SEQ ID NO:45. In some embodiments, the one or more bacteriophages may comprise a polynucleotide sequence with at least 96% identity to SEQ ID NO:45. In some embodiments, the one or more bacteriophages may comprise a polynucleotide sequence with at least 97% identity to SEQ ID NO:45. In some embodiments, the one or more bacteriophages may comprise a polynucleotide sequence with at least 98% identity to SEQ ID NO:45. In some embodiments, the one or more bacteriophages may comprise a polynucleotide sequence with at least 99% identity to SEQ ID NO:45.

[0149] In some embodiments, the one or more bacteriophages may comprise a polynucleotide sequence with at least 91% identity to SEQ ID NO:46. In some embodiments, the one or more bacteriophages may comprise a polynucleotide sequence with at least 92% identity to SEQ ID NO:46. In some embodiments, the one or more bacteriophages may comprise a polynucleotide sequence with at least 93% identity to SEQ ID NO:46. In some embodiments, the one or more bacteriophages may comprise a polynucleotide sequence with at least 94% identity to SEQ ID NO:46. In some embodiments, the one or more bacteriophages may comprise a polynucleotide sequence with at least 95% identity to SEQ ID NO:46. In some embodiments, the one or more bacteriophages may comprise a polynucleotide sequence with at least 96% identity to SEQ ID NO:46. In some embodiments, the one or more bacteriophages may comprise a polynucleotide sequence with at least 97% identity to SEQ ID NO:46. In some embodiments, the one or more bacteriophages may comprise a polynucleotide sequence with at least 98% identity to SEQ ID NO:46. In some embodiments, the one or more bacteriophages may comprise a polynucleotide sequence with at least 99% identity to SEQ ID NO:46.

[0150] In some embodiments, the one or more bacteriophages may comprise a polynucleotide sequence with at least 91% identity to SEQ ID NO:47. In some embodiments, the one or more bacteriophages may comprise a polynucleotide sequence with at least 92% identity to SEQ ID NO:47. In some embodiments, the one or more bacteriophages may comprise a polynucleotide sequence with at least 93% identity to SEQ ID NO:47. In some embodiments, the one or more bacteriophages may comprise a polynucleotide sequence with at least 94% identity to SEQ ID NO:47. In some embodiments, the one or more bacteriophages may comprise a polynucleotide sequence with at least 95% identity to SEQ ID NO:47. In some embodiments, the one or more bacteriophages may comprise a polynucleotide sequence with at least 96% identity to SEQ ID NO:47. In some embodiments, the one or more bacteriophages may comprise a polynucleotide sequence with at least 97% identity to SEQ ID NO:47. In some embodiments, the one or more bacteriophages may comprise a polynucleotide sequence with at least 98% identity to SEQ ID NO:47. In some embodiments, the one or more bacteriophages may comprise a polynucleotide sequence with at least 99% identity to SEQ ID NO:47.

[0151] In some embodiments, the one or more bacteriophages may comprise a polynucleotide sequence with at least 91% identity to SEQ ID NO:48. In some embodiments, the one or more bacteriophages may comprise a polynucleotide sequence with at least 92% identity to SEQ ID NO:48. In some embodiments, the one or more bacteriophages may comprise a polynucleotide sequence with at least 93% identity to SEQ ID NO:48. In some embodiments, the one or more bacteriophages may comprise a polynucleotide sequence with at least 94% identity to SEQ ID NO:48. In some embodiments, the one or more bacteriophages may comprise a polynucleotide sequence with at least 95% identity to SEQ ID NO:48. In some embodiments, the one or more bacteriophages may comprise a polynucleotide sequence with at least 96% identity to SEQ ID NO:48. In some embodiments, the one or more bacteriophages may comprise a polynucleotide sequence with at least 97% identity to SEQ ID NO:48. In some embodiments, the one or more bacteriophages may comprise a polynucleotide sequence with at least 98% identity to SEQ ID NO:48. In some embodiments, the one or more bacteriophages may comprise a polynucleotide sequence with at least 99% identity to SEQ ID NO:48.

[0152] In some embodiments, the one or more bacteriophages may comprise a polynucleotide sequence with at least 91% identity to SEQ ID NO:49. In some embodiments, the one or more bacteriophages may comprise a polynucleotide sequence with at least 92% identity to SEQ ID NO:49. In some embodiments, the one or more bacteriophages may comprise a polynucleotide sequence with at least 93% identity to SEQ ID NO:49. In some embodiments, the one or more bacteriophages may comprise a polynucleotide sequence with at least 94% identity to SEQ ID NO:49. In some embodiments, the one or more bacteriophages may comprise a polynucleotide sequence with at least 95% identity to SEQ ID NO:49. In some embodiments, the one or more bacteriophages may comprise a polynucleotide sequence with at least 96% identity to SEQ ID NO:49. In some embodiments, the one or more bacteriophages may comprise a polynucleotide sequence with at least 97% identity to SEQ ID NO:49. In some embodiments, the one or more bacteriophages may comprise a polynucleotide sequence with at least 98% identity to SEQ ID NO:49. In some embodiments, the one or more bacteriophages may comprise a polynucleotide sequence with at least 99% identity to SEQ ID NO:49.

[0153] In some embodiments, the one or more bacteriophages may comprise a polynucleotide sequence with at least 91% identity to SEQ ID NO:50. In some embodiments, the one or more bacteriophages may comprise a polynucleotide sequence with at least 92% identity to SEQ ID NO:50. In some embodiments, the one or more bacteriophages may comprise a polynucleotide sequence with at least 93% identity to SEQ ID NO:50. In some embodiments, the one or more bacteriophages may comprise a polynucleotide sequence with at least 94% identity to SEQ ID NO:50. In some embodiments, the one or more bacteriophages may comprise a polynucleotide sequence with at least 95% identity to SEQ ID NO:50. In some embodiments, the one or more bacteriophages may comprise a polynucleotide sequence with at least 96% identity to SEQ ID NO:50. In some embodiments, the one or more bacteriophages may comprise a polynucleotide sequence with at least 97% identity to SEQ ID NO:50. In some embodiments, the one or more bacteriophages may comprise a polynucleotide sequence with at least 98% identity to SEQ ID NO:50. In some embodiments, the one or more bacteriophages may comprise a polynucleotide sequence with at least 99% identity to SEQ ID NO:50.

[0154] In some embodiments, the one or more bacteriophages may comprise a polynucleotide sequence with at least 91% identity to SEQ ID NO:51. In some embodiments, the one or more bacteriophages may comprise a polynucleotide sequence with at least 92% identity to SEQ ID NO:51. In some embodiments, the one or more bacteriophages may comprise a polynucleotide sequence with at least 93% identity to SEQ ID NO:51. In some embodiments, the one or more bacteriophages may comprise a polynucleotide sequence with at least 94% identity to SEQ ID NO:51. In some embodiments, the one or more bacteriophages may comprise a polynucleotide sequence with at least 95% identity to SEQ ID NO:51. In some embodiments, the one or more bacteriophages may comprise a polynucleotide sequence with at least 96% identity to SEQ ID NO:51. In some embodiments, the one or more bacteriophages may comprise a polynucleotide sequence with at least 97% identity to SEQ ID NO:51. In some embodiments, the one or more bacteriophages may comprise a polynucleotide sequence with at least 98% identity to SEQ ID NO:51. In some embodiments, the one or more bacteriophages may comprise a polynucleotide sequence with at least 99% identity to SEQ ID NO:51.

[0155] In some embodiments, the one or more bacteriophages may comprise a polynucleotide sequence with at least 91% identity to SEQ ID NO:52. In some embodiments, the one or more bacteriophages may comprise a polynucleotide sequence with at least 92% identity to SEQ ID NO:52. In some embodiments, the one or more bacteriophages may comprise a polynucleotide sequence with at least 93% identity to SEQ ID NO:52. In some embodiments, the one or more bacteriophages may comprise a polynucleotide sequence with at least 94% identity to SEQ ID NO:52. In some embodiments, the one or more bacteriophages may comprise a polynucleotide sequence with at least 95% identity to SEQ ID NO:52. In some embodiments, the one or more bacteriophages may comprise a polynucleotide sequence with at least 96% identity to SEQ ID NO:52. In some embodiments, the one or more bacteriophages may comprise a polynucleotide sequence with at least 97% identity to SEQ ID NO:52. In some embodiments, the one or more bacteriophages may comprise a polynucleotide sequence with at least 98% identity to SEQ ID NO:52. In some embodiments, the one or more bacteriophages may comprise a polynucleotide sequence with at least 99% identity to SEQ ID NO:52.

[0156] In some embodiments, the one or more bacteriophages may comprise a polynucleotide sequence with at least 91% identity to SEQ ID NO:53. In some embodiments, the one or more bacteriophages may comprise a polynucleotide sequence with at least 92% identity to SEQ ID NO:53. In some embodiments, the one or more bacteriophages may comprise a polynucleotide sequence with at least 93% identity to SEQ ID NO:53. In some embodiments, the one or more bacteriophages may comprise a polynucleotide sequence with at least 94% identity to SEQ ID NO:53. In some embodiments, the one or more bacteriophages may comprise a polynucleotide sequence with at least 95% identity to SEQ ID NO:53. In some embodiments, the one or more bacteriophages may comprise a polynucleotide sequence with at least 96% identity to SEQ ID NO:53. In some embodiments, the one or more bacteriophages may comprise a polynucleotide sequence with at least 97% identity to SEQ ID NO:53. In some embodiments, the one or more bacteriophages may comprise a polynucleotide sequence with at least 98% identity to SEQ ID NO:53. In some embodiments, the one or more bacteriophages may comprise a polynucleotide sequence with at least 99% identity to SEQ ID NO:53.

[0157] In some embodiments, the one or more bacteriophages may comprise a polynucleotide sequence with at least 91% identity to SEQ ID NO:54. In some embodiments, the one or more bacteriophages may comprise a polynucleotide sequence with at least 92% identity to SEQ ID NO:54. In some embodiments, the one or more bacteriophages may comprise a polynucleotide sequence with at least 93% identity to SEQ ID NO:54. In some embodiments, the one or more bacteriophages may comprise a polynucleotide sequence with at least 94% identity to SEQ ID NO:54. In some embodiments, the one or more bacteriophages may comprise a polynucleotide sequence with at least 95% identity to SEQ ID NO:54. In some embodiments, the one or more bacteriophages may comprise a polynucleotide sequence with at least 96% identity to SEQ ID NO:54. In some embodiments, the one or more bacteriophages may comprise a polynucleotide sequence with at least 97% identity to SEQ ID NO:54. In some embodiments, the one or more bacteriophages may comprise a polynucleotide sequence with at least 98% identity to SEQ ID NO:54. In some embodiments, the one or more bacteriophages may comprise a polynucleotide sequence with at least 99% identity to SEQ ID NO:54.

[0158] In some embodiments, the one or more bacteriophages may comprise a polynucleotide sequence with at least 91% identity to SEQ ID NO:55. In some embodiments, the one or more bacteriophages may comprise a polynucleotide sequence with at least 92% identity to SEQ ID NO:55. In some embodiments, the one or more bacteriophages may comprise a polynucleotide sequence with at least 93% identity to SEQ ID NO:55. In some embodiments, the one or more bacteriophages may comprise a polynucleotide sequence with at least 94% identity to SEQ ID NO:55. In some embodiments, the one or more bacteriophages may comprise a polynucleotide sequence with at least 95% identity to SEQ ID NO:55. In some embodiments, the one or more bacteriophages may comprise a polynucleotide sequence with at least 96% identity to SEQ ID NO:55. In some embodiments, the one or more bacteriophages may comprise a polynucleotide sequence with at least 97% identity to SEQ ID NO:55. In some embodiments, the one or more bacteriophages may comprise a polynucleotide sequence with at least 98% identity to SEQ ID NO:55. In some embodiments, the one or more bacteriophages may comprise a polynucleotide sequence with at least 99% identity to SEQ ID NO:55.

[0159] In some embodiments, the one or more bacteriophages may comprise a polynucleotide sequence with at least 91% identity to SEQ ID NO:56. In some embodiments, the one or more bacteriophages may comprise a polynucleotide sequence with at least 92% identity to SEQ ID NO:56. In some embodiments, the one or more bacteriophages may comprise a polynucleotide sequence with at least 93% identity to SEQ ID NO:56. In some embodiments, the one or more bacteriophages may comprise a polynucleotide sequence with at least 94% identity to SEQ ID NO:56. In some embodiments, the one or more bacteriophages may comprise a polynucleotide sequence with at least 95% identity to SEQ ID NO:56. In some embodiments, the one or more bacteriophages may comprise a polynucleotide sequence with at least 96% identity to SEQ ID NO:56. In some embodiments, the one or more bacteriophages may comprise a polynucleotide sequence with at least 97% identity to SEQ ID NO:56. In some embodiments, the one or more bacteriophages may comprise a polynucleotide sequence with at least 98% identity to SEQ ID NO:56. In some embodiments, the one or more bacteriophages may comprise a polynucleotide sequence with at least 99% identity to SEQ ID NO:56.

[0160] In some embodiments, the one or more bacteriophages may comprise a polynucleotide sequence with at least 91% identity to SEQ ID NO:57. In some embodiments, the one or more bacteriophages may comprise a polynucleotide sequence with at least 92% identity to SEQ ID NO:57. In some embodiments, the one or more bacteriophages may comprise a polynucleotide sequence with at least 93% identity to SEQ ID NO:57. In some embodiments, the one or more bacteriophages may comprise a polynucleotide sequence with at least 94% identity to SEQ ID NO:57. In some embodiments, the one or more bacteriophages may comprise a polynucleotide sequence with at least 95% identity to SEQ ID NO:57. In some embodiments, the one or more bacteriophages may comprise a polynucleotide sequence with at least 96% identity to SEQ ID NO:57. In some embodiments, the one or more bacteriophages may comprise a polynucleotide sequence with at least 97% identity to SEQ ID NO:57. In some embodiments, the one or more bacteriophages may comprise a polynucleotide sequence with at least 98% identity to SEQ ID NO:57. In some embodiments, the one or more bacteriophages may comprise a polynucleotide sequence with at least 99% identity to SEQ ID NO:57.

[0161] In some embodiments, the one or more bacteriophages may comprise a polynucleotide sequence with at least 91% identity to SEQ ID NO:58. In some embodiments, the one or more bacteriophages may comprise a polynucleotide sequence with at least 92% identity to SEQ ID NO:58. In some embodiments, the one or more bacteriophages may comprise a polynucleotide sequence with at least 93% identity to SEQ ID NO:58. In some embodiments, the one or more bacteriophages may comprise a polynucleotide sequence with at least 94% identity to SEQ ID NO:58. In some embodiments, the one or more bacteriophages may comprise a polynucleotide sequence with at least 95% identity to SEQ ID NO:58. In some embodiments, the one or more bacteriophages may comprise a polynucleotide sequence with at least 96% identity to SEQ ID NO:58. In some embodiments, the one or more bacteriophages may comprise a polynucleotide sequence with at least 97% identity to SEQ ID NO:58. In some embodiments, the one or more bacteriophages may comprise a polynucleotide sequence with at least 98% identity to SEQ ID NO:58. In some embodiments, the one or more bacteriophages may comprise a polynucleotide sequence with at least 99% identity to SEQ ID NO:58.

[0162] In some embodiments, the one or more bacteriophages may comprise a polynucleotide sequence with at least 91% identity to SEQ ID NO:60. In some embodiments, the one or more bacteriophages may comprise a polynucleotide sequence with at least 92% identity to SEQ ID NO:60. In some embodiments, the one or more bacteriophages may comprise a polynucleotide sequence with at least 93% identity to SEQ ID NO:60. In some embodiments, the one or more bacteriophages may comprise a polynucleotide sequence with at least 94% identity to SEQ ID NO:60. In some embodiments, the one or more bacteriophages may comprise a polynucleotide sequence with at least 95% identity to SEQ ID NO:60. In some embodiments, the one or more bacteriophages may comprise a polynucleotide sequence with at least 96% identity to SEQ ID NO:60. In some embodiments, the one or more bacteriophages may comprise a polynucleotide sequence with at least 97% identity to SEQ ID NO:60. In some embodiments, the one or more bacteriophages may comprise a polynucleotide sequence with at least 98% identity to SEQ ID NO:60. In some embodiments, the one or more bacteriophages may comprise a polynucleotide sequence with at least 99% identity to SEQ ID NO:60.

[0163] In some embodiments, the one or more bacteriophages may comprise a polynucleotide sequence with at least 91% identity to SEQ ID NO:61. In some embodiments, the one or more bacteriophages may comprise a polynucleotide sequence with at least 92% identity to SEQ ID NO:61. In some embodiments, the one or more bacteriophages may comprise a polynucleotide sequence with at least 93% identity to SEQ ID NO:61. In some embodiments, the one or more bacteriophages may comprise a polynucleotide sequence with at least 94% identity to SEQ ID NO:61. In some embodiments, the one or more bacteriophages may comprise a polynucleotide sequence with at least 95% identity to SEQ ID NO:61. In some embodiments, the one or more bacteriophages may comprise a polynucleotide sequence with at least 96% identity to SEQ ID NO:61. In some embodiments, the one or more bacteriophages may comprise a polynucleotide sequence with at least 97% identity to SEQ ID NO:61. In some embodiments, the one or more bacteriophages may comprise a polynucleotide sequence with at least 98% identity to SEQ ID NO:61. In some embodiments, the one or more bacteriophages may comprise a polynucleotide sequence with at least 99% identity to SEQ ID NO:61.

[0164] In some embodiments, the one or more bacteriophages may comprise a polynucleotide sequence with at least 91% identity to SEQ ID NO:62. In some embodiments, the one or more bacteriophages may comprise a polynucleotide sequence with at least 92% identity to SEQ ID NO:62. In some embodiments, the one or more bacteriophages may comprise a polynucleotide sequence with at least 93% identity to SEQ ID NO:62. In some embodiments, the one or more bacteriophages may comprise a polynucleotide sequence with at least 94% identity to SEQ ID NO:62. In some embodiments, the one or more bacteriophages may comprise a polynucleotide sequence with at least 95% identity to SEQ ID NO:62. In some embodiments, the one or more bacteriophages may comprise a polynucleotide sequence with at least 96% identity to SEQ ID NO:62. In some embodiments, the one or more bacteriophages may comprise a polynucleotide sequence with at least 97% identity to SEQ ID NO:62. In some embodiments, the one or more bacteriophages may comprise a polynucleotide sequence with at least 98% identity to SEQ ID NO:62. In some embodiments, the one or more bacteriophages may comprise a polynucleotide sequence with at least 99% identity to SEQ ID NO:62.

[0165] In some embodiments, the one or more bacteriophages may comprise a polynucleotide sequence with at least 91% identity to SEQ ID NO:63. In some embodiments, the one or more bacteriophages may comprise a polynucleotide sequence with at least 92% identity to SEQ ID NO:63. In some embodiments, the one or more bacteriophages may comprise a polynucleotide sequence with at least 93% identity to SEQ ID NO:63. In some embodiments, the one or more bacteriophages may comprise a polynucleotide sequence with at least 94% identity to SEQ ID NO:63. In some embodiments, the one or more bacteriophages may comprise a polynucleotide sequence with at least 95% identity to SEQ ID NO:63. In some embodiments, the one or more bacteriophages may comprise a polynucleotide sequence with at least 96% identity to SEQ ID NO:63. In some embodiments, the one or more bacteriophages may comprise a polynucleotide sequence with at least 97% identity to SEQ ID NO:63. In some embodiments, the one or more bacteriophages may comprise a polynucleotide sequence with at least 98% identity to SEQ ID NO:63. In some embodiments, the one or more bacteriophages may comprise a polynucleotide sequence with at least 99% identity to SEQ ID NO:63.

[0166] In some embodiments, the one or more bacteriophages may comprise a polynucleotide sequence with at least 91% identity to SEQ ID NO:64. In some embodiments, the one or more bacteriophages may comprise a polynucleotide sequence with at least 92% identity to SEQ ID NO:64. In some embodiments, the one or more bacteriophages may comprise a polynucleotide sequence with at least 93% identity to SEQ ID NO:64. In some embodiments, the one or more bacteriophages may comprise a polynucleotide sequence with at least 94% identity to SEQ ID NO:64. In some embodiments, the one or more bacteriophages may comprise a polynucleotide sequence with at least 95% identity to SEQ ID NO:64. In some embodiments, the one or more bacteriophages may comprise a polynucleotide sequence with at least 96% identity to SEQ ID NO:64. In some embodiments, the one or more bacteriophages may comprise a polynucleotide sequence with at least 97% identity to SEQ ID NO:64. In some embodiments, the one or more bacteriophages may comprise a polynucleotide sequence with at least 98% identity to SEQ ID NO:64. In some embodiments, the one or more bacteriophages may comprise a polynucleotide sequence with at least 99% identity to SEQ ID NO:64.

[0167] In some embodiments, the one or more bacteriophages may comprise a polynucleotide sequence with at least 91% identity to SEQ ID NO:65. In some embodiments, the one or more bacteriophages may comprise a polynucleotide sequence with at least 92% identity to SEQ ID NO:65. In some embodiments, the one or more bacteriophages may comprise a polynucleotide sequence with at least 93% identity to SEQ ID NO:65. In some embodiments, the one or more bacteriophages may comprise a polynucleotide sequence with at least 94% identity to SEQ ID NO:65. In some embodiments, the one or more bacteriophages may comprise a polynucleotide sequence with at least 95% identity to SEQ ID NO:65. In some embodiments, the one or more bacteriophages may comprise a polynucleotide sequence with at least 96% identity to SEQ ID NO:65. In some embodiments, the one or more bacteriophages may comprise a polynucleotide sequence with at least 97% identity to SEQ ID NO:65. In some embodiments, the one or more bacteriophages may comprise a polynucleotide sequence with at least 98% identity to SEQ ID NO:65. In some embodiments, the one or more bacteriophages may comprise a polynucleotide sequence with at least 99% identity to SEQ ID NO:65.

[0168] In some embodiments, the one or more bacteriophages may comprise a polynucleotide sequence with at least 91% identity to SEQ ID NO:66. In some embodiments, the one or more bacteriophages may comprise a polynucleotide sequence with at least 92% identity to SEQ ID NO:66. In some embodiments, the one or more bacteriophages may comprise a polynucleotide sequence with at least 93% identity to SEQ ID NO:66. In some embodiments, the one or more bacteriophages may comprise a polynucleotide sequence with at least 94% identity to SEQ ID NO:66. In some embodiments, the one or more bacteriophages may comprise a polynucleotide sequence with at least 95% identity to SEQ ID NO:66. In some embodiments, the one or more bacteriophages may comprise a polynucleotide sequence with at least 96% identity to SEQ ID NO:66. In some embodiments, the one or more bacteriophages may comprise a polynucleotide sequence with at least 97% identity to SEQ ID NO:66. In some embodiments, the one or more bacteriophages may comprise a polynucleotide sequence with at least 98% identity to SEQ ID NO:66. In some embodiments, the one or more bacteriophages may comprise a polynucleotide sequence with at least 99% identity to SEQ ID NO:66.

[0169] In some embodiments, the one or more bacteriophages may comprise a polynucleotide sequence with at least 91% identity to SEQ ID NO:67. In some embodiments, the one or more bacteriophages may comprise a polynucleotide sequence with at least 92% identity to SEQ ID NO:67. In some embodiments, the one or more bacteriophages may comprise a polynucleotide sequence with at least 93% identity to SEQ ID NO:67. In some embodiments, the one or more bacteriophages may comprise a polynucleotide sequence with at least 94% identity to SEQ ID NO:67. In some embodiments, the one or more bacteriophages may comprise a polynucleotide sequence with at least 95% identity to SEQ ID NO:67. In some embodiments, the one or more bacteriophages may comprise a polynucleotide sequence with at least 96% identity to SEQ ID NO:67. In some embodiments, the one or more bacteriophages may comprise a polynucleotide sequence with at least 97% identity to SEQ ID NO:67. In some embodiments, the one or more bacteriophages may comprise a polynucleotide sequence with at least 98% identity to SEQ ID NO:67. In some embodiments, the one or more bacteriophages may comprise a polynucleotide sequence with at least 99% identity to SEQ ID NO:67.

[0170] In some embodiments, the one or more bacteriophages may comprise a polynucleotide sequence with at least 91% identity to SEQ ID NO:68. In some embodiments, the one or more bacteriophages may comprise a polynucleotide sequence with at least 92% identity to SEQ ID NO:68. In some embodiments, the one or more bacteriophages may comprise a polynucleotide sequence with at least 93% identity to SEQ ID NO:68. In some embodiments, the one or more bacteriophages may comprise a polynucleotide sequence with at least 94% identity to SEQ ID NO:68. In some embodiments, the one or more bacteriophages may comprise a polynucleotide sequence with at least 95% identity to SEQ ID NO:68. In some embodiments, the one or more bacteriophages may comprise a polynucleotide sequence with at least 96% identity to SEQ ID NO:68. In some embodiments, the one or more bacteriophages may comprise a polynucleotide sequence with at least 97% identity to SEQ ID NO:68. In some embodiments, the one or more bacteriophages may comprise a polynucleotide sequence with at least 98% identity to SEQ ID NO:68. In some embodiments, the one or more bacteriophages may comprise a polynucleotide sequence with at least 99% identity to SEQ ID NO:68.

[0171] In some embodiments, the one or more bacteriophages may comprise a polynucleotide sequence with at least 91% identity to SEQ ID NO:69. In some embodiments, the one or more bacteriophages may comprise a polynucleotide sequence with at least 92% identity to SEQ ID NO:69. In some embodiments, the one or more bacteriophages may comprise a polynucleotide sequence with at least 93% identity to SEQ ID NO:69. In some embodiments, the one or more bacteriophages may comprise a polynucleotide sequence with at least 94% identity to SEQ ID NO:69. In some embodiments, the one or more bacteriophages may comprise a polynucleotide sequence with at least 95% identity to SEQ ID NO:69. In some embodiments, the one or more bacteriophages may comprise a polynucleotide sequence with at least 96% identity to SEQ ID NO:69. In some embodiments, the one or more bacteriophages may comprise a polynucleotide sequence with at least 97% identity to SEQ ID NO:69. In some embodiments, the one or more bacteriophages may comprise a polynucleotide sequence with at least 98% identity to SEQ ID NO:69. In some embodiments, the one or more bacteriophages may comprise a polynucleotide sequence with at least 99% identity to SEQ ID NO:69.

[0172] In some embodiments, the one or more bacteriophages may comprise a polynucleotide sequence with at least 91% identity to SEQ ID NO:70. In some embodiments, the one or more bacteriophages may comprise a polynucleotide sequence with at least 92% identity to SEQ ID NO:70. In some embodiments, the one or more bacteriophages may comprise a polynucleotide sequence with at least 93% identity to SEQ ID NO:70. In some embodiments, the one or more bacteriophages may comprise a polynucleotide sequence with at least 94% identity to SEQ ID NO:70. In some embodiments, the one or more bacteriophages may comprise a polynucleotide sequence with at least 95% identity to SEQ ID NO:70. In some embodiments, the one or more bacteriophages may comprise a polynucleotide sequence with at least 96% identity to SEQ ID NO:70. In some embodiments, the one or more bacteriophages may comprise a polynucleotide sequence with at least 97% identity to SEQ ID NO:70. In some embodiments, the one or more bacteriophages may comprise a polynucleotide sequence with at least 98% identity to SEQ ID NO:70. In some embodiments, the one or more bacteriophages may comprise a polynucleotide sequence with at least 99% identity to SEQ ID NO:70.

[0173] In some embodiments, the one or more bacteriophages may comprise a polynucleotide sequence with at least 91% identity to SEQ ID NO:71. In some embodiments, the one or more bacteriophages may comprise a polynucleotide sequence with at least 92% identity to SEQ ID NO:71. In some embodiments, the one or more bacteriophages may comprise a polynucleotide sequence with at least 93% identity to SEQ ID NO:71. In some embodiments, the one or more bacteriophages may comprise a polynucleotide sequence with at least 94% identity to SEQ ID NO:71. In some embodiments, the one or more bacteriophages may comprise a polynucleotide sequence with at least 95% identity to SEQ ID NO:71. In some embodiments, the one or more bacteriophages may comprise a polynucleotide sequence with at least 96% identity to SEQ ID NO:71. In some embodiments, the one or more bacteriophages may comprise a polynucleotide sequence with at least 97% identity to SEQ ID NO:71. In some embodiments, the one or more bacteriophages may comprise a polynucleotide sequence with at least 98% identity to SEQ ID NO:71. In some embodiments, the one or more bacteriophages may comprise a polynucleotide sequence with at least 99% identity to SEQ ID NO:71.

[0174] In some embodiments, the one or more bacteriophages may comprise a polynucleotide sequence with at least 91% identity to SEQ ID NO:73. In some embodiments, the one or more bacteriophages may comprise a polynucleotide sequence with at least 92% identity to SEQ ID NO:73. In some embodiments, the one or more bacteriophages may comprise a polynucleotide sequence with at least 93% identity to SEQ ID NO:73. In some embodiments, the one or more bacteriophages may comprise a polynucleotide sequence with at least 94% identity to SEQ ID NO:73. In some embodiments, the one or more bacteriophages may comprise a polynucleotide sequence with at least 95% identity to SEQ ID NO:73. In some embodiments, the one or more bacteriophages may comprise a polynucleotide sequence with at least 96% identity to SEQ ID NO:73. In some embodiments, the one or more bacteriophages may comprise a polynucleotide sequence with at least 97% identity to SEQ ID NO:73. In some embodiments, the one or more bacteriophages may comprise a polynucleotide sequence with at least 98% identity to SEQ ID NO:73. In some embodiments, the one or more bacteriophages may comprise a polynucleotide sequence with at least 99% identity to SEQ ID NO:73.

[0175] In some embodiments, the EPS depolymerase is alginate lyase, as described in detail elsewhere herein.

[0176] In some embodiments, one or more of the bacteriophages are engineered. In some embodiments, the one or more bacteriophages are genetically engineered. As used herein, “genetically engineered” or “genetically modified” bacteriophages may be bacteriophages whose polynucleotide sequence has been altered by genetic engineering techniques. Genetic engineering of polynucleotide sequences can be achieved by any modern molecular biology technique well known in the art, including but not limited to homologous recombination, bacteriophage engineering, CRISPR-based manipulation (e.g., CRISPR-Cas), reconstruction of full-length phage genomes in yeast or through in-vitro DNA splicing followed by transformation of full-length naked phage DNA into a host bacteria, and any combination of techniques thereof.

[0177] In some embodiments, two or more of the bacteriophages are engineered. In some embodiments, three or more of the bacteriophages are engineered. In some embodiments, four or more of the bacteriophages are engineered. In some embodiments, five or more of the bacteriophages are engineered. In some embodiments, six or more of the bacteriophages are engineered. In some embodiments, seven or more of the bacteriophages are engineered. In some embodiments, eight or more of the bacteriophages are engineered. In some embodiments, nine or more of the bacteriophages are engineered. In some embodiments, ten or more of the bacteriophages are engineered.

[0178] In some embodiments, a second bacteriophage of the one or more bacteriophages comprises a naturally occurring phage. The terms “naturally-occurring” and “wild-type” refer to a form found in nature. For example, a naturally occurring or wild-type nucleic acid molecule, nucleotide sequence or protein may be present in and isolated from a natural source, and is not intentionally modified by human manipulation. As such, the naturally occurring phage is a non-engineered phage that occurs in nature. In some embodiments, a second bacteriophage can comprise a mutated naturally occurring phage, and/or a partially or fully synthetic phage, particularly where the additional bacteriophage has the ability to infect, kill, or reduce a bacterial infection, as, for example, described in detail in WO 2016/100389, incorporated herein by reference, in its entirety.

[0179] In some embodiments, two or more of the bacteriophages are naturally occurring phages. In some embodiments, three or more of the bacteriophages are naturally occurring phages. In some embodiments, four or more of the bacteriophages are naturally occurring phages. In some embodiments, five or more of the bacteriophages are naturally occurring phages. In some embodiments, six or more of the bacteriophages are naturally occurring phages. In some embodiments, seven or more of the bacteriophages are naturally occurring phages. In some embodiments, eight or more of the bacteriophages are naturally occurring phages. In some embodiments, nine or more of the bacteriophages are naturally occurring phages. In some embodiments, ten or more of the bacteriophages are naturally occurring phages.

[0180] In some embodiments, one or more of the bacteriophages in a composition are engineered and one or more bacteriophages are naturally occurring. In some embodiments, one or more of the bacteriophages in a composition are engineered and two or more bacteriophages are naturally occurring. In some embodiments, one or more of the bacteriophages in a composition are engineered and three or more bacteriophages are naturally occurring. In some embodiments, one or more of the bacteriophages in a composition are engineered and four or more bacteriophages are naturally occurring. In some embodiments, one or more of the bacteriophages in a composition are engineered and five or more bacteriophages are naturally occurring. In some embodiments, two or more of the bacteriophages in a composition are engineered and one or more bacteriophages are naturally occurring. In some embodiments, three or more of the bacteriophages in a composition are engineered and one or more bacteriophages are naturally occurring. In some embodiments, four or more of the bacteriophages in a composition are engineered and one or more bacteriophages are naturally occurring. In some embodiments, five or more of the bacteriophages in a composition are engineered and one or more bacteriophages are naturally occurring. In some embodiments, any other combination of engineered and naturally occurring phages is envisioned.

[0181] In some embodiments, the bacteriophage targets Pseudomonas. In some embodiments, at least one of the bacteriophages target Pseudomonas aeruginosa. In some embodiments, the bacteriophage targets one or more Pseudomonas aeruginosa strains.

[0182] In some embodiments, the one or more bacteriophages of the composition targets one or more of Pseudomonas aeruginosa, antibiotic-resistant Pseudomonas aeruginosa, and multiple antibiotic-resistant Pseudomonas aeruginosa. In some embodiments, the one or more bacteriophages of the composition infect and kill one or more of Pseudomonas aeruginosa, antibiotic-resistant Pseudomonas aeruginosa, and multiple antibiotic-resistant Pseudomonas aeruginosa, as described above.

[0183] In some embodiments, the composition further comprises a storage medium for storage at room temperature or a temperature at or below 8° C. In embodiments, the bacteriophage composition includes a storage media for storage at a temperature at or below 7° C. In embodiments, the bacteriophage composition includes a storage media for storage at a temperature at or below 6° C. In embodiments, the bacteriophage composition includes a storage media for storage at a temperature at or below 5° C. In embodiments, the bacteriophage composition includes a storage media for storage at a temperature at or below 4° C. In embodiments, the bacteriophage composition includes a storage media for storage at a temperature at or below 3° C. In embodiments, the bacteriophage composition includes a storage media for storage at a temperature at or below 2° C. In embodiments, the bacteriophage composition includes a storage media for storage at a temperature at or below 1° C. In embodiments, the bacteriophage composition includes a storage media for storage at a temperature at or below 0° C. In embodiments, the bacteriophage composition includes a storage media for storage at a temperature at or below −20° C. In embodiments, the bacteriophage composition includes a storage media for storage at a temperature at or below −80° C.

[0184] In specific embodiments, the composition is stored at a temperature ranging from −20° C. to 25° C., such as at 20° C., 21° C., 22° C., 23° C., 24° C., or 25° C., or any value or subrange in between, including endpoints.

[0185] In specific embodiments, the composition is stored at a temperature ranging from 2° C. to 8° C., such as at 2° C., 3° C., 4° C., 5° C., 6° C., 7° C., or 8° C., or any value or subrange in between, including endpoints.

[0186] In specific embodiments, the composition is stored at room temperature.

[0187] In some embodiments, the storage medium comprises a cryoprotectant. In some embodiments, the cryoprotectant is glycerol, such as between about 5% and about 50% glycerol; more preferably between about 10% and about 30% glycerol; most preferably about 20% glycerol. In other embodiments, the cryoprotectant is sucrose, such as between about 5% to about 30% sucrose, most preferably about 10% sucrose. In some embodiments, the cryoprotectant is dimethylsulfoxide (DMSO), such as between about 2% to about 10% DMSO. Suitable concentrations may be any value or subvalue within the recited ranges, including endpoints.

[0188] In some embodiments, the bacteriophage composition may be used directly, refrigerated, cryodesiccated, lyophilized, stored frozen in aqueous or other solution with the appropriate cryoprotectant, as described above.

[0189] In some embodiments, the composition further comprises a pharmaceutically acceptable carrier, diluent, excipient or combinations thereof, as described in detail elsewhere herein.

[0190] In some embodiments, the composition is a liquid, semi-liquid, solid, frozen, or lyophilized formulation. In embodiments, the bacteriophage composition is in a liquid formulation. In embodiments, the bacteriophage composition is in a semi-liquid formulation. In embodiments, the bacteriophage composition is in a solid formulation. In embodiments, the bacteriophage composition is in a frozen formulation. In embodiments, the bacteriophage composition is in a lyophilized formulation.

[0191] In some embodiments, the composition comprises between 1×10⁸ and 1×10¹² PFU per milliliter of each bacteriophage. In some embodiments, the bacteriophage concentration is 1×10⁸ to 1×10⁹ PFU, 1×10⁸ to 1×10¹⁰ PFU, 1×10⁸ to 1×10¹¹ PFU, or 1×10⁸ to 1×10¹² PFU of each phage per ml of composition. In some embodiments, the bacteriophage concentration is 3×10⁸ to 1×10⁹ PFU, 3×10⁸ to 1×10¹⁰ PFU, 3×10⁸ to 1×10¹¹ PFU, or 3×10⁸ to 1×10¹² PFU of each phage per ml of composition. In some embodiments, the bacteriophage concentration is 3×10⁸ to 3×10⁹ PFU, or 3×10⁸ to 3×10¹⁰ PFU, or 3×10⁸ to 3×10¹² PFU of each phage per ml of composition. In some embodiments, the bacteriophage concentration is 1×10⁹ to 1×10¹⁰ PFU, or 1×10⁹ to 1×10¹ PFU, or 1×10⁹ to 1×10¹² PFU of each phage per ml of composition. In some embodiments, the bacteriophage concentration is 1×10¹⁰ to 1×10¹² PFU of each phage per ml of composition. In some embodiments, the bacteriophage concentration is 1×10¹² to 1×10¹² PFU of each phage per ml of composition. In some embodiments, the bacteriophage is administered to a subject at a dosage of at least about 1×10⁸ PFU of each phage, at least about 3×10⁸ PFU of each phage, at least about 1×10⁹ PFU of each phage, at least about 1×10¹⁰ PFU of each phage, at least about 1×10¹¹ PFU, or at least about 1×10¹² PFU of each phage per ml of composition. In embodiments, one or more bacteriophage(s) may be combined to form a total concentration of about 1×10⁸, about 3×10⁸, about 1×10⁹, about 1×10¹⁰, 1×10¹¹, or 1×10¹² PFU of each phage per ml of composition. Concentrations include any value, subvalue, range, or subrange within the recited ranges, including endpoints.

[0192] In some embodiments, the one or more bacteriophages of the composition reduce biofilm mass, as described in more detail in the examples.

### Methods for Treating Infections

[0193] In some embodiments, the present disclosure relates to a method for treating a Pseudomonas aeruginosa infection, comprising administering any of the compositions described herein to a subject in need thereof. The term “in need of treatment” as used herein refers to a judgment made by a caregiver (e.g., physician, nurse, nurse practitioner, or individual in the case of humans; veterinarian in the case of animals, including non-human mammals) that a subject requires or will benefit from treatment. This judgment is made based on a variety of factors that are in the realm of a caregiver's expertise, but that include the knowledge that the subject is ill, or will be ill, as the result of a condition that is treatable by the compositions of the invention.

[0194] In some embodiments, provided herein are methods for treatment that include administration of a therapeutically effective amount of bacteriophage or a therapeutically effective amount of a bacteriophagre composition. In some embodiments, provided herein are methods for treatment that include administering a bacteriophage to a subject, where the bacteriophage includes a bacteriophage concentration range between about 1×10⁸ and about 1×10¹² PFU per ml of each bacteriophage. In some embodiments, the bacteriophage concentration is 1×10⁸ to 1×10⁹ PFU, 1×10⁸ to 1×10¹⁰ PFU, 1×10⁸ to 1×10¹¹ PFU, or 1×10¹² PFU of each phage per ml of composition. In some embodiments, the bacteriophage concentration is 3×10⁸ to 1×10⁹ PFU, 3×10⁸ to 1×10¹⁰ PFU, 3×10⁸ to 1×10¹¹ PFU, or 3×10⁸ to 1×10¹ PFU of each phage per ml of composition. In some embodiments, the bacteriophage concentration is 3×10⁸ to 3×10⁹ PFU, or 3×10⁸ to 3×10¹⁰ PFU of each phage per ml of composition. In some embodiments, the bacteriophage concentration is 1×10⁹ to 1×10¹⁰ PFU, 1×10⁹ to 1×10¹¹ PFU, 1×10⁹ to 1×10¹² PFU of each phage per ml of composition. In some embodiments, the bacteriophage concentration is 1×10¹⁰ to 1×10¹² PFU of each phage per ml of composition. In embodiments, one or more bacteriophage(s) may be combined and administered. In some embodiments, the one or more combined bacteriophage for administration can include two different engineered phage, such as any set forth herein. The two or more engineered phage can be engineered, for example, to each express a different EPS depolymerase or the same EPS depolymerase. The engineered phage can be from the same genus, for example as set forth herein, or from different genera. In some embodiments, it should be understood that one or more phage engineered to express a gene as set forth herein can be utilized in a medical treatment along with one or more phage that have not been so engineered (e.g., a phage that is not engineered at all or that does not include a depolymerase gene, for example). In some embodiments one or more bacteriophage(s) may be combined to form a total concentration of between about 1×10⁸ and about 5×10¹² PFU of each phage per ml of composition. In embodiments, one or more bacteriophage(s) may be combined to form a total concentration of between about 1×10⁸ and about 3×10¹² PFU of each phage per ml of composition. In embodiments, one or more bacteriophage(s) may be combined to form a total concentration of about 1×10⁸, 3×10⁸, 1×10⁹, 1×10¹⁰, 1×10¹¹, or 1×10¹² PFU of each phage per ml of composition. In embodiments, one or more bacteriophage(s) may be combined to form a total concentration of about 9×10⁸, 3×10⁹, 3×10¹⁰, 3×10¹¹, or 3×10¹² PFU of each phage per ml of composition. Concentrations include any value or range within the recited ranges, including endpoints.

[0195] In some embodiments, the bacteriophage is administered to a subject at a dosage of at least about 1×10⁸ PFU of each phage, at least about 3×10⁸ PFU of each phage, at least about 1×10⁹ PFU of each phage, at least about 1×10¹⁰ PFU of each phage, or at least about 1×10¹¹ PFU of each phage per dose. In some embodiments, the composition is administered at a dosage of at least 3×10⁸ PFU of total bacteriophages per dose. In some embodiments, the composition is administered at a dosage of at least 3×10⁹ PFU of total bacteriophages per dose. In some embodiments, the composition is administered at a dosage of at about 1×10⁸ PFU to about 5×10¹² PFU of total bacteriophages per dose. Doses include any value or range within the recited ranges, including endpoints.

[0196] In some embodiments, the method further comprises administration of an antibiotic. In embodiments, the antibiotic is selected from fluoroquinolone, carbapenem, aminoglycoside, ansamycin, cephalosporin, penicillin, beta lactam, beta lactamase inhibitor, folate pathway inhibitor, fucidane, glycopeptide, glycylcycline, lincosamide, lipopeptide, macrolide, quinolone, oxazolidinone, phenicol phosphonic acid, streptogramin, tetracycline, sulfonamide, imipenem, meropenem, amikacin, ciprofloxacin, levofloxacin, tobramycin, azithromycin, aztreonam, colistin, inhaled tobramycin, inhaled aztreonam, and inhaled colistin.

[0197] In some embodiments, the method further comprises administration of one or more CFTR modulators. In embodiments, the CFTR modulator may be selected from, but is not necessarily limited to, ivacaftor, lumacaftor/ivacaftor, tezacaftor/ivacaftor, elexacaftor/tezacaftor/ivacaftor, or any combination thereof.

[0198] In some embodiments, the bacterial infection has become resistant to one or more antibiotics or other treatments. In some embodiments, the bacterial infection has become resistant to one or more of a fluoroquinolone, carbapenem, aminoglycoside, ansamycin, cephalosporin, penicillin, beta lactam, beta lactamase inhibitor, folate pathway inhibitor, fucidane, glycopeptide, glycylcycline, lincosamide, lipopeptide, macrolide, quinolone, oxazolidinone, phenicol phosphonic acid, streptogramin, tetracycline, sulfonamide, imipenem, meropenem, amikacin, ciprofloxacin, levofloxacin, tobramycin, azithromycin, aztreonam, colistin, inhaled tobramycin, inhaled aztreonam, and inhaled colistin.

[0199] In some embodiments, the method can include treating, and optionally selecting for treatment, a subject who has not previously been treated with one or more antibiotics, or a subject that was previously treated with one or more antibiotics. For example, the phage treatment as described according to any of the embodiments set forth herein can be the first treatment (alone or combined with another type of treatment such as antibiotic treatment) given for a new infection or it can be a treatment that is given subsequent some other first treatment approach, such as for example, an antibiotic treatment. As noted, the methods can include selecting a subject or patient based upon that subject having already received a first treatment. That first treatment may not have been effective or may have only been partially effective. The infection may be one that has resistance or developed a resistance to another treatment, for example.

[0200] In embodiments, provided herein are methods for treating bacterial infection by administering any bacteriophage composition described herein in combination with fluoroquinolone. In embodiments, provided herein are methods for treating bacterial infection by administering any bacteriophage composition described herein in combination with carbapenem. In embodiments, provided herein are methods for treating bacterial infection by administering any bacteriophage composition described herein in combination with aminoglycoside. In embodiments, provided herein are methods for treating bacterial infection by administering any bacteriophage composition described herein in combination with ansamycin. In embodiments, provided herein are methods for treating bacterial infection by administering any bacteriophage composition described herein in combination with cephalosporin. In embodiments, provided herein are methods for treating bacterial infection by administering any bacteriophage composition described herein in combination with penicillin. In embodiments, provided herein are methods for treating bacterial infection by administering any bacteriophage composition described herein in combination with beta lactam. In embodiments, provided herein are methods for treating bacterial infection by administering any bacteriophage composition described herein in combination with beta lactamase inhibitor. In embodiments, provided herein are methods for treating bacterial infection by administering any bacteriophage composition described herein in combination with folate pathway inhibitor. In embodiments, provided herein are methods for treating bacterial infection by administering any bacteriophage composition described herein in combination with fucidane. In embodiments, provided herein are methods for treating bacterial infection by administering any bacteriophage composition described herein in combination with glycopeptide. In embodiments, provided herein are methods for treating bacterial infection by administering any bacteriophage composition described herein in combination with glycylcycline. In embodiments, provided herein are methods for treating bacterial infection by administering any bacteriophage composition described herein in combination with lincosamide. In embodiments, provided herein are methods for treating bacterial infection by administering any bacteriophage composition described herein in combination with lipopeptide. In embodiments, provided herein are methods for treating bacterial infection by administering any bacteriophage composition described herein in combination with macrolide. In embodiments, provided herein are methods for treating bacterial infection by administering any bacteriophage composition described herein in combination with quinolone. In embodiments, provided herein are methods for treating bacterial infection by administering any bacteriophage composition described herein in combination with oxazolidinone. In embodiments, provided herein are methods for treating bacterial infection by administering any bacteriophage composition described herein in combination with phenicol phosphonic acid. In embodiments, provided herein are methods for treating bacterial infection by administering any bacteriophage composition described herein in combination with streptogramin. In embodiments, provided herein are methods for treating bacterial infection by administering any bacteriophage composition described herein in combination with tetracycline. In embodiments, provided herein are methods for treating bacterial infection by administering any bacteriophage composition described herein in combination with sulfonamide. In embodiments, provided herein are methods for treating bacterial infection by administering any bacteriophage composition described herein in combination with imipenem. In embodiments, provided herein are methods for treating bacterial infection by administering any bacteriophage composition described herein in combination with meropenem. In embodiments, provided herein are methods for treating bacterial infection by administering any bacteriophage composition described herein in combination with amikacin. In embodiments, provided herein are methods for treating bacterial infection by administering any bacteriophage composition described herein in combination with ciprofloxacin. In embodiments, provided herein are methods for treating bacterial infection by administering any bacteriophage composition described herein in combination with levofloxacin. In embodiments, provided herein are methods for treating bacterial infection by administering any bacteriophage composition described herein in combination with tobramycin. In embodiments, provided herein are methods for treating bacterial infection by administering any bacteriophage composition described herein in combination with azithromycin. In embodiments, provided herein are methods for treating bacterial infection by administering any bacteriophage composition described herein in combination with aztreonam. In embodiments, provided herein are methods for treating bacterial infection by administering any bacteriophage composition described herein in combination with colistin. In embodiments, provided herein are methods for treating bacterial infection by administering any bacteriophage composition described herein in combination with inhaled tobramycin. In embodiments, provided herein are methods for treating bacterial infection by administering any bacteriophage composition described herein in combination with inhaled aztreonam. In embodiments, provided herein are methods for treating bacterial infection by administering any bacteriophage composition described herein in combination with inhaled colistin. Any one or more treatments described herein may be expressly excluded.

[0201] In some embodiments, the bacteriophage composition is administered via inhalation. In some embodiments, the bacteriophage composition is administered via nebulization.

[0202] In embodiments, provided herein are methods of administering to a subject any of the bacteriophage or composition described herein, where administration is over a range of about 3 to about 24 hours. In embodiments, the bacteriophage is administered to a subject every 3 hours. In embodiments, the bacteriophage is administered to a subject every 4 hours. In embodiments, the bacteriophage is administered to a subject every 5 hours. In embodiments, the bacteriophage is administered to a subject every 6 hours. In embodiments, the bacteriophage is administered to a subject every 7 hours. In embodiments, the bacteriophage is administered to a subject every 8 hours. In embodiments, the bacteriophage is administered to a subject every 9 hours. In embodiments, the bacteriophage is administered to a subject every 10 hours. In embodiments, the bacteriophage is administered to a subject every 11 hours. In some embodiments, the bacteriophage is administered to a subject every 12 hours. In embodiments, the bacteriophage is administered to a subject every 18 hours. In embodiments, the bacteriophage is administered to a subject every 24 hours. In some embodiments, the bacteriophage is administered to a subject at least once a day. Timing includes any value or range within the recited ranges, including endpoints.

[0203] In specific embodiments, the bacteriophage composition is administered at least every six hours.

[0204] In some embodiments, the bacteriophage composition is administered for at least one day. In embodiments, the bacteriophage composition is administered for a total of 2 days. In embodiments, the bacteriophage composition is administered for a total of 3 days. In embodiments, the bacteriophage composition is administered for a total of 4 days. In embodiments, the bacteriophage composition is administered for a total of 5 days. In embodiments, the bacteriophage composition is administered for a total of 6 days. In embodiments, the bacteriophage composition is administered for a total of 7 days. In embodiments, the bacteriophage composition is administered for a total of 10 days. In embodiments, the bacteriophage composition is administered for a total of 14 days. In embodiments, the bacteriophage composition is administered for a total of 21 days. In embodiments, the bacteriophage composition is administered for a total of 28 days. In embodiments, the bacteriophage composition is administered for between one day and about four weeks. The duration of administration may be any value or subrange within the recited ranges, including endpoints.

[0205] In some embodiments, the bacteriophages and/or compositions described herein may be administered in combination with one or more purified alginate lyases.

[0206] In some embodiments, the subject is human.

[0207] In some embodiments, the subject suffers from cystic fibrosis (CF). In some embodiments, the subject suffers from non-cystic fibrosis bronchiectasis (NFCB).

[0208] In other embodiments, the present disclosure also provides methods for treating a bacterial infection comprising: selecting a subject having a bacterial infection, and administering to the subject an effective amount of any of the bacteriophages described herein.

[0209] Subjects may be selected based on any of the following criteria. In some embodiments, the subject may have a bacterial infection that is a Pseudomonas infection. In some embodiments, the bacterial infection is a Pseudomonas aeruginosa infection. In some embodiments, the infection may include, or is associated with, but is not necessarily limited to, cystic fibrosis and/or pneumonia. In some embodiments, the infection comprises a bacterial infection in the presence of cystic fibrosis and/or pneumonia. In some embodiments, the infection may include, or is associated with, but is not necessarily limited to, non-cystic fibrosis bronchiectasis (NCFB). In some embodiments, the infection comprises a bacterial infection in the presence of NCFB and/or pneumonia. In some embodiments, the infection comprises mucoidy, or overproduction of alginate. In some embodiments, the bacterial infection is characterized by a biofilm. In some embodiments, the subject may have a Pseudomonas infection that is antibiotic resistant. In some embodiments, the subject may have a Pseudomonas infection that is resistant to multiple antibiotics. In some embodiments, the subject may be selected based upon having previously been treated for a bacterial infection with one or more antibiotics or another antibacterial treatment. In some embodiments the subject may be selected based upon having an infection by a bacterium that has developed resistance, or is resistant, to the initial antibiotic treatment or to one or more antibiotics.

### Methods for Making Engineered Bacteriophages

[0210] In some embodiments, the present disclosure provides a method for making an engineered bacteriophage, comprising providing a bacteriophage and incorporating an exopolysaccharide (EPS) depolymerase into the bacteriophage.

[0211] In some embodiments, the EPS depolymerase may be, but is not necessarily limited to, alginate lyase. In some embodiments, the alginate lyase may include, but is not necessarily limited to, Alg2A or A1-III, as described in detail elsewhere herein. In some embodiments, the alginate lyase sequences described herein may include portions of, or functional fragments of an alginate lyase gene. In some embodiments, the sequences may include a whole alginate lyase gene.

[0212] In some embodiments, the bacteriophage belongs to the Genus Phikmvvirus. In some embodiments, the bacteriophage belongs to the Genus Pakpunavirus. In some embodiments, the bacteriophage belongs to the Genus Bruynoghevirus. In some embodiments, the bacteriophage belongs to the Genus Pbunavirus. In some embodiments, the bacteriophage belongs to the Genus Luzseptimavirus. In some embodiments, the bacteriophage belongs to the Genus Litunavirus. In some embodiments, the bacteriophage belongs to the Genus Nankokuvirus

[0213] In some embodiments, the bacteriophages and compositions described herein encode regulatory elements, which may include, but are not necessarily limited to, promoters, cis-elements, enhancers, terminators, or introns. In some aspects of the invention, gene expression from the nucleic acid and/or phage encoding the inserted gene or EPS depolymerase is regulated by a promoter to which the nucleic acid is operatively linked. The term “promoter”, “promoter region” or “promoter sequence” refers to a nucleic acid sequence capable of binding RNA polymerase to initiate transcription of a gene in the 51 to 3 (“downstream”) direction. A gene is “under the control of” or “regulated by” a promoter when RNA polymerase binding to the promoter is a proximal cause of transcription of the gene. The promoter or promoter region typically provides a recognition site for RNA polymerase and other factors necessary for proper transcription initiation. The promoter may be isolated from the 5′ untranslated region (5′ UTR) of the genomic copy of the gene. Alternatively, promoters can be produced or designed synthetically by altering known DNA elements. Chimeric promoters that combine the sequence of one promoter with the sequence of another promoter are also contemplated. Promoters may be defined by their expression pattern based on, for example, metabolic, environmental, or developmental conditions. A promoter can be used as a regulatory element for regulating the expression of an operably linked transcribable polynucleotide molecule (e.g., a coding sequence). In addition to sequences recognized by RNA polymerase (and preferably other transcription factors), promoters may also contain regulatory elements, such as cis-elements or enhancer domains, that affect transcription of operably linked genes. A “viral promoter” is a native or non-native promoter that initiates transcription of one or more genes located within the viral genome.

[0214] The promoter(s) can be constitutive promoter(s) and/or conditional promoter(s) and/or inducible promoter(s) and/or tissue specific promoter(s). As used herein, the term “constitutive” promoter refers to a promoter that is active tinder most environmental and developmental conditions. Constitutive promoters are active regardless of the external environment such as light and medium composition. In some examples, a constitutive promoter is active in the presence and absence of a nutrient. For example, a constitutive promoter may be a promoter that is active (mediates transcription of a gene to which it is operably linked) under nitrogen-depleted conditions as well as under conditions in which nitrogen is not limiting (nitrogen-replete conditions). Conversely, an “inducible” promoter is a promoter that responds to a particular environmental condition (such as the presence or absence of nutrients or regulators, the presence of light, etc.).

[0215] The promoter can be selected from the group consisting of RNA polymerases, pol I, pol II, pol III, T7, M13, promoters recognized by bacterial sigma factors (σ⁷⁰, σ⁵⁴, σ^{S}, σ³², σ¹⁹, σ²⁸ or σ³⁸), for example, Pᵣᵣₙ, P_{lac}, P_{tac}, Pₜₑₜ, P_{bla}, P_{cat}, P_{bad}, P_{L} or any natural or synthetic, constitutive or inducible promoter known to those skilled in the art.

[0216] In some embodiments, the promoter is a promoter that is naturally occurring in the bacteriophage. Thus, a promoter operably linked to a gene to which it is not operably linked in its native state (e.g., in the genome of a non-genetically engineered organism or virus) is referred to herein as a “heterologous promoter,” even though the promoter may be derived from the same species (or in some cases, the same organism or virus) as the gene to which it is linked. Similarly, when referring to a protein localization sequence or protein domain of an engineered protein, “heterologous” means that the localization sequence or protein domain is derived from a protein that is different from the protein into which it is integrated by genetic engineering.

[0217] As used herein, the term “operably linked” refers to a configuration in which a control sequence is placed at an appropriate position relative to the coding sequence of a polynucleotide sequence such that the control sequence directs or regulates the expression of the coding sequence of a polypeptide and/or functional RNA. Thus, a promoter is operably linked to a nucleic acid sequence if it can mediate transcription of the nucleic acid sequence. When introduced into a host cell, the expression cassette can result in transcription and/or translation of the encoded RNA or polypeptide under suitable conditions. Antisense or sense constructs that are not translated or cannot be translated are not excluded by this definition. In the case of expression of a transgene and suppression of an endogenous gene, the ordinarily skilled artisan will recognize that the inserted polynucleotide sequence need not be identical, but may be only substantially identical to the sequence of the gene from which it is derived. As explained herein, these substantially identical variants are specifically encompassed by reference to a particular nucleic acid sequence.

[0218] In some aspects of the invention, gene expression from the nucleic acid and/or phage encoding the inserted gene or EPS depolymerase is regulated by a terminator to which the nucleic acid is operatively linked to. As used herein, the term “terminator” or “terminator sequence” or “transcription terminator” refers to the regulatory region of a genetic sequence that causes RNA polymerase to stop transcription. In some embodiments, the terminator is a terminator that is naturally occurring in the bacteriophage. In some embodiments, the terminator is a terminator that is not naturally occurring in the bacteriophage.

[0219] In some embodiments, the engineered viruses described herein may include codon-optimized sequences. As used herein, the term “codon-optimized” means a polynucleotide, nucleic acid sequence, or coding sequence has been redesigned as compared to a wild-type or reference polynucleotide, nucleic acid sequence, or coding sequence by choosing different codons without altering the amino acid sequence of the encoded protein. Accordingly, codon-optimization generally refers to replacement of codons with synonymous codons to optimize expression of a protein while keeping the amino acid sequence of the translated protein the same. Codon optimization of a sequence can increase protein expression levels (Gustafsson et al., Codon bias and heterologous protein expression. 2004, Trends Biotechnol 22: 346-53) of the encoded proteins, for example, and provide other advantages. Variables such as codon usage preference as measured by codon adaptation index (CAI), for example, the presence or frequency of U and other nucleotides, mRNA secondary structures, cis-regulatory sequences, GC content, and other variables may correlate with protein expression levels (Villalobos et al., Gene Designer: a synthetic biology tool for constructing artificial DNA segments. 2006, BMC Bioinformatics 7:285).

[0220] Any method of codon optimization can be used to codon optimize polynucleotides and nucleic acid molecules provided herein, and any variable can be altered by codon optimization. Accordingly, any combination of codon optimization methods can be used. Exemplary methods include the high codon adaptation index (CAI) method, the Low U method, and others. The CAI method chooses a most frequently used synonymous codon for an entire protein coding sequence. As an example, the most frequently used codon for each amino acid can be deduced from 74,218 protein-coding genes from a human genome. The Low U method targets U-containing codons that can be replaced with a synonymous codon with fewer U moieties, generally without changing other codons. If there is more than one choice for replacement, the more frequently used codon can be selected. Any polynucleotide, nucleic acid sequence, or codon sequence provided herein can be codon-optimized.

[0221] In some embodiments, any of the EPS depolymerases or alginate lyases described herein may be codon optimized for any of the sequences described herein, as needed. Any method known in the art for optimizing codons may be used.

[0222] The engineered phage described herein may be made using any method for genetically engineering viruses, including bacteriophage, that are known in the art. Non-limiting examples are provided in U.S. Pat. Nos. 5,811,093, 8,865,158; and 10,837,004, each of which is incorporated herein by reference in its entirety for all methods, compositions, reagents, and all other information provided therein.

[0223] In some embodiments, the present disclosure also provides an assay for determining alginate lyase activity of an engineered bacteriophage, comprising administering an effective amount of any of the engineered bacteriophages described herein to a Pseudomonas aeruginosa biofilm and determining reduction in biofilm mass.

### Kits

[0224] In some embodiments, the present disclosure provides one or more kits comprising any of the bacteriophages or bacteriophage compositions described herein, and instructions for using the same. In some embodiments, the kits may include one or more purified alginate lyases for co-administration with the bacteriophage composition.

[0225] In some embodiments, the kit may further comprise an antibiotic. Suitable antibiotics include, but are not necessarily limited to, fluoroquinolone, carbapenem, aminoglycoside, ansamycin, cephalosporin, penicillin, beta lactam, beta lactamase inhibitor, folate pathway inhibitor, fucidane, glycopeptide, glycylcycline, lincosamide, lipopeptide, macrolide, quinolone, oxazolidinone, phenicol phosphonic acid, streptogramin, tetracycline, sulfonamide, imipenem, meropenem, amikacin, ciprofloxacin, levofloxacin, tobramycin, azithromycin, aztreonam, colistin, inhaled tobramycin, inhaled aztreonam, and inhaled colistin, as described elsewhere herein.

[0226] In some embodiments, the kit further comprises one or more CFTR modulators. In embodiments, the CFTR modulator may be selected from, but is not necessarily limited to, ivacaftor, lumacaftor/ivacaftor, tezacaftor/ivacaftor, elexacaftor/tezacaftor/ivacaftor, or any combination thereof.

[0227] In some embodiments, the kit may further comprise a means of administering the bacteriophage or bacteriophage composition. The means may include, but is not necessarily limited to, one or more syringes, transdermal patches, slow-release devices, sprays, nebulizers, an inhalers, or respirators.

[0228] In some embodiments, the slow-release device may comprise a mini-osmotic pump.

[0229] In some embodiments, the kit may further comprise a second bacteriophage or bacteriophage composition.

### EXAMPLES

### Example 1: Activity of Alginate Lyase in Various Bacteriophages Alginate Lyase A1-III Fragment 70-399 Expresses Poorly and has No Activity but Fragment 54-412 does

[0230] The alginate lyase gene of Sphingomonas, aly, produces a pre-pro-protein. The full size protein is proteolytically cleaved to generate AlgL A1-II and A1-III. The latter carries the bacterial alginate degradation activity of Aly.

[0231] Fragments 70-399 or 54-412 of the Sphingomonas aly (alginate lyase) gene were cloned into an E. coli expression plasmid with a C-terminal his-tag and purified using Ni affinity columns. Fragment 70-399 was mostly insoluble and required denaturation of the aggregate and refolding for purification (FIG. 5A). Fragment 54-412 of the Sphingomonas aly (alginate lyase) gene was cloned into an E. coli expression plasmid with a C-terminal his-tag and purified using Ni affinity columns. Fragment 54-412 was soluble (FIG. 5B). The resulting purified proteins were over 99% pure upon examination of denaturing gels and tested for their ability to degrade alginate from seaweed or bacteria. Activity was compared to that of a commercially available alginate lyase preparation from Sigma-Aldrich (ref A1603) prepared at 10 mg/ml. Activity is assessed on agar plates containing 2% seaweed alginate. 5 μl samples of preparation or control were applied to the surface of the plate, allowed to dry, and then incubated for 4 hrs-overnight at 30° C. The plates were then stained with 10% cetylpyridinium chloride (CPC) and activity was revealed as halos where no white precipitate was visible (FIG. 5C). Activity was also assessed on preformed lawns of mucoid, alginate expressing strains of Pseudomonas aeruginosa where activity presents as a halo of rougher more transparent lawn at the site of application. Presented in FIG. 5D are the results on a lawn of strain 15840.

Phages Expressing AlgL A1-III Fragment 70-399 have No Alginate Lyase Activity

[0232] Phage APBP4-4 is a mutant of APBP4 carrying the gene for the AlgL A1-III fragment 70-399 inserted downstream of gp99 but shows no alginate lyase activity. APBP17-1 is a mutant of APBP17 carrying the gene for the AlgL A1-III fragment 70-399 and also shows no alginate lyase activity.

### Phages APBP1-1, APBP1-2, APBP3-1, and APBP3-2 Display Robust Alginate Lyase Activity

[0233] APBP1-1 and APBP1-2 are mutants of Pbunavirus APBP1 with fragment 54-412 of Aly cloned immediately downstream of gene gp82. APBP1-1 has a version of algL A1-III that is codon optimized for E. coli while the version of the gene cloned in APBP1-2 is codon optimized for Pseudomonas aeruginosa (Pae). Both have 6-His-tag at their C-terminus. APBP3-1 and APBP3-2 are mutants of Phikmvvirus APBP3. APBP3-1 carries the same algL A1-III allele as APBP1-2. APBP3-2 carries the same algL A1-III allele as APBP1-1. AlgL A1-III is inserted downstream of gp037. Each phage displays alginate lyase activity in the Preformed Pae strain 15844 lawn assay whereas the parental phages have none. FIG. 2A shows a top-lit view of phage spotted on preformed lawns of mucoid, alginate expressing strains of Pseudomonas aeruginosa (strain 15844) where activity presents as a crater or indentation lawn at the site of application. FIG. 2B shows a bottom-lit view of the same plate seen in 13A, where phage spotted on preformed lawns of mucoid, alginate expressing strains of Pseudomonas aeruginosa (strain 15844) can be seen as circular indentations on the lawn at the site of application.

### Western Blotting Detection of AlgL A1-III-His6 in Lysates of APBP1-1, APBP1-2, APBP3-1 or APBP3-2

[0234] Whole lysates of each phage were prepared for denaturing SDS-PAGE, electrophoresed, transferred to a PVDF membrane and His-tagged proteins revealed using a primary antibody against His-tag and an appropriate HRP-conjugated secondary antibody. Alginate lyase (AlgL) A1-III fragment 54-412 shows as a ˜37 kDa band (FIG. 3).

### Growth of Phages APBP1-1, APBP1-2, APBP3-1 and APBP3-2 is not Altered by Expression of AlgL A1-III

[0235] Lysates of APBP3-1 and APBP3-2 started from a single plaque picked out of a lawn of their host, Pseudomonas aeruginosa strain 7299, and resuspended in an exponentially growing culture of Pseudomonas aeruginosa strain 7299 reached the same titer as their parental phage APBP3. APBP1-1 and APBP1-2 grew to titers about ten-fold lower than that of the parental phage APBP1 (FIG. 12).

[0236] Host range of phages APBP1-1, APBP1-2, APBP3-1 and APBP3-2 was expanded by expression of AlgL A1-III (see FIGS. 13A-13F).

### Example 2: Methods of Generating Engineered Bacteriophages

[0237] One method of generating engineered bacteriophages expressing an alginate lyase from their genome involves the construction of a plasmid that carries the alginate lyase gene with appropriate expression signals (promoters and or ribosome binding site) cloned in between two fragments of target phage genomes that will direct the alginate lyase gene to the appropriate locus through homologous recombination with the corresponding loci in the wild-type phage. These so-called “homology arms” may be as short as 50 bp and as long as 2 kb but are typically ˜500 bp. In addition, the plasmid carries a single guide RNA (sgRNA) under constitutive expression. sgRNA are synthetic guide RNAs that work in concert with the programmable Cas9 nuclease to effect double-stranded cuts a few base pairs downstream of the sequence to which the sgRNA is complementary. An sgRNA/Cas9 complex therefore represents a sequence-directed nuclease that can be used as a counter-selection system for particular sequences. Here, the sgRNA/Cas9 was used to counter-select the wild-type target phage and favor the growth of recombinants that have acquired the alginate lyase gene. This was achieved by choosing a gRNA sequence that is destroyed or deleted during the recombination process such that the sgRNA/Cas9 complex is not capable of targeting the genome of recombinants. The design of sgRNAs is well-known to people skilled in the art. Cas9 is provided in specially constructed strains of Pseudomonas aeruginosa, which are sensitive to the target phage and express Cas9 from an IPTG-inducible promoter. The plasmid carrying the homology arm-surrounded alginate lyase and sgRNA was transformed into the appropriate Cas9-expressing strain. The resulting transformant was grown in the presence of IPTG and infected with the wild-type phage. The resulting lysate was then plated on a lawn of the host for the target phage and individual plaques analyzed for the presence of the alginate lyase gene in the target locus. Apparent efficiency of recombination was in the 1-100% range, most typically ˜10% ( 1/10 phage plaque was a correct recombinant). Analysis for the proper insertion of the alginate lyase gene can be functional, PCR-based and/or can be done by full genome sequencing using, for example, Illumina NGS.

[0238] Another method for generating engineered bacteriophages relies on work by Ando et al (US2015/0064770 A1). Briefly, the entire genome of the target phage is amplified by PCR in pieces overlapping by 20-500 bp (most ideally 50 bp). At each end of the phage genomes, the oligonucleotides used for amplification carry homology to a yeast artificial chromosome (YAC). Co-transformation of all the overlapping phage genomic fragments and an appropriate YAC in the yeast Saccharomyces cerevisiae leads to the assembly of a yeast-replicative circular plasmid that can be selected using the selection marker present on the YAC fragment (most commonly Leucine auxotrophy) with the entire phage genome reassembled inside of it. Because yeast and bacteria have completely different gene expression machineries, the phage genome is kept inactive. The reconstructed phage-YAC can then be extracted from the yeast cells, transformed into a highly competent bacterial strain (most commonly E. coli DH10B or its derivatives), where it will be re-activated to produce progeny that can then be plated on the appropriate host; in this case Pseudomonas aeruginosa, grown and analyzed for correctness. As PCR oligonucleotides can be chosen anywhere on the genome of phage to generate the overlapping genomic fragments, it is possible to make insertions, deletions or mutations anywhere in the phage and to make multiple modifications in a single re-assembly experiment (for example delete a sequence while also replacing it with another sequence or delete a sequence in one locus while inserting another sequence elsewhere in the genome). Adequate primer design allows the insertion of the alginate lyase gene at any desired locus of the target phage genome as long as the requirements are met: 1) maintenance of at least a 20 bp overlap between each consecutive PCR fragment; and 2) no inactivation of any essential phage function in the reconstructed genome.

### Example 3: Specific Engineered Bacteriophages

[0239] A1-III is an N-terminal fragment of Sphingomonas sp. Alginate lyase Aly (accession number BAB03312), and corresponds to amino acids 54-412 of Aly. In an attempt to save coding space in engineered phages, cloning of fragment 70-399 (FIG. 4) was attempted but it showed no alginate activity. However, both fragments 54-412 and 54-408 produced alginate lyase activity. In some constructs, a C-terminal His₆ tag was appended for detection or purification using anti-His-tag antibodies. The inset in FIG. 4 shows the differences between several sequences around the C-terminus of the various A1-III fragments studied at the amino acid level.

[0240] The alginate lyase gene of Sphingomonas, aly, produces a pre-pro-protein. The full-size protein is proteolytically cleaved to generate AlgL A1-II and A1-III. The latter carries the bacterial alginate degradation activity of Aly. Fragments 70-399 or 54-412 of the Sphingomonas aly (alginate lyase) gene were cloned into an E. coli expression plasmid with a C-terminal His₆-tag and purified using Ni affinity columns. Fragment 70-399 was mostly insoluble and required denaturation of the aggregate and refolding for purification (FIG. 5A). A1-III fragment 54-412 shows a band at the correct size on the Western blot, indicating it is expressed (FIG. 5B). The resulting purified proteins were over 99% pure upon examination of denaturing gels and tested for their ability to degrade alginate from seaweed or bacteria. Activity was compared to that of a commercially available alginate lyase preparation from Sigma-Aldrich (ref A1603) prepared at 10 mg/ml. Activity was assessed on agar plates containing 2% seaweed alginate. 5 μl samples of preparation or control were applied to the surface of the plate, allowed to dry, and then incubated for 4 hrs to overnight at 30° C. The plates were finally stained with calcium phosphate cement (CPC) and activity was revealed as halos where no white precipitate is visible (FIG. 5C). Activity was also assessed on preformed lawns of mucoid, alginate-expressing strains of Pseudomonas aeruginosa where activity presents as a halo of rougher, more transparent lawn at the site of application. The results are presented on a mucoid lawn of alginate-producing Pseudomonas aeruginosa strain 15844 (FIG. 5D).

[0241] The alginate lyase A1-III was expressed as a fusion protein with gp13 when engineered downstream of APBP4 gp13.1. FIG. 6A shows a Western blot of lysates of engineered phages carrying the A1-III alginate lyase payload. The engineered phages were used to infect an exponentially growing culture of Pseudomonas aeruginosa clinical isolate DCF47 at an MOI of 1. The phage and host bacterial cells were grown together, shaking at 37° C., then harvested at 250 minutes post-infection. The lysate was centrifuged to concentrate the cellular debris. The cell pellet and the supernatant were separated and frozen at −80° C. Each sample was subsequently prepared for denaturing SDS-PAGE, electrophoresed, transferred to a PVDF membrane and A1-III proteins were revealed using a primary antibody against A1-III and an appropriate Alkaline Phosphatase secondary antibody. The alginate lyase A1-III fragment 54-412 shows as a ˜37 kDa band. The band for APBP4-4 (APBP4 (gp13.1 A1-III gp13)) in lanes 11 and 12 appears at ˜55 kDa instead of ˜43 kDa, most likely due to a read-through of the gene in which the A1-III payload was inserted. This indicates that a fusion protein is produced, rather than the correctly sized A1-III protein alone. FIG. 6B shows the DNA sequence around the C-terminus of A1-III, illustrating how trans-reading the TGA stop codon of A1-III-His₆ could lead to an in-frame fusion protein with gp13 through a 19 aa-long “anti-terminated linker”. FIG. 6C shows the putative sequence of the A1-III-His₆-linker-gp13 fusion protein generated in lysates of APBP4-4. Residues in bold correspond to the A1-III-His₆ sequence, underlined resides correspond to gp13, grey residues denote the putative linker and the black highlighted tryptophan residue is a likely way for the cell to misread a TGA stop codon of A1-III-His₆. APBP4-4 shows no activity on a mucoid lawn of alginate-producing Pseudomonas aeruginosa strain 15844, indicating that the fusion protein is non-functional (FIG. 6D).

[0242] Engineered phages carrying the A1-III alginate lyase payload were generated. The engineered phages were used to infect an exponentially growing culture of Pseudomonas aeruginosa strain 7193 or clinical isolate DCF47, at an MOI of 1. The phage and host bacterial cells were grown together, shaking at 37° C., then harvested at 250 minutes post-infection. The lysates were centrifuged to concentrate the cellular debris. The cell pellet and the supernatant were separated and frozen at −80° C. Each sample was subsequently prepared for denaturing SDS-PAGE, electrophoresed, transferred to a PVDF membrane, and A1-III proteins revealed using a primary antibody against A1-III and an appropriate Alkaline Phosphatase secondary antibody. These versions of engineered APBP4 show the correctly sized band (FIG. 7), indicating A1-III expression and absence of fusion to surrounding proteins.

[0243] Two codon usage matrices for alginate lyase A1-III were cloned into phages. Both were cloned in the same locus in APBP1 to generate APBP1-1 and APBP1-2. SEQ ID NO:34 has a higher GC content than SEQ ID NO:35, and is presumably more optimized for expression in P. aeruginosa, whereas SEQ ID NO:35 is more optimized for expression in E. coli k-12. Overall, the two genes encode identical proteins, but are only 80.1% identical at the DNA level (FIG. 8A). Both codon optimizations of A1-III engineered into phage APBP1 showed alginate lyase activity on a mucoid lawn of P. aeruginosa 15844 (FIG. 8B).

[0244] Examples of alginate lyase activity profiles from lysates of engineered phages expressing various configurations of A1-III are shown in FIGS. 9A-9I. Activity was assessed on preformed lawns of mucoid, alginate-expressing strains of Pseudomonas aeruginosa where activity presents as a halo of rougher, more transparent lawn at the site of application. The results shown in FIGS. 9A-9I were observed on a lawn of strain 15844. Fragment 70-399, when engineered into the genomes of phages APBP4 (FIG. 9A) or APBP17 (FIG. 9B) shows no activity. The 54-408 and 54-412 fragments of A1-III show activity in any of 5 different phages: the 54-408 fragment of SEQ ID NO:35 cloned into APBP1 (FIG. 9C); the 54-412 fragment from SEQ ID NO:35 cloned into APBP4 (FIG. 9D); the 54-412 fragment from SEQ ID NO:35 with a C-terminal His₆-tag, cloned into APBP18 (FIG. 9E) and APBP1 (FIG. 9F); the 54-412 fragment from SEQ ID NO:34 with a C-terminal His₆-tag, cloned into APBP3 (FIGS. 9G and 9I) and APBP1 (FIG. 9H).

[0245] A subsequent set of experiments showed that Flavobacterium Alg2A (accession number AEB69783) expressed from multiple phages has alginate lyase activity whether the gene retains its N-terminal signal sequence, is tagged with a C-terminal His₆-tag, or is encoded by 4 different genes. Phages expressing the full-length Alg2A with a C-terminus His tag all produce lysates displaying alginate lyase activity on mucoid lawns of alginate-producing Pseudomonas aeruginosa strain 15844 (FIG. 10B). Phages expressing the truncated signal sequence-deleted version of Alg2A²³⁻²⁸⁸ without a His₆-tag all produce lysates displaying alginate lyase activity on mucoid lawns of alginate-producing Pseudomonas aeruginosa strain 15844 (FIG. 10C). Four different codon usage matrices were used to synthesize alg2A genes and clone them into phage APBP3. SEQ ID NO:36 is presumably optimized for expression in E. coli k-12, SEQ ID NO:37 for E. coli B, SEQ ID NO:38 for S. pneumoniae, and SEQ ID NO:39 for S. enterica serovar Typhimurium. The genes are 75-9-77.9% identical to one another (FIG. 10D). APBP3-derived phages expressing Alg2A²³⁻²⁸⁸ from SEQ ID NO:37, SEQ ID NO:38, or SEQ ID NO:39 produce lysates displaying alginate lyase activity on mucoid lawns of alginate-producing Pseudomonas aeruginosa strain 15844 (FIG. 10E).

[0246] To determine whether a cocktail of phages engineered with either A1-III or Alg2A alginate lyase have enzymatic activity, a preformed mucoid lawn of Pseudomonas aeruginosa strain FRD1 was spotted with 10 microliters of phage mixtures, then incubated at 30° C. before being photographed. The left most spot in FIG. 11 is a mixture of wild-type parent phages: APBP4, APBP1, APBP2, APBP6, and APBP3. No clearing of the mucoid lawn is visible. The center spot is a mixture of the same phages, engineered to express A1-III: APBP2-1, APBP3-6, APBP6-1, APBP1-4, APBP4-5. A clearing is visible in the shiny surface of the mucoid lawn, suggesting that the enzyme digested the available alginate. The spot on the right side is a mixture of phages, engineered to express Alg2A: APBP2-2, APBP3-5, APBP6-3, APBP1-5, APBP4-6. A crater-like clearing is visible in the shiny surface of the mucoid lawn, suggestive of increased alginate lyase activity.

[0247] Each of the phages tested reached the same titer as their parental phages APBP1 and APBP3, which did not express alginate lyase, suggesting that growth of Phages APBP1-1, APBP1-2, APBP3-1 and APBP3-2 is not altered by expression of alginate lyase protein A1-III (FIG. 12). The titer was calculated from the plaque forming units (PFU) counts and the dilution factor for each lysate.

[0248] To determine the effect of expression of alginate lyase A1-III on host range of phages, the titer of lysates of parental phages and their engineered derivatives was measured, first, on their host, Pseudomonas aeruginosa 7299. Dilutions series are 10-fold steps for all phages and all plates. As seen in FIG. 13A, phages APBP3-1, wild-type APBP3, APBP1-1, APBP1-2, and wild-type APBP1 all produced the same titer. On Pseudomonas aeruginosa strain PS 30, APBP3-1 shows clearing down to the 10² dilution while its parent APBP3 does not produce plaques at all on this strain (FIG. 13B). Similarly, APBP1-1 and APBP1-2 produce plaques on Pseudomonas aeruginosa strain PS 30 while their parent APBP1 does not (FIG. 13B). APBP1-1 and APBP1-2 show improved clearing on Pseudomonas aeruginosa strain 7176 compared to their parent APBP1 (FIG. 13C). APBP1-1 and APBP1-2 plaque down to 10⁻⁷ dilution (˜2E8 PFU/ml) on Pseudomonas aeruginosa strain 15843 while their parent APBP1 plaques around ten-fold less to 10⁻⁶ dilution (˜2E7 PFU/ml) (FIG. 13D). On Pseudomonas aeruginosa strain 15839, APBP3-1 shows clearing while its parent APBP3 does not produce plaques at all on this strain (FIG. 13E). APBP1-1 and APBP1-2 also produce clearings on Pseudomonas aeruginosa strain 15839 while their parent APBP1 does not (FIG. 13E). APBP3-1 shows increased clearing compared to parent APBP3 on Pseudomonas aeruginosa strain 15840 (FIG. 13F). APBP1-1 and APBP1-2 also show improved clearing on Pseudomonas aeruginosa strain 15840 compared to APBP1 (FIG. 13F). These results suggest that the host range of phages APBP1-1, APBP1-2, APBP3-1 and APBP3-2 is expanded by expression of alginate lyase A1-III.

[0249] Four different strains of Pseudomonas aeruginosa were grown as biofilms on pegs using an MBEC (minimum biofilm eradication concentration) assay kit (Innovotech MBEC assay kit or any other similar assays known in the art may be used). Three versions of a 5-phage cocktail (AP-PA02) were each applied to the biofilms. After treatment, biofilms were washed and stained with crystal violet. The stain was extracted, then analyzed for density at OD595. The two cocktails of engineered phages, containing phage expressing either A1-III (Eng-A1-III) or Alg2A (Eng-Alg2A), showed increased disruption of the biofilm, up to a 30% increase in strain 1, when compared to the wild-type phage cocktail (WT; FIG. 14). These results suggest that biofilms treated with engineered phages are disrupted more than biofilms treated with the wild-type phage counterparts.

[0250] The recombination between expression plasmid pLIX36 carrying A1-III and APBP6 to integrate A1-III between gp038 and gp039 is represented in FIG. 15A: a strain carrying a plasmid, pLIX36, harboring the 520 bp upstream of base pair 20585 of APBP6 (upstream homology arm; end of gp038), the A1-III gene and the 500 bp downstream of base pair 20586 (downstream homology arm; beginning of gp039) was infected with APBP6, allowing recombination between the plasmid and phage and generating an engineered APBP6 derivative with A1-III replacing bp T20585. The recombination between pLIX46 and APBP6 to integrate A1-III between gp005 and gp006 is represented in FIG. 15B: a strain carrying a plasmid, pLIX46, harboring the 437 bp upstream of base pair 2501 of APBP6 (upstream homology arm; gp003-005), the A1-III gene and the 501 bp downstream of base pair 2540 (downstream homology arm; beginning of gp039) was infected with APBP6, allowing recombination between the plasmid and phage and generating an engineered APBP6 derivative with A1-III replacing bp 2502-2539.

[0251] A PCR assay was performed to verify the presence of inserted A1-III in APBP6 lysates grown on a pLIX36-containing strain and then passaged on a plasmid-less host. A ˜1.1 kb band indicates presence of engineered phage (FIG. 15C). The APBP6 lysate grown in the presence of pLIX36 was serially diluted and assayed by PCR for the presence of engineered phages. The recombination lysate was then passaged on the host of APBP6 without pLIX36 and assayed by PCR again (FIG. 15C). Recombinants were no longer detected, indicating the engineered phages were not viable when cultured without pLIX36. A PCR assay was also performed to verify the presence of inserted A1-III in APBP6 lysates grown on a pLIX46 containing strain, and then passaged on a plasmid-less host. A ˜1.1 kb band indicates presence of engineered phage (FIG. 15D). The APBP6 lysate grown in the presence of pLIX46 was serially diluted and assayed by PCR for the presence of engineered phages. The recombination lysate was then passaged on the host of APBP6 without pLIX46 and assayed by PCR again. Recombinants were still detectable, indicating that the engineered phage were viable when cultured without pLIX36 (FIG. 15D). These results suggested that although engineering of A1-III in APBP6 is possible at both the gp038 gp039 and gp005 gp006 loci, viable expression of the enzyme only occurs from the gp005 gp006 locus.

[0252] FIG. 16 shows a Western blot of lysates of engineered phages carrying the alg2A²³⁻²⁸⁸ alginate lyase gene. The engineered phages were used to infect an exponentially growing culture of their bacterial hosts: Pseudomonas aeruginosa clinical isolates 7193 or DCF47 at an MOI of 1. The phage and host bacterial cells were grown together, shaking at 37° C., then harvested at 250 minutes post-infection. The lysate was comprised of lysed cells and phage in the media. To separate the lysate into a pellet and a supernatant, it was centrifuged to concentrate the cellular debris. The cell pellet and the supernatant were separated and frozen at −80° C. Each sample was subsequently prepared for denaturing SDS-PAGE, electrophoresed, transferred to a PVDF membrane, and Alg2A proteins were revealed using a primary antibody against A1-III and an appropriate Alkaline Phosphatase secondary antibody. The alginate lyase Alg2A fragment shows as a ˜32 kDa band. ELISA protein quantification data are shown in the right-most column of the chart in FIG. 16, indicating that protein levels are pharmaceutically relevant. These results suggest that engineered phages ABP4-6, ABP18-2, ABP6-3 express alginate lyase protein Alg2A²³⁻²⁸⁸.

[0253] FIG. 17 shows a Western blot of lysates of engineered phages carrying different versions of the alg2A²³²⁸⁸ alginate lyase gene. The engineered phages were used to infect an exponentially growing culture of their bacterial hosts: Pseudomonas aeruginosa clinical isolates 7193 or DCF47 at an MOI of 1. The phage and host bacterial cells were grown together, shaking at 37° C., then harvested at 250 minutes post-infection. The lysate was comprised of lysed cells and phage in the media. To separate the lysate into a pellet and a supernatant, it was centrifuged to concentrate the cellular debris. The cell pellet and the supernatant were separated and frozen at −80° C. Each sample was subsequently prepared for denaturing SDS-PAGE, electrophoresed, transferred to a PVDF membrane, and Alg2A proteins were revealed using a primary antibody against A1-III and an appropriate Alkaline Phosphatase secondary antibody. The full-length Alg2A protein shows as a ˜35 kDa band, whereas the Alg2A²³⁻²⁸⁸ fragment migrates as a ˜32 kDa band. ELISA protein quantification data are shown in the right-most column of the chart in FIG. 17, indicating that protein levels are pharmaceutically relevant. These results suggest that engineered phages APBP3-5 and APBP1-5 express alginate lyase protein Alg2A¹⁻²⁸⁸ and Alg2A²³⁻²⁸⁸, respectively.

[0254] FIG. 18 shows a Western blot of lysates of engineered phages carrying the A1-III⁵⁴⁻⁴¹² or A1-III⁵⁴⁻⁴⁰⁸ alginate lyase gene. The engineered phages were used to infect an exponentially growing culture of their bacterial hosts: Pseudomonas aeruginosa clinical isolates 7193 or DCF47 at an MOI of 1. The phage and host bacterial cells were grown together, shaking at 37° C., then harvested at 250 minutes post-infection. The lysate was comprised of lysed cells and phage in the media. To separate the lysate into a pellet and a supernatant, it was centrifuged to concentrate the cellular debris. The cell pellet and the supernatant were separated and frozen at −80° C. Each sample was subsequently prepared for denaturing SDS-PAGE, electrophoresed, transferred to a PVDF membrane and Alg2A proteins revealed using a primary antibody against A1-III and an appropriate Alkaline Phosphatase secondary antibody. The alginate lyase A1-III fragment shows as a ˜40 kDa band. These results suggest that engineered phages APBP18-1, APBP4-7, and APBP6-1 express alginate lyase protein A1-III⁵⁴⁻⁴¹, APBP3-6 produces alginate lyase protein A1-III⁵⁴⁻⁴¹²-His₆, and that APBP1-4 expresses alginate lyase protein A1-III⁵⁴⁻⁴⁰⁸.

[0255] All publications mentioned in the above specification are herein incorporated by reference. Various modifications and variations of the described methods and system of the present invention will be apparent to those skilled in the art without departing from the scope and spirit of the present invention. Although the present invention has been described in connection with specific preferred embodiments, it should be understood that the invention as claimed should not be unduly limited to such specific embodiments. Indeed, various modifications of the described modes for carrying out the invention which are obvious to those skilled in biochemistry and biotechnology or related fields are intended to be within the scope of the claims.

The application's sequence listing, which the Patent Office published only in electronic form, follows.

SEQUENCE LISTING (73 sequences)

SEQ ID NO: 1 - DNA, 66824 bp, Pbunavirus
  source 1..66824: mol_type = genomic DNA
aatcctaatagaaaaaatctatcacggacgttacctatctttaaaattaataaaattaatagtaatttggtaatttggtatactttagtatttgaaagccttgcggcactaagcctgtacacttcccgtcaagtttccgattccgctcaactcgcggcagggtcgccggaaacttccggacttccaatccatgggtcgcggcaacaccacggcggactaagcggcaagtgccaaaactcgacgaacggaaccggaaatttggaagcgcgatagaatcgctcagctggacatatttctaacattcgatttaacactcaatccaaacactcaccgccatcgtctcccgccaaccgccgactcgatcctcacccaccagcggatcgcccgtataacatcctataacaccacctaacactcattcatcatcaaacccacccagacctacagcccacccacaagcagcccatagacgcgatccctggccccatagtacaatcgcgccatactcagtgtcgcggcagagcaccaggggccatccgccaaccaagccaccacgacgactccagaatcgaactcagggacgcagcaccaaatgaccaaattctacagccccgacgatctagtcacgccacaggaattcgcagacccgcatttcgcggcgatcaaccaaaagcgattcgacctgtacatcgacctgcgcgtccaaggttacagctcctggcgggtcttccgggccatctggggcgaggagcatatggacggtcccgcgcaggcccgcatcttcgcgatggagtccaacccgtactatcgcaagcagttcaaggccaagttgaacgcgaccaaaacgtccgatttgtggaatccaaagacggcgctccacgaactcctccaaatggttcgtgaccccaccgtcaaggactccagccgtctgtcggccatcaaggaattgaacgttctggctgaaatcacgttcgtggacgagtcgggcaagacccggatcggtcgcggtttggccgatttctacgcatcagaagccgaggctcagaccgcgaccgtcgctgctgcggccgaagccaatggctatgtgccggaaggtgaagagggagatttcccgtctccgtctccggaaccgaccgaggaagaccgcgccaaccccatttagacataaaataacatcgttctaggcccgaatcggaccgaactaaggcgaaggtagcgggaagggacgaaaaacgattctagggctgttctaggaagccgaccaataacgatcagaagcgacaaagccccggactctagttcagaatccggggctttcttttgggtttcttattctccagcttcgatgatttcgaagttgtatttgacgccttcgtgctcgaaagtcaatttgccggacgctttcagctgcatgcggaatcggatgcacttagaggaaggcaaaccgaactcgatgaaggctgcgttgcaggatttgaactcgccgcgcttgcctttcacggtgaccgccacgccatgacgctcggtgcgcttgcgggcgacttccgggtctttccaggagttggcgatggctgctgacaggtctttggtctctttggttttctccggcgcgttcttcgcctcttcgcgcattttccggatttcttccagcgcttcctcttcggtgatttcttcttccggcttcagattctcttcggccttctcttctgccttcttcttggaagtgcgggttttgtaaaccttggccggggtttcctcttcctggaaggcctcttcctcggccggcagagcgttcaggatggcgaggcagcgacgctcagcggtcttgcggtcagagaagcgcttgacagtcgcatcggcgttgtgagcgttgtagaaggcgaccagttctttcatttctgcgttctggatgtcgccgaaggttttgatggagttggtcattttgcgatcctctgttttggaagatttcgtttgggcttcagtttgtcgccccgttgaaagagattatgcctaggtcgatgctgcgtgtctacatctatttcatcagattgatcacaaagccgacgaacggttgtctgatgtgaaaacaccgcagagcaggctgcggtgtttgttggcgttggggtgatgtcagaaagtcgggactgtgataggctcgatgggcggatcgccgggcctgtcgttgtccgatgcgggcgccgggctggaagggatcgcacccgaccgaagcgccagcgattccgactgcctgcttacctgcggagctggaggcgcttttggcgcatgaggcgcgggcggaaccggcaggcctggaggagccatcggcgccctgggcggctccggaagatcgggcagatcaggaagactcggcgctatgccgccaaaggaccgctgcgaccgctgcgacggattgtcgccgaacatttcggcggatcggttgtccttgatgacttgacctatggccgtcttgtcgccacccggttctgctggatcgaagcccgtgaatggagtggtaacgcagcgcatgttcggatgggtcggcagattgttcaggacgatggagtccgcccagacatacgggtttttgtggttgccgggtccgtggctgatgatctcggcaggaatatggccgttcatggtgagccattccgccatcccttgccgagtcagcgggcttaccacgatctgaccagtggactctttggcgatggcgaacagatcaccgaattcgaatccgatgattgtgtagttggacctggactcgccgacgaaagccagagtttcgatgttgtggtggatatcttggtcttcccagatgtacagcatggttcgctcctcaataaggttgcttttggtgttcgaccagagacataccggccggaactttgaagcggacgtattcgatcatcatcgccgttcgacgccgattcgtgcccgactcgtcattgacgaatagttcgcactggtgcggaatgactcgcgtcaccaggcactcacctttcgagccgtagaacttgctgtaggctgcgacgcctcgcgtcatgttcagacggatcgtttcgcagagtcgctgcgcggccgacgcgctggacagatcggtcggactgaccgtcacccagtaatggccactttgttctttatcggacataagctgccctccaatgagaaagcctctgccgagtcgcagaggctggttgttgttagtcgcgcttcaacagaacgactttgtcatatgcgcgatatttaccgcgccagtcttcccagtagtcgccggccgggcaggtaagctccagggtgatttcgtcgcgccagcattcgacagaaaggacaatcgccttgttcctggctgcggaatccgccctgagcttaatcagaatttcgtcgccagttttcaactcatcaactcttacaacttttgccatggtgttctcctattgggcagcgccgcgagggcggatcgggtcgatgtcatgtaagcagatggtaggatagtccctggccaacttgagcttgaagtccacccagtcagcgccgacaagtgccgagacttcgacacttattttgttgtgcggagcaggactggtgcgcaggactatggcccgacgccgaacgggatcgttgacgtcaacatgagtgagtatttcgtcgccgacgagcaactcacaggccatcaatattttggccatcatacactcctatgagaaggcgcggccaggacgatcccagccgcgccgatggattaacgtttgtgaaggatggacactgcgtccacgtcgaggatgctaatggtacggcgacggcgcggattgctgcgttcatggatgcgaatcaggttcgcagctggagcttcgtccaccacccatacgtcttccggtttctgcgtccggagcaggaccgtcacttcagtattctgggcgaggccgttgcagatgaaagtgaacttggacgagggagttctgtacatttcgagattcctttttggacttctggttcggcttctcagccggtgaagagattatgccctgattctcaccgccgagtaaagcatttgtgtaccaattctcccgtcaggtggaaccaaagtgcggtatcgcttatggctacgctaccgcgccatggcccttcttgctcgcacactgcgaaccacaggctgatttccatccttgccaggactcggccgaaagattcgaacctgcgccgactggacaggatgtcgacattcactcgtcgattgacctcataccggcgaccgttgatgacgaagaccagccgcagggtttgtccgtccagacattcccagtatctggtttcataccgaagccagtagcgcttgccagccgggcctaccatggtcatttaatcgatgctcctggccgcgccacgcggtccggtcggcgggacgggatcgaaccgacccaggatgtagtcgggccggcgcgcttcctgaggacacacggcgagaaggcgccatcctgcgtccagggcagactggagttcgtccgtgcagcagtcttccttgagcagcagacggttgacgttctggagattcggaccaggtatggccgatcctgtgagtgagttccaaccctcgattccactcaccatctccggttggttgatgtagcttacggacataccggccaaccggctcgcggccagctccagacgctccagcatgggtcgcagagcagcttccgggtcaatgtcgtcccagagaaggaccaggctgatgatggtatacggatagtccttgtccagatcccaggctgaagcggtcagacggcccaggccgatttcattacacatcacgggaacgtcgttgctccaggtggacggctcccagttccgctcaccaggattcccgattgttacgccttccaggttccccaggagaacgtggagcttgctgacatattccgcctccaaggctttccgctcttcgtcggtcttgttgtggcgatagaaggatggagggctgactttggcatggtagagtttcataactgttcctcggttttggaagatttgaaagttagagaatggtgtcgcagtatttctcgaaaggactctggcgcttcttctcgcagatcgcgcaggtgatttccaggtcgggcagctcgctgtaagtcttgccgagatacagccagcgcttgcacagactgcggccgtccgacgtgaagaagtggactttgcgagcattgccgggttgcgcccagccgcttggtgccggcttcctgctcataccatcaccacgtcaatttcgtcggcgaagaagttaaagccaactccatctgcgtagccagtgtaacgcagacgaatcgtcccatcaatgtgggcttcctcgacgccgatgacttccagggtggtatcgttgcagtacagcttgacgaacatcttgatgccggagccaatcgccgcgaaggcgatctgcttgtacaggtcttgcttgatcatgctttacgctcctgtttgcggatgtattctgccctgacttcggcttcgaacttcgcccagagcgcgttgtctactggaccccagggaccggtctgagttccgtccaccggttcgaacttgccaccggcgcggcgatatttggacagagttttcaggctgatgatcttctcatcttgggaatcgaattggacgatcatttgacgtacttcccgaagtagcaggtgtggatgatttccagaccattggagatagccttcagcttgatgccgaaattcttgatcgcccagtccagatcgtggtgatagaactcgatgatgttgacgatttgaccggcgctgtagtggatgacgcgaaccttgccgttccagcggaagtcttcgcggctgtttacggcctcgactgcgatggtgtcgtttctgccgatgttccatttggagctagtcatgtcgcaatcctctttttggagtgtttcgcgtttcgatgaggtaactatacctcagtcacctcatcgagtaaagcacttttgaacatattatctgaaatttctgtgagacggatccatcggcggattcagtcagtggaaccgagactccatccgttgcgggcgaaggccgagcgaccagacagcttgcggcactggatggagctgccatcgtcgaaggtgtaagatacggcccagtccaggcgctcgcgacgcactgacgccgcagcgatatcttccagacgggctttgagaagctgttctgctttggtcatttcgagttcctctttggggcgcttcgtgtttcgatgagatgactataactcagtcacctcatcgagtaaagcgcttctgaggaattatctgaagtttctggaggccagaaattgccgccagagccagtcaacgtgatcgttgaggtagcgctcgccatcggacgacagagccaggcatccatcctttatgccgagcttggaactggaaatccattcgaactcgaactggagcgttcctgggcgagggatatgggacaggctgtacttttgcacggtcaggaatcctctaaaggtttggagttcgcgatggacgcgactttctgcatgccgatgcgatagaattcggcctcttccctggccttggccagctgctccctggcttcgcacgccagcttgtgctggttattggcattctggatgcttccgtccagactcctgtccaactcttcccgaagagccttctgcgacgctagctcggcctccaaatcctggattctgatctgaagctggcgattcctttcagaaacatcgttttcgcgagcgatggaattctgaaggcattcgtcaaggcgagtattttcgcgcaccagttgatgcttttctactttcgcctttctgcacgtctctcgcattgctgaaagctcactcgcatgcagatcgtcatccgggtctttacgctcttccttcgactccatccgcaggtagtactggccggctgcgaaggcgagcactgcctggtcggcatacgctgcggcatcggtcatgtatctggatttgtagcgaggcagaaacttgcactcctctggatcccagaggagactatcggcaataggccagaatttgcggaaaccatcaggatcgacttctacattgaccatttgcagctggccggcctccacttcgacttccagaggaacctgaatagtgccggtgatgtactggaagtacactatgctagacataacacaaactccatgagaagtcgcggccgggaccatcctggccgcgcatcgtaatcaatcttcgccttcgtccgcgctcagccactcttcgaaggcgaagtttaccttcgactcgacccaatcctgaagctcatcggcgaactcgtcactgtcgatgtccatggtgatgcccatgacttccatgttccatagcgcggcattcagttcaaactgcaccatccgctcgccatcgacttccataaggatgcggtctgcgacttcatagtcgtctacatcgaacaggtggccgccagtcaggaggtgctggacgaaagcttcatcgaggttggtgacttcgatctggacttgtttggtcattttctgcgatcctctgttttggagtttgggcgcccggcgaaccggggcagggtgtttagcgcggagagtgccgatcttccaattttcgagctcgtcttgcgctgcgatctcaatatctaacagcgcttcctgccgctcgcctgccgctcgcctgcggtaagggtagagttccaagccaaatccttgatggccttgatgatttccttctttgtcatggtcatgcccgtggctcctatgtgcggcgggttggttaggcgaacagaaggcgattgacagcagcgtccacgtcccagccgcaagcgaacagcgccatcgcggcttcgtattcggttgcaaagccggtgtctgccatgaccacttcaacggcggttttgctgtaatgctttgaaagtttcagggcggcgagagagtccgctttgtcggccacagcacaagcctcttgaacagtttcaaatcggcccacctctttgcagcgattttccagaacggcccagccaaagacgttaccagcgccatcagtgattttgtgtactgtgttcatcgtcttaccctccaggtgtttgttcgtttcgatgaggagattatgccgatagtcagaatggaagtaaagtgtctgagtgagaaaaattctgcacaccgacgaacggttgtgctcgaccgtctgctgcggtgtcgatatactcggcctattgcgaacaatggactgattaaatgtacaaactcaatcctgcgctgcgagcggtctggcgaactcgtgcccgttacaaagtcatctatggcggccgggcgtcttcgaagtcacacgacgcaggcggtatcgccgttttcctcgcggccaactacaagctaaagttcctctgtgctcgccagtttcagaaccgcatcagcgaatcggtctacacgttgatcaaggacaagatcgaaaactcagagtataatggcgaattcatcttcaccaagaactctatcaagcacaagagtaccgggtcagagttcctattctatgggatcgcccgtaacctgtcggaaatcaagtccaccgaaggcatcgacattctctggcttgaggaagctcactatctgacccaggagcaatgggaagtcatcgagccgaccatccggaaagagaactcagaaatctggatcatcttcaacccgaacgaagtgaccgacttcgtgtatcagaacttcgtggtcaagccaccgaaagattcctgcgtcaagatgatcaactggaatgaaaatccgttcctcagtgagacgatgctcaaagtcattcacgaagcatatgagcgcgaccgggagcaggccgagcacatttatggcggaattccgaagactggtggcgacaaatccgtcatcaatctcaagttcattcttgcggccatcgacgcccacaagaaactcggctgggagccggccggatcgaagcgcatcggcttcgacgttgcggacgacggcgaggatgcgaacgcaactacgctcatgcacggcaacgtcattatggaagtggacgaatgggacggcctggaagatgaactgctcaagtcgtccagccgcgtttacaacctggcgaagatgaaaggcgcctcggtcacttatgactccatcggcgtcggcgctcacgtcggatcgaagttcgccgagttgaacgatgccagtcccgacttcaaactgatctatgatccattcaacgcgggcggcgctgtcgataagcctgatgatatctacatgaagctgccgcacacgacgatcaagaacaaagaccacttcagcaacatcaaggcgcagaagtgggaagaagtcgcgacccgattccggaagacttatgaagcggttgagcatggaaaggtttatcccttcgacgaattgatttcgatcaactctgaaacgattcacccggacaaactaaatcaactgtgtatcgaactttcgtcgccgcgcaaagacctggacatgaacggccggttcaaagtcgagtccaagaaggatatgcgcgagaaacgcaagatcaagtcgccgaacatcgctgactcggtgattatgtcggccattctgccgatccggaagcccaaaggtttcttcgacttctaaacacagaaaagcccggatcgctccgggcttcgggtcttactcggtgtggttcctggcgctgagtgtcgacgcaacggcctcgccgactcccagggcttcctggccggccgcgagcgcttcggcttccgactcgacgatgaagtcatcaccttggccgtcgcctggcggaacctcgaccagcacggcttcttcgccttcgaaccgcaggtcataagtcttttcgacggacagtccgtaacgggcattgagcgcatcccagagctgagcttcatagttgcgcaggtcttgcagagatttctggtggctgagcatcgccatatcgacggcccgttgcagggtttcgtccaggacgttgaatcgcatgcgaagagaacgaatccgctcgaccacttccgcatccactacatgtctttcgatcatcgcttttcacctttgctgaatgttacgttgtagccattgtcggccaggtaggtcagggcgccttcgaaggaagttccgacgagatgcttgagctgcatttcgcgttgcgcggcgatccagaatgccgttccggagaactctgcgtggccttccgacaataccttgccatcaggcccgtcgatccgaacgtgaacggaagatagcttcagtaccatcaatgaatccctccactggcttgcgacggcatgctttcagcgcgagcggcttcacagtccgggcagggacaggcttggcggacgcgctccaactcgtcggcatccatgacatagagcttcccatcggaagtgtcgtgcgccatggcgatgttcgggaagtcggcagcgctcaggccggcgacagcgcggatttcgtcccagagcgccacatgctcggcattcaggcgagctgcgagcgcttcgtgctctttcgctacacgagccatgaactcgtccatccggaatgcgaattccgcatcgatggatcgggccgaggccatggagttgaggcgaatcggttctttcttcatggtaattctcttttggttggcggttgttcgctgctcaggcctattacagtctgagcagcatgatgaagatgaacgcaaggaacgcaaacggcacaagtatgccggacatcagctttgacaggcgctgcatctcagcgtatttctcggttgacattccgtgctgcgccgcctcagctgcgaagcgggctttcgcctcgataacttccgggcgcagcgacaggacatattctaaggcctcttcccgcgctttttcggcctcgaccgacctagggtcgcgggccgagacttcgctgtgccctggcctcgcgggatgggcctgcagcgatggaggaagttcggcggccacgactccatagtcggcgcaggcccaagcgatcccgatgaggatcgcgaggatggattggacgattcgcagcataactttgtcgctagggaagctcatgatcaatcctccacagaccgaacgatttccaggttgcgcccggcattggtcccggcattgaaggcgcgccgaccgtcgctatcgtccaggcgcatgagcttggtaacatttgacttcttgtagccaggatcgccgaaatgttcgtgcaccgcagcttccttcaccacaaccagagacgttccggcagaagataccagctccatgcgcttcctggtgatggcctgaaggcgatagctgatttcctgggtcgcggccagcttgaattgcgcggcaaccttgacgttgaatcgtccgtatccttgagccttctgatactcccggcacagacgatcaaccgcttcgacaagggagttgaacatgttcaccgccagctcaacgtccgatttgtagcctttaaagcggacggcatgcccccagcgcttcgtagtcccgccgtttgcggcgtgccaagaagccttggcggtcgctcggtgatcgttgatgccaccggcgaaatccatgatgcagtcgttgtacgtcgccacggccaccgagaagaacttcatccagttcgggattgcggaatagtaacgagtcgcgatctgctcatcgaactcttcgcgaatctcgccggtcacttcgaagtcgtgaaggtcatatttgtccttcagcttcttcacacgctcggctgcaatggcggcttcgtgcgggctggaggagtcggccgccatggcagtcagtttgcggatgcggtctttcgccttctcgatggcttccggggtgaattcgttctggtcggtcatggtcggttcctttgtctgaagggtttcgcgtttcaatggagctattctgccttcattcagaattgaagtaaagcactttcttccactatttcggcatcgactggaagaaattccagatccaatcacctgctaccagcaagaggatgagggcggcaaagaacaagacagcggccgcgagctgtgcgcccggcttcagtttgggatggctgagcttgggctctacgggaacggccggagcgctagcgctgcaaccggcgtctcctgggccgtagccgatgccgcgttcacacgcctggagcgacaccagggatttaagatactcggtctgcttttgcgactcttcgtagatgccggcgacggcgaaccagagggcgaacactacggacgtacacacaacccaggcgccggtcagcaggagggccagcgggccgatgacgaagacggtagcagccaggacgattgcgccgccccagatgatgaagccggccagaccattagtgatgtcgacacagaactttttcattttcagattccttcggttacgggatggaggggatttgaaactctgcgccgccgagaacatcaatgacgacttcccagagcgtcggaacagaccactggtaacggtcgaagtcggtttcaggatcgacgcccagcgtcacataggaagtggcaggccatttatgaacactgcctttccgcatgagagtcgccacgcggccgtcaccgagcggattcgttctgtgcggaacgtacgcagacatcgaatattgctgcccggcgtcgacaacaaatctttgcctctggcgcagacatacagagcccacaggattccagccgcgaccgccgcaagcctggcgagccgaagagtgttcataaccttcgtgagtcatttcgccgaggcaagccgagcgatcctcgtaatagttgatgttctccatcgatccaaccagtaccagagactcgaaatcgaatctatgatcgtggatggccgagtgattgaagcaaagccggcgcggcaactccgggtgccaaacatggaggcgccctgccgggagctggacttgaatgaaccccaggccgtgcagcgtgatcttgtccttcatcgggtcatggacggtgctcatggataatcctcagtagcagaaatgtatggtgagagttacgatggccaagccggtcgcccataggagggcgaaccaggccatggctttgatggttatgtagatcatccgaagaactttccggcacagatcggtccaatgcccatttcgatggatgcgtggttggtcaactcgcgaccgcagcaggagcattgaccagtcttccggccgtaggcgactgccgattccatcggcttttcaaacatcttcagaacgtcgtcatgctcagtgtcggtgcagtcgcgactcttgatgaatttgccattggtgatccggccgaggtagatgtcgcccaagacgtacaagctaccggcgttccggctgtgagcgctagcctctttcacaataacgatgagcggctcctcgccttcgccagccaggcggattttcgggcgcttgatgccagattctttcgccttctcaaacgccttctcgatgccggaaatgtccagagtcggtgcagcagcttcctgcgcggccactttctcgcgatatttggcgaggttttcgatggcgcgcttcgcagcagcgatctgattttctgtcaaggagccgtatttatacaacgactcctgaaggctctgagcgaagctgaaggaatttccagtccaccactcgacgatgtccgggtgcgcagcttcgaaggctttaattttgaggtcgcgctcttgcgcagcgctacatattttctcgatgcgcttttctgccgccttagcacgactcttggcgcgctgctccgggctggttttgtactctttgtatccaacaccgccgcaggcgaagcaggcgcgaccataagacgaagggccacggtacaggccggtgcctgcgcatttggtgcacttgtcgcgatacagcttcacttccttccgggaattcgggcgagcgcccatggacgcgtcttccagggtcttcggcgcttcgttgttgatcgctacggtagcgaagtcgtcacccaggtcttcgaagccggtgaacagattctctgctgcgttcatatcgattctcctgtttggaaagttcgtttcgatgggttgactatacgccagaaatggaaaacggtagcactttcgcactaccgttcgtcggatcgcagagggtcaggctacacggatcaactgcgacatgactgccaggttccgctcggcgacgccgatgatgacgttggttccgatgatgaacttccaagggtcttccctgttcttgtcgtagaacggatttctgaacagggtccgccatgtctcttcagtgaagaacgttttatggtccaggtcttggtgggcgatgttggagttgtagaatggaacaacgacattgagcgtcgcgccgactgccatggcccgctgcaggtctttcaccaaatcgatgacctgggctccggtgagatgttcgaagaagtgaaatgcgtagaccgccgtcaattcgccgtcttcatacggcactcggccgctggcgccgtcccagttcggccagtcgagcgattcgacgccgggaatcggcgaattgcctgcgcccaggtttactgcgcggcggtgatccggctcgatcaactgagcgatgtcgcgcttcatgccgagtttgaacaggttttgaatatccatttggttctccaggttgctgttagtaaatgtcgctgttgatcttgaatccatgctcagcgccgtcgttgtggtcgtactcagcatagctgtcgcagtagtcattcaaatgctgaatgatgccaagaacgtcgttcgcggccttgtgccgtttcgcggcgatggtcttggcgatgttgtcgccgacttccagggtttcggccgtccggcgatggatcagcaggcgactccaaagatagagccggacgcgacgaatgatgtcgcgatggcgctccagtcgtccgtgcaactcttcaatttcgtgctcgcgagattttaatactcgtcgaagctgctgaacttctaattccaaatcggccttagtagccatgttcacctcaaaaaggaaaatcgtctgggactccaggaagctcgacgactattgttgagcctgatcgatctagaatgcatccgaccgagccagccctgtggggatagggtctacacgaactataacaggtgacttccatgactattcgccaggtcgatcctccacaccatctacaaattggcggtcgcttcgacttcagttttcgttcgtccaagacggcgcgtctgtcgcaggaaaggcagcgcgccttaaccgacgtaaccatgggtatagtcgatcattcggatgaggccatcatcctctgattccctcgacttcagaccgcccaaagagtccgactggccgttgcatttcgcatcgatatccatcgaagacaagaatcctgccgatactacggtgatatcaactttgtcgccggccttcttgaagtcttcgcactcagcatcgagggccacaaccgcactcgcagccatgttcacatgacttatgaggtcggggaagatcacaggaacttcacgcgacatgccacggaccgtcatcttcagtactacatacttcatactcactatcccttttgtatgtgaggaaagaatttgctgttttccggatggtggaagcgctcggccgcaggctgtctttcttccggacattgaatcgtcgaaggcgggaaaaccgcgccggcgataatcgccgcgaggagtgcagcggatgtcgacatccagagggcggtttccaggctcacccgaacttccggacggcgcggcttcattcgctccaccctcttcccggttcataggatggtagactgccgccgcgaacccagtcgtcccacatgtggttcagaccagtcggtggctggggcggcggactgtagaatccgggagtctcagtgctgctcaggaaataaggtgtgcaaacggcctggacggccagttggtgccgctcccacatcttatcaatcgctcttagcatgacgtcttcgcactgagtcttactgtcgaaccgtctgctagtatggtccggtatctggacacatccgtctccagtgcaaaggaaagcagtagcaatccatacggtgatactcgccatttcgtcacctctttagttgatgagcagagtctattccatctgctcgccaggagtaaagcgcttttcgtcgggataaatgccgatgatgtctgcgtcgagcatccaaatgtccacggacggatcgtcgctgctgatttgatatagattgtacagctcccgtccgcctacagcacgctcgcctcgcggctcaaccgccagaaccttgccgtggccttctccgtgctcgtccaggtatatgacgtgatcaccgacttcatagctttctttcgtgacgaggcgtgaacgcgagttgttctgcgattcaaccacccaggaatccagcacgccgcctttcatgtcgcggaacaatcttgccgatttgtcgcaatcgaacacgcccagaacttcgccgtctttcaacacgatgtgtacgataggaagaagagtattcatgtttaatctccattgactgataattagagtctaatctgccgaaaagttcccgtaaagaattatttctcagaactgattagttgtaactgttaatctgatgtatgtgtttgaatctcttttgaacgtttgatgtttcccctataataagcgcacacagccaacaaccacgtggaactacaatgtttaaactttcctggatattcgggcgcaaaaaggatagtgctgcctgttctgaatcggcgccggagaaagtcgcacaaatccctcaacacgatccgctcgaccctatgattaagctgggcagaattcgcggctggaacgtcgagccggagaaagccccggtcatccgtagcgtgaaggattttctggaaccgggcctatccgtcgcaatggacagcgcgtatggtgacggaccgactccggccgcgaaggttgctgcgggcggccagaatccctatgtcgtcccgaccatgctgcaggattggtacaactcccaaggtttcatcggacaccaagcttgcgccatcatttcccagcactggttggtagacaaggcttgttccatgtccggcgaagacgccgcacggaacggatgggaactcaagtcggacggccggaagctatccgatgaacaaagcgcgctgatcgcccggcgcgacatggagttccgcgtcaaagacaaccttgtcgagctgaaccgattcaaaaacgtcttcggcgttcgtatcgcactgttcgtcgtggagtccgacgatccggactactatgagaaaccgttcaatccggatggaatcacgcccggctcctacaagggaatctcccaggtcgatccatattgggcgatgccgcagcttactgctgcctcgacggccgatccgtctgccgaacatttctatgagccggatttctggatcatcagcgggaagaagtatcaccgcagtcacctggtcgtcgttcgtggaccgcagccgccagatatcctgaagcccacatatctattcggcggcatcccgctcacccagagaatctatgagcgcgtgtatgcagcggaacggacggcgaacgaagccccgctgcttgccatgtcgaagcgaaccagcaccattcacgttgacgtggaaaaggccatcgcgaatgaagacgctttcaatgctcgcctggcgttctggatcgccaaccgtgataaccacggcgtgaaagttctgggaattgacgaaggcatggagcagttcgacacgaacctggccgacttcgacagcatcattatgaaccaatatcagctggtcgcggccatcgccaagactccagccacgaagctcctcggcacttctccaaaaggattcaacgccactggtgagcacgaaacgatttcttatcacgaagaactggaatccattcaagagcacatattcgacccacttctcgaacgtcactatttgcttctggcgaagtcggaagaaatcgatgtgcagctggaaatcgtctggaatcctgtagactccacgtccagccagcaacaagccgaattgaacaacaagaaggccgctaccgacgaaatctacatcaactctggcgttgtgtctccggatgaagttcgcgagcgtctgcgcgacgatccgcgttccggctacaaccgactcaccgacgatcaggcagaaaccgaaccgggcatgtctccggaaaacctggccgaattcgagaaggccggtgcacagtcggtcaaggcgaaaggcgaagccgagcgagccgaagcccaggcgggagccgtagagggcgcaggcggcccggttcccgccgctccacgcgcgactaagcctctcgcgaaggcggccgaggaaggggccagcgaggccgctgaaccgccgtcgcggccggaccccaaggccgagctgcggaacttgttggtcgatcttttgtcgaagctccaagacctggacgacattaaggcgccggacggcgtagacatagagcacaatgatgcgcctggcttaaagcgcacgtccaaacctggcgtgtctggcatggagccttcagtgttttcgtccaaccgcatcgtcgggcctcgtgatcattcggaactccagagaatcaaggtgaatggaataaccaccttgatcgaaaatccgcgaggaagcattcgacaaggaaaggatgggagttggcgagttcagatgaaacaccactacgggttcatcaagggaacgaaaggcgctgatggggatgaagtcgattgcttcgtcggtccgaatctgggatccaaacgggtcttcgtcgtcaaccaggtgaacaaggaaggtcagtttgacgagcacaagtgcatgctcggcttcaacaacatcaacgatgcgaagtccggatatctgtcctgcttccgtccgggctgggatggtctcggctccatccatgaagttgacctgcccgctttccgtcgctggctggcgaacggcgacaccaccaaaccattcgggggcgagtgatggcattcaaggcctccaaaaagcgcgagcgccgggcacctcttccagtcggaagagggaagcccataattccatcggcaggaatcgaggcctggtatcgaaagcagatgaaggatatgtccaagctcatgatctccgactatcgaaacgagattgagaaggcgctgtcccagcctgcggccgaacggttcttcgccagagacgaatccgttaacgtcctgttcaagatgacccttcgaagcctacagcagcgatggagccgcatttttgaaggtttcgcggccaagatcgccccagagttcgtcaaccggaccgaagaagccgccactgccgcgacccttcacagcttgtcggtggccggcgtcgatcagccacgagctgcgtataatgagagcgtcaggaacaccctggaggccgcaaccacttacaatcatactctcatcaccaagatccaagaggaagtccacgagaagatttacacatcagtaatgctgtctctgacttccccgaatccggaagagcaaggaacttccggcataactaacgcacttcgcaaagtcgggaagttttctgaagatcgaatcgaactcatcgcaagagatcaaacaagcaagctttacagttctctgagcgatgagagaatggcggaaaatggagtcgaggagttcgagtggctacactcttctgccggcaagactcctcgccacacccacctggagaaagatgggaagaggttcaagctgaatgaccccagactttgggagggtccgaaagcagaccaggggccgccaggatgggcgattaactgtagatgcagaaagataccagtcatttgacgtcgataggagcgctatatgccgttagttcatggcacttccaatgaggctcgttctgaaaacatcaagcgggaaatcgaagccggtaaagacccaaagcaggctgcggccatcgcttattccatccagcgcagtgagaaagggaagacggcgaaagattgttcgcctgagctcgtcgccgatcttcgcgccctggtggacgctctgtcgaggctcgtgaaatgaaccgcaagacgtgccggcgccgactcgtggtcgatgtaatcagggccaatattcacggcggattcttcagcctgaagtttgccgccatcgatttggcaatcatcggcttcgccatcttgatggcttttggccgatgatgctgagaaaatctggattctgactaaaaattctagtccggatagccgcaaattaccgtttacggaaaatggcagtaatttggaaatcctactgccgcgaggctttaacagagccagttcctaatttccgatttagccgcatgcttcaaaagtatatagcctgggaaattagaagtaacgttccaatagaattcatctataagcaacgttataatataacgtcaatctatatgctctagacgtattgaaattcaatttttaatcggtaaattggtaatttgaattagtttagaagttgaaagtctcgcggcagtaggcttagacaaatcccgtcaagtttccgagaccaaattaccggattttcgcggctgaggaaactggtaattagatcataatacaaattataatgtaagttaacagtcgcggctacatctaattattgttccgcttatttacccttagatgtactgcgtatataatacagccatagtccacgactcttcgaattaacgatggcaaagtcgaaaagaaaaattgacgaaaatggatatatgaccatagagggctgcccgatcagctcttatggcgttttccaatattctgctggtcaactcggtcttccgggcgatccgacgcggattgtcaacgtatatcgcccggagtctgccgtcagcgatccggagtacatcgaatctctgaagaatctcccgttgatcgacgagcatgagatgctgtcgggattcgacgatgatgacgatagcgtggcccccgaagacaaaggggtggagggcatcatcacatccaacgcttactacgaagccccatgggcacgcggcgatatccgcatctattcccgcaacatgcagaatcagctggaaaggggcaaagaagacctgtccctaggctatagttgccgctacactgagcaacccggcatctggaacggaacgccttatgaagtcgtccaggacaagatgcgcggcaaccacattgccctggtaaaagagggtcgtgtgccgggggccagagtattggatggtctgtgttttgaccatctcagttttgatttcagaccatccgatgagggtaatgaaatgagtctcaagaaagccaagcggaagccccctgtccagcgcgtagggcaagctgctgactcggcggtcgaagagttgcgcgccctgtggccgaagctatctgcgtctgtccagaagttcctgggcgaagaagagcaggagccggagcatcaggaaggcgcagctccggccgaaccgaccgacagcgagcacctgaccgagcatccgactctggaaggtgctcagaaggatgacgaagagcaggaagaggagccttccgttgtcgatccggccgtggccgccgtcgagccggagcatcaagaaggtgccgcatccgaaatgtccggtgaaggcgaagtcgccgaactgatctctcaagtcaaggccattctggctcgactggagggcacggtagccgaaggggcggacgaagagcatggcgaaggtcaagatgtcgtcgagggcttggaagagcagagcagcctcagcggcgcgcaaaccgccagcgacgatggtggtgagggcaaggataacagcgaggaacttcctgaaatggcacagaagaacgcgcaagatgctgcaattcgcggtctctatcgcgacattgctgctaaagatcgcctctacaagcgtcttagctccgtggttggtgcgttcgatcaccgagctatggactcggctgaagtcgctgtttacggcgtgaagaagctgaatatcagctgcgcgaagggccaggaagcactggcgctcgacatgtacctgaaaggtgtcgaagccgcgcgcggcgcggccagccgtcaatcgaaagcccaggattcggccggttctgctccgcagtgcgccgagctggacagctacctgaagggggagtaactcatgttccagaaacaagtttaccgccagtacactcctggttttccgggcgatctgatcgaggacggcccgaagcgggcgcggccgggtcgaatcatgtctctgtctgccgtaaatccggctgccaccgccaccggccccaaccgcatcagtcgcgctttcggttacgccggtgacgtcagctccctcggcgaaggtcagccgaagactatcgcggctcgcgcttctgaagtcgtgatcggcggcgccaacttctttggtgtcctcggtcatccgaagcactatgcgctgttcggttcggccggagactccctggctcccagctatgatctgcccgatggcgccgaaggcgagttcttcgacatggccaccggcctggtcgtcgaaattttcaacggcgccgcaaccgccctggacctggactatggtgacctggtcgcctatgtaccaaacaacctgcctaccgccgacaacgcgcttggcctgccggccggcgccctggttggcttcaaggctggctccatgccgaccggcttggtccagattcccaacgcacgcatcgttaacgccatcagtctgccggcccagtcggcggggaatctggttgctggcgttaccatcgtccagctcacgcagtaaggaggcgtcatgagccagatcagcaagacccattcgcgcctcgcaggccgcaatgcgaaacctttcgacctgaaaaacatcaccaatgacgccgtggcgtctctgcgccgcatcggcctggtattcgatcacgccgtcgtccaggaccagatcaaggccttggcgaaggccggcgcgttccgctccggctcggccatggacagcaacttcaccgccccggtgaccacgccgtccatcccgactcccatccagttcctgcagacctggttgccgggcttcgtgaaggttatgaccgctgcacggaagatcgacgaaatcatcggcatcgataccgttggctcctgggaagatcaagaaatcgtccagggcatcgtggagccggccggcactgcggtggaatacggcgaccacaccaacatcccgctgaccagctggaacgccaacttcgaacgtcgcaccatcgttcgtggcgagctgggtatgatggtgggcaccctggaagagggtcgtgcctcggccatccggctgaacagcgccgaaaccaaacgccaacaggcggccatcggtctggaaatcttccgcaacgccatcggcttttatggctggcagagcggcctgggcaaccgcacctatggtttcctgaacgatcccaacctgccggcattccagaccccgccgagccagggctggtccactgccgactgggcaggcatcatcggcgacatccgcgaggccgttcgccagctgcgtattcagagccaagatcagatcgatccgaaggcggaaaagatcactctggccctggccaccagcaaggtggactacctgtcggtaaccacgccttacggcatttcggtttcggactggatcgaacagacctatccgaaaatgcggatcgtgtcggctccggaattgtccggcgtccagatgaaaaaccaagagccggaagatgctctggtgctcttcgtcgaagacgtgaacgcggccgtcgatggcagcaccgatggcggcagcgtgttcagccagctggtacagagcaagttcatcaccctgggtgtcgaaaagcgggcgaagtcgtacgtggaagacttctccaacggcaccgccggtgcgctgtgcaagcgtccgtgggctgtggtgcgctacctcggcatctaacagatgcctattcaccaaaggccgggcttccggcctttgttcactctgactctaactcggttgtaggggccggttagggcataattactaggactacgccaatgactgtttatatcgtttcctccatgactcaatcggtgtcttacaatgcgtatgacacctctgatccgtccaatcctcgcctccagcgaaagattctgattcgcggccgcgcaggcatcgcatccgaaacttccggcttcggcgacatgatttccgacgaggcaggacgtccgatctggaccccacagggcgattgcactgccgtgagcgattcggatttcgagctgcttcaggccaataagattttcatgcgtcacatggagaagggttatctgcgagtcgtgaagaccgacatcaccagtgaccaccagcggatttccaaagagactcgcaccatggagcgcgatggattccagcctctggatgctactcgcctgcagcagaaaatcaaggtgaccacagccagcgcttcccaggaacaagagttccggatttaaccgagggtttcggtatggtgattttcgacgaaaataagtttcgcacgctgtttccggagtttgctgatccagccgcttatccggacgtgcgcctgcagatgtatttcgacattgcgtgcgaattcatttctgatcgcgattcgccataccggattctcaatggcaaagccctggaagcgtgcctgtatcttctgaccgcccacctcctgtcgctgtccacgatgcaagttcagggcgcggctggaggtggcgtcaccgccggtggaacccaaggcggtttcatcaccagcgctacggtcggcgaggtcagcgtggccaagctcgcgcccccggccaagaatggttggcagtggtggctttccgggacgccttatggccaagagttgtgggcgctcctcagcgtcaaagcggtgggcggattctacatcggcggtcttccagagcgccgaggcttccggaaggttggagggacgttctggtgatccctggtgcgaatcttctgcgaatggccttcggggtcatcggtactcaaattgtgaaatatcgcaagtttgagcagcgagtgaagaatgatcaagcccagtatgtctccatgttcggggagcctttcgacctggcagcgtctgtccagcgagtccgacgcgatcagtatgcccagtttaatctggagttccaacggaattatgttatgatcttcgccaactttgatatggttgacttggatcgcaatatggccggtgaccagttcctctggactggaagagtttttcagctggagtctcaaggctcctggttttatcaggacggctggggagtttgcctggccgtggatatcggtgcggccaagttcaccgatgacgggaaaccgactttctaggtggtgtatgtttgacggcgaactgatagcgaaaatggttgtcgagctgaatgcggcgatggcatctgctcaagaggctttgcagttcccggattttgaagtcgtccagaaagctcagccgacccaacaggggacgtcaaccaggccgaccatctttttccagaaactgtttgacattcctcgcggctggcctgccaccgattggtacctggacaacacggcccgcaaatatgtggaaataactcgacagcatgtagagacgactttccagatcagttcccttcattggcagaatcctgaaatcactcacgtggttacggcttctgatatcgccaactatgtgagagcttatttccaagctcgatccacaattgagcgcgtaaaggaactggacttcctcattcttcgcgtgtctcaaatttccaacgaggcattcgagaacgacaatcaccagttcgaattccacccaagttttgacatggttgtcacttacaaccaatatattcgcctgtacgaaaacgcagcatattcggccgatggggtattgataggcatatgagtctgaggcgcgattcagagctaatcgccgcgcacctccagatgttaagagccatgcgcggcaggtccgtttcagccggatggtattccacggctcgatatcctgacaaggcaggcggatcggtcggaatacaagtcgcgagaatcgcacgtctcaatgagtacggcggaactatcgaccatccgggcgggaccaggtatattagggacgccattgttcggggccggtttgttggcgttcggttcgtcagaaacgactttccgggagaaaccgaggtaactaagcctcacagaattaccatcccggctagaccgtttatgcgatatgcttggaacttgttttccgcagatcgcgccgcaatccagaaccggatagccatgaggctggccagaggacagatcactccagatcaagctcttgcccagatcggcctggcattggaaggatacatagccagaagcatcaggaccgggccatgggtggctaactcagcatctacggtcaggagaaagggattcaacagaccgctggtcgatacggcgcacatgcttcaatcgattagcagcagagtaacataaccaggagatcatccagtgatcagtcagagccgttatatccggatcatttcgggcgtaggcgcaggcgctccggtcgcaggccgaaagctgattctgcgcgtcatgactaccaacaacgtcatcccgcccggaatcgtcatcgagttcgacaacgccaacgcagtcctgtcatacttcggcgcgcagtcggaagagtatcagcgggctgcggcttatttcaagttcatcagtaaaagcgtgaattcgccgtccagcatcagcttcgctcgctgggtaaacaccgccatcgcgccgatggttgttggtgacaatctgccgaagaccatcgccgatttcgccggcttctcagcaggggttctgaccatcatggtcggcgcggccgaacagaacatcaccgccatcgatacgtccgccgcgacttctatggacaacgtggcgtcgatcatccagaccgaaatccgcaagaacgctgacccgcagctggcccaggctaccgttacctggaatcagaacaccaaccagttcaccttggtcggcgccaccattggcaccggcgttctggccgtggcgaaatctgccgacccccaggacatgtccactgccctcggctggtccacctccaacgtcgtcaacgtcgccggccaggctgccgatcttcccgacgcggccgttgccaagagcaccaatgtcagcaacaacttcggttcgttcctgttcgccggtgcgccgctcgacaatgaccagatcaaggccgtgtcggcctggaacgcggctcagaacaaccagttcatctacacggtcgctacttccctggcgaacctcggcactcttttcaccttggtgaatggcaacgccgggaccgccctgaacgtgctgtcggcgactgctgccaacgacttcgtggagcagtgccccagcgagattctggccgccaccaactacgatgagccgggcgcttcgcaaaactacatgtactaccaattccctggccgcaacatcaccgtttccgacgataccgttgcgaacaccgtcgacaagagccggggcaactacatcggcgtcacccaggccaatggccagcaactcgcgttctaccagcgcggcattctgtgcggcggtccgaccgatgcggtggacatgaacgtctatgccaacgaaatctggctgaagtcggctatcgctcaagcgctcctggacctgttcctgaacgtcaatgcggttccggcgagcagcactggcgaggcgatgaccctggcggtgctgcagccggttctggacaaggcgactgccaacggcacgttcacctacggcaaggaaatcagcgccgtccagcagcagtacatcacccaagtcaccggtgatcgccgcgcctggcgtcaagtccaaaccctgggttactggatcaacatcaccttctccagctatatcaacagcaacactggcttgaccgagtggaaggccaactacacgctgatctattcgaagggcgatgccatccgcttcgtcgaagggtcggatgtgatgatctaatggtttgcggcggactcgatccgccgcaaccttccataaatggagtgaggaataagcaatgatcaacatttctgcgttcggctcgatctgccagttcacggcaagcagaactttcccgaacggattcaccgtcaccgagttcgccgacgatgccgatcccatcgacagcccgccgttcaccgctgccgataccggcgtcggtctcaacggtgacatggtagtttggaaccgggcgaacatcctggaagtagtcgtcaacgtcattccgaataccgagggcgagcgcaacctggcagtcctgctggatgccaaccgcaccggaaaggacaagtcgggcgctcgtgatgtcgtcggtctggtcgtggcgatgccggacggcagcaaaatcacctgcaccaacggcacccccatcgacggcgttctgatcaacgcggtggcaagcgtcggccgtctgaagaccaagccgtatcggttccgatttgaaaaagtgatcaaagccggtactagctgatgaagaaaattccgctgacagcagtccccaatcaagcgatctcatttaacgccggtagcagctattggaagattcgcctgtaccagaacatggacatgatgaatgccgatatcagtcgcgacggcgtgatcgtttgccatggggcccgctgcttcggcgggattcctcttctccagtacagccatcagtaccgacctgactatggcaatttcgtcttcgaccgcgacgccgattggacgttgttcggcgacggaatcaacctgttctatctggacggcgccgaattcgcagagtatcaggcgctcgccacgaggaaagaatgagcacatcaacgatcagaaccgggacgaacaatgatatccttttggacgacaatggaaacatggtcatcctcaggggtgtcgaagcgtgcgcccaggacgttcgggcggcgatgctcatgcgcaccggcgaaaatattttcgatgtgaactccggcgtgggatatttcgaatacatcttctcgccgcagaaaagctatgatgacgctcgcaaatccatcgcggatgcaattttgtcctcgccggatgtgaccggcatcgagcagctggacatcgacatcaccggggaagtcttcggcgtcgatgcgaaagtcatcaccatccacgggcctgttaccacaggagtttgaaatgagtaccatccgcatccaatacgccaacggcacccaactgttcctggacggcaaaaatccgccgcccctggacccgctgccctcgtttaacccgtctgtcgaagatctggaaggcctgggccgcgaaaagaacaccgacaagggcgactcctcgccggccggtcttcccgttcccccggtagacgtcgattccaatgtcgacaacggcggaaccatcccggctccggtatcgaccgacgctcctgcggccgaatcggccccggaaggcgcccaggaagctcctgcagcaggccaaggcgacgagaaaggcgccgaggaagccccgactaccgccccagtagaaaaggccgaggaaacggcctcgccggccgctgaagaggcaaccccggctcccgccaaggccacctctcgcaaaaccaccagcaagtaaggactcgacatgatcaacgtcagcggcttcggcacaggaattgtaatagtttccgcctcatcgttcccgatggggttttccttgtcgaagttcgctgatgatgagagtccgatatcctccaaagagctggagccgttcggatatgagatgctttatgacggcggcctattcgcctttgacaaggctgctcctctggaagtatctgtatccgtcatcgcagggagcgaggatgatattaaccttcgcatccttctcaattccaaaaagggatcattcagatttcttccgggaatcatcccggacatgacgactctcgtggccactcttcctgatggcggccgcaccgttctgtccaatgggaccatcctcaagggtccggccatcgacaccatacagaacaccggacggcgcaaaggcaacacgtacacttttgttttcggtagctatcttggcgcccagactgcgcgtcaagccatttctaacgttatccaatcggtactggaggtggtctgatgttagggattttcaccagcctcctaagttcgcgatctttttcgattgtggaccaaaacacaaaccagctagttgctgcggatttgaggataagccgggtcaacacccggttttcttctgtaggacaacgccacatgctggaagatggtacgaccaagatggattccagaacgatccaccctatggaaatcatcgtcgaagtattttgcccttcaattggtgtcgtcgatcagatcaatcaattgctcctggatcgcgacacactgtacaaagtcatcactcgcggcatggtattcgaacggatgatgtgtaccagcgaagcgctcaatcagactccggatgtgatatcggcgactcctgcacggctgacattctcccaagttctcgtccagaatcccaagcctataatgttccgaaatgcaggggactcttctatgatcgaccgagggctggccctagctgaagacgtggttggctcggccggcgatctgttcgactacgcagtgaacggcgtccagaacgccgcagacttgttctgaggtgccaattgaactctttcctcaagtctattctcaacacgcctactctcaccatacgcgatgatgttaccaaacttcctgtctggaagagtcttcaagtcaagaaagtggaaatttactcgccggcttccgtagtgtcgaaacctctggcgacgaaagaccagacggaagctcaagtgtacaccgaagctctggacattgatgtgaagaatggaaagatcatccaaccggtgcgactccgcatcaatgctatctgtccggacctgtccaccgttgaaagtatcatgaacgctttcaatgataacacctcgactttcgctatcacttctaagtcgatattggccgataaaatggccatcatgacgctcgatgtagatcagtctccagacatgttgaacgcggctgagatcaatatggaattcgagcaggttgagcctccagtattgaataaattcgatcctgcgttccctcaagatagtccgacttatggggtacagattcaatctctttctgatgctaatttgctggattttggcgccatcggcgattcgatatcttcggccgcaaaatcgctatataatcgcgtgaccagctacttctgaggatgtatcatgcttgaaatcaatcttcccgatggccgtcaaactcgcgtacaaatcgaggcgtggtcggcattggatggctgggaactccagcgccgtttcgtcgaattcgctgtcagccaagattccgacttccgccgctctttcaccatggaaatcctgggctatgcgaaagtgctgcttggcgacgatgacaccggcattccgctgaccaccgcggcagtcatcaacaaccacctcggccactggaagaacgtggaactggttttcaactctgttctcaagcacaatggcatcgacccggccacgcacgccgaccggccggactattgggaacaagtcggatcgcagatggccatcgcatttctggccgaggcgtccaagctcattggtccagcaatgaagatcgccgaaggactcgccaacaagccggagtgattcatgtctagtgatttggatgaattcatacttcggtatgaggccgatactgccagagccgagcgcaatctggagcgcctccagaaccagatcaggcgcgtgaacagcgcatcgacgagtggccttcaggatttgcgccacttcgcagacggcgcggccactgaactcggccgagtcgttccgcagatcgattctgtgacgagcgcgattcgcgggatgaacgcgcaactggcgataggcgccactggcgtggccctggtcgcggccggcgtcaaggcgttcatgaacaccagggaccagtacaatcagcagcgcatccaggcgatggacatcggcatcgccccggcacgcttggaagagtaccagagaaaattcgttcgccagtccggtggaaccatcagccgcgagcagggcgcggagatgaccaaaaatctggcagacactttccggcgtgcttatcgcgatattgggcgagtcggcccggaagcgcgaattctgcgtatggccggcgttgatgtcgggagcttccaaaagggcatgcgcccgctcaacgacatcattactgatctggccacgaaaatggccaagctgaagccggacgaaatttctgcctacgctgatgcccttggcgtctcgcgagactacctgagcaccctggctaagatcggcccggccatgggaaaagtcaccgagatgacgactgcggaactccagtccagggtccagggcgagtccaacattcagaaattcaacgatgctctggcgaatctcaaccagacgttcaccaccctggaaaaccgagtcggcgaaaagctcgcgcctgcgttcaccaagctgatcgaaatcatcgacaagatagtccaggctattcccaatgaagtggaaagcttcgcgaaggacaccaaatcccgttgggaagatggagtgctcgggaaggcgaccgttggcagtgatatcctatccctcctcagccccggcgccctgctcggtcgcctggcagcgtgggggactcgtcgcggcatggaagaatcagggctcatcgacaaggacaaggttcccggcgctcaaaccagcgaagacctggccaagaaacaagaagaccaggacaaggctactaagtccatgaaagagctagagaagctggctgaccagaccacgaagtctaccaatgattttgcggtggcgatcaacatgttcagtggcgcggtatcgtcgttcgcgaatgccgttgacgagcgccaagcttgggcagcctgggcgggggaaattggtcgggcggtcggtatgggaagcaccgcgccgacttcgcgggcaaccggcgtctatccgcacgcgatctatgatcagtcgaagagtggcgcggccggacaagtcttcggcgagccaatcggcgcccagtctcttcgcaatcgcatgttctcgccgcagcgcaaggcagagccggtcaccgttccatcgtacatcaacgatatcatcaaagatgcttcgaagatgtacaacattcctgagctggacatcaagaaactcatatacaccgaaagccgattcaacgccagggccaccagcgaagccggagcgaaaggcctcatgcaactgatgccggaaatcgccaaggcgtatggtatcactgacgtatatgaccctcgccagaacatcctcggcggaacgcgcctactgcgtgaaaacctagatcgagcaaatggcgacatgcggttggccttgacatactatcatggcggactcgatccgaagaactggggcccaaggactcgcgcatatccgggtttggtaatgagcgctccaatcgagctgatggaagaggctcagcgcaagcagaaggctgcggccatgaccgtcgccaacgagacgttcgccccggaaggcggcgacatggacattcgtccctatgatggcgggcgactggaaaccccagaccagggcaagaaggaagatgagcgccgcgaagcccgtcgatatgacgacagggttgtgcgaccggaaattcgcatcatcgaccgcatgccagaccgcagcgacggcgaaatcctcaagatgtctagacgtcaagaggccgaccgggcagattctggattccggaagttcccgaatcaagttcgcggcgagaccaagcagaacatccaggctcaactcactgcaggagccatcgcgcaagtgatcggcgttaaccccaaccagatcatgcgccgcgaaatcagccgttctgacttgctgttcggatacaaccaagccatcctgggcaagcaacaggagatcaaggccgccgcgaccgaagccaacaacgtattcctgtctccagccaagcttgccgaagccacggccaaggtgaacgccgcatcgcgagaaatggatattctcaggacgtacggcgagcaacttctgaagagcgctccagagcgcggccaggagctgaccatcggtcggatcgacatgttggtcaacgtcaccggcgcgaattctccggaagaggctcgtgagatattcagcaagcagactgcagaccagctgactacggcaatccaggacgctcaaaacgattccgcaactaagatactctactgatgaaaaagagaattctgcgagtaacattcaacatgccttatggacccgaagtcatccgcgaagatctggatgttcgggtccggattatgaaggctgcgttgcggattcagaaccgggcgacgatggaaattttcggcctcaccactcagctgcgcgagtctcttctgtcgcagttcaccgcgtggaagcaccggcaacgtcaagtgggcagggaagatgaattgatgatcaaggtgtcggtggaagccggctactctgaccaggggcgcgagcaagtttccagagtctttgtcggcgaagttgccattgtcgatatcatttctccgccacctgacattggaatccgcatccagtgctataccaggcaaatcgacaggacgaagaccattcggaatatgccgcccgccaacacgacgtttgtcaagttcgtcgagtggggcgcgaacgaaatggggttgaacttcatctgcgataccagctacaatgatcaagttttgaagaatccgggccgttcgatcactgtcgcgtcggcaatcctggcgtcaattcaggatatgtacatgccggatgtggccgcgttcgtcgatgatgacgttttgatcgtgaaggatcgtgacaaagtcattcgtccggatgaagtcgccaacattaactcattcgtcggcatcccttcatggtcggaatggggtgtggaatttcaatgtctgtttgaaccgtcgattcgcgtggctggcggtgtcgcggtcgaatctctcatgaatccaagcgtcaacggcaactatgtaatcaccgctctagagtatgatttggccagtcgggatcggcctttctatatcaaagtcatggggagtccagcagcgtaatggccagggaaatcaaatcgttcaatatgttcggcgtgcactacaactcgcggcaattctctgcggtcgatggactcaggatgatgtcgggaatccatgatgttccgccggaagaattgctcaaagggaccgacgtgctggcccatacagaggaacaaccggaaggcgtttggcttcccttgatcgctgcgaacataaatctttatgtcattgaccgggcgaacgtaatcgctcccgtacaagtgcttgcgcttttgtctgaactggtcatagattggaactttggcttcctcaaagattggacaggggtcaaaattccagcccgatttgtcgaagatatcaagagtgtaaaaacagcccattcaccttctgtggtcgcaagtttggtggcgaatgggtcagcttctatgcgcgagctggaagaatattattcgactcaagatgcctttaagatgattgacatcatgacggcgaagagcgtgaatgaggctctagcgtccgaagcatcacagaacagaatcaaaaagggataattcctaagcgagcctgggaaggctatactagacctgccaaatcagaggctttcccatgtccaatattcctttaacatcagcaaaatctaccgacagaacgcgactgatcgccgctcttgacgctcggtcgcggcgggacgcgctcgactttgaagtcatgattcccgcccaggttgttcaatatgatcggaccgaaaatatcgctacaatccaacctctcatcacctgggttgatacggaacacaatgccgtccagaggcaccagctggttgatatcccggtgatttccatgggcgctggcggcttccacataagtttcccgatccagcagggggatatcggctggatttacgcggccgaccgcgacacctcccagttcttggagtcgctatcgatgtcgaagccgaacaccggccgcatccacaaatttgagcatggtatgttcataccggacgtattccgccgatataccatcaattctgaagactcggcagcgatggtcatccaatcgactagtggagcgacccggatttccattcgcggcgacaacatcaagatcactgcgccgtcgaatgtcaccgtagatactccgcaggcgaatttcactggaagtgtgactatcgccaacaccctggttgtaaacggcgtcaacgtgaacaaccacggccacctcgaaaacaatccgcctgatgcccggacgaaaggcggcatgattgcctaaggagaatttcatggctagttttgatttttctgatttaacagcgggggggggttgtaatggctaattatgactacatagtagatactggagtcatagtcgccgataccgctgacgttttgaaagacgttgaagcggaattcagagcggccctcggcgccaatatcaacctggcggcttcaacaccccagggaactctggtcgcggctgagaccattgcgcgttctagcgtgatgaggaatgaagctcgcattgccaacaccatcaacccaaacgtttccttcgggacgttcctggacgccatctgtgcgctgatgggaatcgagcgcggctctgatctttcgacgttcggctatggcgtccaagtgaccggccgcagccagacccgaatttccaccgggtcgcgtgtgcagactccggccggagcgattttcacggtcatgagtgacgttctgattccggcaaccggagtcgccaccatcgacgtaaaatcgcaggaatatggaaacatccctcttcccgtaggaaatctgatcatcatcgatggaaccatcggttgggccggagcgaaagtaatcgcttcaactcgcgtcgatcctggcagccgccaaatgaccgatgcagaattgaagaatgctcgcgtcaatcgtttggcgatccaaggtcgcaactcgactttggccattaaagcgtatgtcagcgccgtacccaatgttacctcggtcaacgttatcgaaaacaataccggcacggttcaagttgtcaacggcgtatcattcacccttccgtatgcggtctgggtctgcgtcgccggaaatccggataaacaggctgtcgcagatgctctgtgggcagcccacaacggcgggactccctgggactatggcgcggccaacaacggcgtcccggtggatgggcctactggcgttcctgttcgcgatccggcatccggtcgaaagtatgtcgtgaagtggactactccgatcatgtatgacggatatgtaaacgtcaccgttcagcaaggctcttcctcggtcgctccggaagcaatccagaacgcagtcgtgaattacgcccaggggaaagtggagggtgaagagggattggtcgtcggcgcgagtctgtctgcctttgaagtggctggggctatcgctcgcgagattcccggtatctacatcaaactatgccaggtggcttgcgtcccggctggatcgccggccccggctcccggcgacttctcgcctgaatacgtcatgagcgcattcggtcaggctaccatttcggttggtaacgttagggtgactttcgtatgactctgcctgcgtacaattctgatattcaacaggcgctgaagtggctccacaaccaggcccctgggatcaccggcttggttcagcgaaaggctcaatggtatgatcgtttcagccgtcagttttgggtgaactgggagcgcgacgttttcaacttgaagactgccaacccgttcggccttatggtgtggtgcatcatcctcggcacgccttcgaaaggcttcggcctgtatccaaaaaacagctcttgggcgttcggtcggctgcgccagaacttcgtttatagcgggaatcaggttccgccgcctgcagacgcatcgccgggcggcaacttctacggtggcggcaatgccgaaatcctcaacttggacgaaatcaggaaagtgcttcagctaagatatgtagcactgatttcgaacggctcgattgcatatatcaatcgcatgcttcgctacatattcaacgatgatgagccgtgggacgaggcgaccgggttgtacttctatctcatggactcaaccggcgagaatggacctgtggagaacttggccatatatcggaaagattgggaagggatggttttattgtctagctcgcccaggacgaaccatgtgctgatatcgacccctgccagtgacgctgattggcctggtgtcgatccggccgcgagcggccgtccggtaacggtcgaaacggcgtccgctacggccccggacggctccgctacggtgtgcaagcttactaagccggccgggagtaccgcctacgtctccgcgccgatagatgggccgctggggtccggtagcactgtaacgttttcgttcttcgcgaaggccggatccacccgtttcattgcaatccagtcggctgccgatttccccagtcgagccgatgccgttttcgacctggattccgggaacgtaatcagcgatcagatgctggacagcagcgtggtaagcgcccgaatgattcgtctggaaaatggctggtggcgctgcgttctcacgaccaaaaccgtcagctcttcgttccgcgctgcttacgtcgccccggcagaaaccaacttcagctggatcgattcgaattccagcacggcgattgacgtgcttatctggggcgctcagatcgaactgggtgatactccaaccggatacttggagactaccggggcgcccgtaaccatcaccgattatgttttgcagaacacccagaccggaacaatcaagttcacacagccccttccgactggagcagaagcgtattggactggagactggaaaggcgggtctgagaccgagccggccagattcgcagtaggggatgggactcaagatacattcaatctgtccagccctgcatacatcggcctacccactagtggggcgttcaagctagaatacagagttggtccggcgcttaatttgtcgccgcaattgatcaacctcatgaatgaccgggcggtcggtatcatgccgacttgcgccggttgcgatgtaaaagtcattcaggagtaatgacgtgatcacacccgaactgatacccagtccgtttgctgcgcagggcgacaaagacccgatcccgcagacttcttccactggcttcgctaaccttcgcgacggctacacgccggactacgaaatcagcctggcgtcgaacaacccgcaggccaaagcggtcgagcgaaagattcaaaaccaactcttcttcatcgcgacccagaacgcacaggcgtggcagcggcaaatggcgccgccgtggtttcagggcatgcctggcggctatgaacagaatgcagaagtcgtgcgcgtcggaaatgacggcataatgcggcgttatcgttccatggtgaatgccaatgcgagcgaccctctcagcagcacgacttgggaagagcaacccgcatggtcggtgatgcgctccaacatcccgatgccggccggaggctcaggcctatcttctggcggagaagtcatcacgaccggccgcaacttcaacgacctgttaaatgggacgtgggagttcttctctgattcagtggttgtcgcttctcagaatgcccccgtatatccggcttctgctggtgccgctgctggcatgttggaggcgaaatcttgggtgtccggggccaatacgttctgcgtccaacgctacactgatcgcgtcgggaacgtcgctgtgcgcgggcttaatgccggagcgtggaccaactggatgtatgcggtaaacgtcatggcccttcaacaaggtcgggtcacctatggagtcgcggccggatcggcgaacgcttacacgttgacgctagttccgcagctccaaggcggcctggtggacggcatgatccttcgggtcaagttcaacaccatgaacaccggcgcctccaccatcaacgtctccggactcggcgccaaggccatcgtcggcgcggccaacttccctctcaccggcggcgaacttggccaaggactcatcgctgagcttgtattcgacgcagcaggcgaccgctggagaatcctcgcaggcgcgccacgcatccaagttggcaacgccgatcaagattaccaggcccccagctggaaacaggtgaaggattacgtcgcgtcccaaaagctgactgaagtggactgggctgacgtcgtcaacaagccgaacgtcgctatccaagacaccacgccgtggttcgccaatctggagctgtccgatgctcggcctttcatcgatttccacttcaacagcaaccgcgccaaagacttcgactatcgctttatctctgaggctgatgggtcgatggcattctattctcgccaggggtctgccagtcctacccaggacatcctgttcagcaggtcgaatgtaacattcctccagccgcgactggatgttgcgaaaaacctcgcgtacatcgccaactctggtcccctttggcagaacaccactgccgatcagcctggttggaaattcaccttcgcacaaggtgtggacgccaacaacaacgcggttatcgcagtcaataccaccaacccggacggctcttatcgctcgcaggtcatgcgatgggactgggcgtccacgaacgtcatattcaacaaccgtccgctcttcgccggtcaatacaccccttgggattctgggaacttcaatccttccaccaagttgacggtgaatgccgtgaaccaaatcgccggcccaaccgggattcggaataccaacggcaacaccggcaacatgaacacctggggttccggctccacgacggcatcctatggcaatgctgccattcaaatcttcggaaaagggggcggtgagcctgccgcgatctatttcgacaactcccagaccggatggtatctgggcatggacaaggatggacagctcaagcgggccggctggtcgctcggcaacaactcttatgtcatcacagatgaattcaacatcagaaaccatatcaacacaatggctgcgcgcccgatttgggggaatgtcgagttctggggtccgtggaacttcgatccgaatcttaaactcactttgaacgctttcaatgatagctcattcaccaggatgaccaacagcggcgcgaaagacgttggtatcgcgtccatgacgagttatgctgatgcggccatgtcattcttcaactatgaagcctcgaatccgaccgggccgcgcgcggccgttatttcgttcgtgagaaatggatcgcgtggagtgctattcggcttggattctgacaacaagctgaagtggggcggatattccctaggggacgtcgcgttcgagattgccgactccaacaacctcatgagcctgtggtcatcccacgctgccgcgccgaactggaacgggcagaccatctggaggtcgggaaacttcaacccagacaccaaggcgactttggcagctcgcaatacgacgtcatcccctacaatattcagttatggggcgtccggaatcgcatcaaccggacaggtcggtgcgttggttgtggaaaacaacagcgtcaccaataccgcagccgccatcacgttccattcgccgcagaaatatcaggtcaacttcggcctggatgcggacaacgtggtaaagatcggtggcggcacaatgggcggcgtagcatatcccatcatccactccggcaactacaacaactacatcaaccaggcgctggttcaggtgggtcttggcggagtcggttcctatggaattttcgcggttctggataatgccgctccaaccgcaaccgttcaacccggagtggtcgtggacggttccattctcatctactcgtcttgcgccgcaaactacaatagcggtaaaagacctgccggaacttggcgctgcatgggatatgtagtcaaccgggatgccaacacccctgactccgcgacccttttccagcgagtgacgtaaaatgaaatggacgcggatcagaaacccacgttggctggacgcagtaaacatccacgccatggtgactttcgagggaatcggtgaagtgccgttcaccgccaatccgcaagacgtggaggcccacggaagggccatctacgctgcgattctatctggggagcacggacctatcgccccggtcgattcgaagcgggagaaggccttgcaggacgctatacgagccagggaaaagcgggctatccttcgggatacccgctggcccatagatcgccacgacgagcaaagacggctgggtatcgaaaccacggacggccctgggctgatcgcagcccttgttcactggaggcagcagattcgcgattggaatagcggggatcggccgcgacttcccatggctctgaaaacaatgttcaaaaatcaggagtattgatgaaaatcacgaagggtgttctgatcaccggaaccgggtgcaccacggatcgggcgatcaagtggctggatgatgtacaggcggccatggacaagttccacatcgagtcaccgcgagccatcgcggcctacctcgccaacatcggcgtcgagtccggcggactggtaagtctggtggagaatctcaactacagcgcccaagggttggccaacacctggccgcgccggtacgcagtagacccgcgagtccgcccgtatgtcccgaatgctctggcgaaccgcctggcccgtaacccggttgccatcgccaacaacgtgtacgcggatcgtatgggtaatggctgtgagcaggatggtgacggttggaagtatcgcgggcgcggcctgatccagctgaccgggaagtcgaactattcactgttcgccgaagactccggcatggacgttctggagaagccggagcttctggaaactccggccggcgcgtcgatgtcttcggcctggttcttctggcgcaatagctgcatccccatggcggagtcaaacaacttctccatggtcgttaaaaccatcaacggcgccgcgccgaacgatgcgaaccacggccagctccggatcaaccgctacctgaagaccatcgccgcgatcaatcaaggatcctgacattcgcccaaagaaaaggccgcttattcagcggcctttttgctttctggctttgcctcttcaaccatcttggcctcgaccggcgcggcggactcctcctgagttaccgaatccacatagttccctagtgaactcagaacgccgattaacagcgctcttactaccttgtccttgactgtctcgcctatgatcttggtcagaacggatattaactcttcccggagtctggggctgattcttggccgaaagcgcttgcgatgctctttgcgtttcatgtttagtcctctgtctgcggtcttctcctcaccccgataatggcttggggatgcgttgtgttaatcggaagggtcgggcgctattataacccgtcgaaaatgctcgcgcttaactgtttaacgatacgcaccgcgatactaaatcgccttctttctggccaaggaactctggcggcctggtccggtctaaggcctaatttgtcgacattaaaacgagaaaacccggatcgcctgtaggacaaggcgtccgggtttatttcgatctagtgtacgctagaatcagtggcttccgccccaaccgtccagccagcaatcgaagacggcgtgtctcggcttgtccttggcgccatgggagaagtgcttgaaccggatgacctggcccttgagatgctccctgtcattccagcggcgctgtttctcatcgtgggtcaggctggaggccgacacgttgaaggtgactccaggccacagacgttcgttgcggcagacgaacgcaccgaccattccggacggcgacaggttttctgcgtggctggagcgggccgtgtggccaagttcattgatgaaagcttcattgttgttgtgcatcaactcttccacgtcgatgatctcagcttcatcgtagtcgtatcgcttgactttcacacagtgcccttccttggcagtcgagcgaccgaacttgtacagtccatcagcgcgcttgcccatggaaccttcgaatcccagcattgtgtggcggcgctcgacttcgctgaactgttcgatggaagtcaccagttcctgctcgaccaggtgaatcctctcatagccgaggcagtgacgaaggaagttcacgcgctcggccgccctggctaggcgatcttcggtcggtgcgcgaggatcggtgaaatcatcgaacacatggaaagaccagtccggctcaccgctgtggcggcgaagatcgccggacgacttctggaaaactttcgggtcgctgatgtcgccgcagaccagctcgccgtccaggccgttgaacagtttatcgctgaggtattcgtagatcgattgattgttctgccgcttgagttgacgagtcagcgcctcgccttcgaatacgaagcagcgaaatccatcgatcttcggcgagaaatacatcggcagttggccttccagcagcttcgggtcaaaattcgatgcgagcatgggtttcatacagttctccagaaaagaagcccggcgaaccgggctaaatggcggtaagccggctcagatggtttcgttggcgtggttcagttcggccatgatcgacgcatagagctcatccgactccttgatgaacacgccgtcgtacatgacgcctttgcgatccttgatggtgtcgtaggcagcagcgtagcaggcgagcatggtggtgtcatgctcttccgtcacgtcgaacagagtcatggcggccgataccaggctcttgatggccaacccatgatttccacgtgccagagcgcctgccagatcgccgaggcgctgcaaatcgtcgccgtaggtgggatgtacttcgccgctctcgatgaaggccgacagatgatcgaacagattttcgccgagttgcgcggccatgatcgtggcaaccaccattacgtcgccgatgccatctttcacatcgaccgggttgttctgaacccaggcttcgcatacttctgcgaactcttcgaccaacttcaggaattgatctttcgcagacgagcctttgatcaggttacggtcggaagcccatttaaccaccaggtcgtgaagttcgcggctcatgatttgttcgatgttcattctttcgattccttttggatttgggatttgactgcgttgattatggacgccgtgctctggcgcgatccatccttggtggtgccgaagtagaaggccattaccgacttcagctcggcgaaccaatagccgatgatggtgccgatggcgaccgaggatgtcgggtccatcagagcctcgcggccgaatgtgaagattgcgatgatgatgagaatggagcctgtcagaagagcgaatgtgatcgccgggcgaacgaaatcgttctgctgcgccgcaagcctcctcgcagaatccctgtcggccgcctctgcggcgaactggctaagctcggcctggagctggttctgctcagactgaaggcgattttgttcggcttgaatcgcaagctcctggagacgaacgcgctcggcgctctggagttcggcgagacgcgctagagcttccggattcgcgtctagagcgctagcgaccgaggctgggtcggccttcgaccccagcgccgtcgcgacgatagcgccaacggcggcgcctgcaggcccacccaggagcgaccccagagccggggcagccgcgccgatcttactacctatgtctttccagtccatttcgactcctcaaaagaaaggcgccattacagcgcctttctccggccggtgatttagaactcttcggcttcggtcgcatcgccgacgccaccggcgtcactgcgaggctgttcctgcttgctgtagtccaccttcacctcgccgccgacgaacgacttgtacaggtcggccgcagccttgaagtgatccgggttcttcaccaggccttccagctcgaactggacgccggaccagctgcccttgtcgttcgacatgcctacggtggtcatacggaccaggttggcgaaagtcggcggggtgcgcaggccctgcggggtctgaacctttttctgggacagcgcggtcatgagcttcttcgaggccttgatctgcgaagacgacagggagatcagagcctggccgaaatcgccggtgtccggatcgatgacgatgacgtaatgaccacgggtgtcggcgaagtagtcagacttcttgtcgctgaccgaaccgtcttcgttcggcgcgtacaggcgtccttcgacttccttcaccttggtcgggtctttcatcatttccttgaagtcttcgacgctgatggcacccttgaaaccgccctcggcctcgcgaccggcccagcggatgaactcgcggcggtacgcggccggaatgatcagcaggccggtcttgccgtcgtaaaccttgccggtgacggtgttcaggaacatgccggccttcgcgccttcgatgtacttcgggtcatcttcatcgacctggggagacatcttctgcaaaacctggatgaaggggatggcataggactcggcatcggcgccttcgaagcctgcgccgtcatacgatcccaaatccatgaagtcgggaacttcggtagtcgcgacggcgccgccaccggtggcaactgctacggccttggtttcttcggttgcttcggaagtttcggttttcttaccagccatgttaggctccttgtttgtcgaatttcagttatcgctaactgtgggtttataataacggaagttgcaactaagtaaagcaaattacatattaagatttgctctttttcaccttcggtttcgtgatcttggcctctttgtattcgtgtacgccgatgaaatctggcagctcttcgcccttctccaggtactcgcgaccgaacgcctggagggtctggtaatggacatcgcggttgatggtggcgtcatagccggcttcgatgatggcctcggccgccttcttcgcatcttccatttcgccgcgaccgaattcggccagaaccttggtcttgatgatgccgtcgttgtcggtgtcttccagccacttccagaacttcgatttgttctcttccttgacggaaatgatggccttcggctctacttttaccgtgcgaccgtccgccagagtagtggtcttctgaccaagctcctccaacagctccggaatggtgttacgcttgagggtcttcagctcctcttccttttcggccagcgccttttgaagatcgaggatttcgccgtccagctgcgaagccttgtccaccaagttcagcagtcgatggccgatgtcggtggcttcaaccgccatttcatccatgacgccaaaatagtcgatttcgcccggcgcgttctctttcaagtattccgggatttcaagctcttgctctttcatgtccgcctccaacttagtgatgttcccttacttgaaccaagtattgagtagatattatgccgcatcttccttgatacggctactgatttacatattaaatttcgtcgcgagtgctaacgtcagcctcaaacacgccatcaacgacataacttgccaggttgcgtttccactccaagctgacctggattttctcgtcgatggaatccagacagatcaggtcgaagtacagaaccgagttgacggtgccgattcgatgatttcggtcttcggactgcatccgcagctcgttgtcttcgtcggtcgtgtagtagatggccacgtctgcggctgtgagtgtgatcccgatccctgctgcggccgggttgcccaggaacacctggacgcgcttggcctggaaatcgtcgatcaatttttcccgctcggcctctttggtctcgccgtagtaggtgccaaacgaaatcccttgggcctccaaatacgccttgatctggtcgatttcctgaatgcgcatggcccagacgatgatggaacgctccgggtcttcctccagcagaccctccagaagatcagtaaacacggcgaatcgcgggttgtcttcgggcggcaggatcaccggctcaccatagacgttgatatagccggacgccacttgcttgagcttcgagcgcgctgccgcagcatcgaaagatacatcaagcatgaaatcttcgttctggagaacaaagtggtagtcttcttccacgcgctggtaaacctttcgttgctcaggcgacatttcgaagtatatgcgcttgtacactttgtccggcaggaatgggagtgcttctttcttcgttacacggaaactgtgcggctcgatcagggaccgcagcttgtccaggttccggaataccgggcgcccacactcgtctttttcgaccagttgcggcggcatggtttgcttcccttccagcttgcgcatgatagcgatcattcgaggatcgtcactgggcaccaagacggaaaattcggccacaaacgcccgataggatttagtccccagaattccattccgcaagaattggaactgcatgaacaaatcggtcggtgcccgcgtcagaggagttccggaaaggatgcgacgggccacggccttctcgcccagctttacgatctttttcgcacgcttggcttgtgggtttttgatcctcgttgactcgtccacaattgcgcaaactttgaatgtatcaaggaatcgctcgacctcatcatagccagcctggtggttgattgcgtcaacgttgatggcgaagacgcgaagaactttttcatctgcgaacgtctcggaatacagacggtccaagcgcgccctggcctttttggaagtcggtcggccgcgccaatccacgctcaaagtcttgatcgcgacgtgggtgggaatctcgcgcagaatccagttggtgtggacgcctttgggggcgacgatgagcagcgcgtccacgcgcccctgtaggaagaggcgaacggcatcggccaaagtcgtccaagtcttcccggtgccctgctccatcaggtatgcgaagttccgtttgttcagggacgctgccagggcattgaattggtgctgcatggcctcggtcttcatgcccttgacgggatatgttttggctttcatttgttctccaaatcggcgaggaactgaacaatgttatccagtccttctgcatagctcgcaacttccaccaagtcgcggctgttaagctcgaacaaatcgagcataggattcagcagcagccaatcggttccgatcttggccaggacgaagccccggccaccccagccgatccgctcccgaagaaaagggatttgcccaggttcgaaacatctggccattgggcaggtggaagcgcgtttcggccactcctccaaagccttgaactcgacccagaactggacacctcgacgattcaggcagatcgaatcggacatgccagaccgccgcgtctccagaaagtcgatcaggattcggccgagcgagcgctgcttaaacgcattcgccgctttcgtttcgcgatcattcatcaccttcgccctctttggaaactttctctgcttgcgctgccagctttgctttttcgcgttcggtcaaaatccgcttgacggccttcacgatgaacatatcgattccgctgagcttccagcctttgatgaggaaccaagaacctgtcggcgtcccttcagcaatctgctttccgtattgcagatatttttcaggccgaattctgaaacgtatcggctgatcaaccgagtcatcaacgcacatgatgtcgagaaactgcgactggcccttgtacaccgggtttttcccttgatcggccctcttcttctggcgaatcggttcgttctcatcagacagaacttttttcaccatcttgacaatgaccagaccatcatctccatcgcggatatcccgaatgttccgaatggggtttccggaagttactccaaccagctccggattgtcataagcatgaccccagagcgtgtgagcttcgttcaaatctgcgaattgaacttcagaattcgacagactcgcggcgactttctcccaatcctgaagcgtcttcaggtgggtgcctgccagctctttatattgagccttcagccccttaagatcggccttcaactccttcagatcggccttcaacagtttctccagttctttgtcttggctgattttcgccgaaagaatctgggcttccagagctgctacatcagcagccttgtcctcaacatcctgtgccgatatcgggcaattggccagggcgatcctcgcggccttgacgtcatcacgaaggcgcaggaacttctctgccttcgccgggccaaagcctttggcgttcatgatgccgccgatcaagcgtccatccgccactacccagttaagttcggaatgctccgggtccagggccgtatattctacgccttccttggccaattcgcgaaggatggacacagtttgctggtcgtctttcgccgcccgaagacacgcggccgcgtattccaggcgatgatatcgcttcatgtagcaggtccagtacgtcaccacagcgtagctgaccgagtgggagcggttgaatccccaggcgccgaaagtcaccatttcctgccacacacggtgagcatcgtctggggcgacgcctatggtcttggcaccctcgatgaacaattcccggcgcttgttgaagaactcttcaccctttcgcgcagacatggctttcctgattgccgatgtctgctcccagtcgaactggccgatgtccttgacgatggacatgatctgttcctgatataggaaaacgccgtatgtccctgacagatattgctcgacctgcggaatggtataggtcacaggctcgcggccggccacgcgctcgatatacttggttgccataccagaagacaacggacccggacgggcgagcgccgtgatgtggtcgatgttctcgaacgcggtgatgttgatcgcgtttgctaccgagcgaacggcctgcccttcgaactggaagatgccggacattttgtcttcattgagaacgtccagaaccgccttgtcgttcaaaggcaagtcgtacaactcttgcgcggtcacgcagttcgcgtcctggatgactcccaaagttcgaagtccaagcgcgtcaattttgaggagattcagatattccgaatcgggcttgtcgagctgcgcaacgccttcggaagtcaccgtacagaagtcgatgacttcatcgttgcagaccaggatgcctgccgcgtggacgccagagtgggatgggtgaatttcgaggtcgcccatgcaggcggacgcgatctcatacttttcacggaagtcgcggccgggctgagttttttcgaaagtgtcctccaatccttttccatatcgttcgtccgctgatgtatattcgatgatcgagtttttgatgttgtcggtatcgtggaaggggatgccgaagcgctttccgacgtgagcgataaccgacgcggccttgagtgtgttgatgttacccaacttcacaacgttccaagtgccatacttctgctggagatattcgaacactagatagcgatgggtatcggcgaagtcgatatctatatcgggaagatcggaacgggaaatgtcgataaagcgctggaagagaaggcgatgcgggagcgggtcaacctcggtaatgcccaggaggtagcagaccaaagagccggctgaagagccgcgagccgggccgaccagcatatgcttcttggcgaacgcaaccagatcggcgaccaccagaaagtagctgtcgaagtctttcagctgaatctgcttgatctcttcttggaatcgatcctcatactcctgggtccattccttgatgtggccgcgactgaggcggtaggcttgcccctcgcgagccagagcgacgatatcaccatccaagtggatcatcggcgccttcgccagtttcacatccgccaactgctcgactaccgcacgagtattggcggcggcggcatcgaactcttcgcgagtcatgatgtggcgtaaacggctccacaactcctcttcggtggcgatgtggcgaaggccgaccgattcccgcaccttccaggccgacgcgaaatcagcatggtcgatggacggcatgtcgttgtaagaggtaatcaccaccggctttccgaatgctctggacgtctccatagcaccgtgcgcggcgaccatcgacgcgggattgatgtcaatgtagtcgattccggccagatccagatgggcataggcctcgccagcgaatttgatgacgccgtcagcttcctggaattcttgcggagtcaatccttgattctggaccgacttggaagtcaagcggtagaacttcttggtgtccttggcgagcacccaggctttgagcttcagctctttctcgccatcgtcggcgcatttgatcgggatttccatgccgaatccgcgaggcagttctgccttggcagcggcttgttcccaacggacgtggccccatgttccatcatcgacgatggcgacgaatggggattcgatctctttggcgcgctcgatgatctccgggaatcgaccatatgcggcgccgtaggagtaaccagagcgaacgcggagctgagggaaagacatcatgcggcctccattgcttgatatgcccgatatacgcccatgcgcttgcaaacttcgtggagcagccgcacgtcgtcgagcgcccggtgtttctgtacatatgggccgcagtagtgctcataaagatgctgcagccgcatgcggtggccgaacaacggcgccgactcttccacagtacagatatcgagcgatgggaaattgacttcgtccaggccgagcttgccgcgagccagatcgcaggtaagcatgaacttatcgaatggaaggttgtgagcaatattcgcgtcggctctggaaaagaagtcgcgaactttctgacgctgatcgaggaaagatgggtgcttgatcagatcttcgttcttcaaccctgtgatcttggtgatgatttcctcgataacgattccaggattgcagatgaactctacttcatccaaaatcttttcaccatcagttatcacgccggcgaattcgatgatcctcggctgcttcctcaaactcaccctctggtggaacgggagtcctgtggtctcagtatcccacacggcgaatatcatgtttgttccctcttatgtcgaaagggccggctgctttcgcgaccggcctgaggagtataccgcgacggctgaagatttacgccttctgtccgtctttcggcgtgatacggccggagcgcatggtggcgtggacaaacgccgaatagttgatcgagtccaaggccgaatcggcatccttgaacccgctattcgccaggcgagtgagtttgcccaccatgtgcatcacgaacagggcgagtcgatggtcatcggcggttttcgccaccaggccgttcgggaagaggatttccatgatctttccgtacatcagatcattgcgaccataggtgctctggcggtcgcggaagacttctgctgcggcgtacagattgttgagaacatcttccgcgaaatcatctggatgggaatcatcttcgcccggccagacggattccatggcgaacggcgcggcgtcttcggtcgggtcttcggactgagccgtttcagcgagcggagacggggctttcgcaaacgcctcgtcgagggtaggggcggagttcggggctgccgggaacggctcgtcgagggtaggggcggagttcggggcggccgggaacggctcgtcgagggtaggggcggagttcggggcggccgggaacggctcgcctgccatgtcgttgggcgcgctatcggggtcgctatcggccgcgacggcgaagaacggcgcatcgcaaccttccaggttcaggatgtaggagtcgatccccaggctattgtaggcatcgatgatgtcctggcgatcatcgaacgccgcgacgatcttggtgacgccttcgattttcttcagtatgtcgagcgcgactgcccgcttgaactgaggcgccggctcggtgttaccatacggccgcatgatgagttcatactcgcgatgttcggcgatgccgagttcgcggtggagcttggccctggtctggaaaaagtggttgtcggttcggccggtgacgaagaaaatcatgaggtcggcgtcgatggcattcctgatgcgacctacagcgtgcgggttgagagtgtccttgtcgagacgagaatgatactcgtcccattgccgttccaaggcgaagctcttgcggtggctatcgtcgaatacgcagccgtccaggtcgaagatgatgatgccattctttggtttgcgttccatattcagatttccttactggttgctttctgggtgacggttttatcgatgaacgtcccatcagaagtgaggcggaaaacttcgccattctggatgaaatcgaacgattgcacgttcatcgtgatgcgaatggattcgctgccgttggtcacttcgacttgtgcgatgtcgccaactttctcgacaatgatcttcatgttacatggacttcccattgacggccacagggttggcctcttgtttttccgatccccagaaatcgcggcgcagttcttcctgctcggccgagcgatccatccaggggcgatagaacttgcactggtagataggttccaacggaacatcaatcacaggaatctgacctggctttgtctccagagcggccatgaaccggtcataggatttctgctggatttcctcttcattcatcaccttcgacccatagcgcgggaaggcgcaggagccggtggcgacgcagtgcggctggagcaggctgtcgaacataggatagacttccagaaccagccggcgcatttcgcggaatacttcctgatattcaccctgggtccgaacgcacaggcgaaccttcgccatgtcgctgagagtccgcagattgaacttggccgcgatcttcgtttccatgttggaagggatgatggcacgagcgtcctggagcgacgcgccggcctccagaagcttctggtagctggtttgcgcgtcggcaatggcgtcatgccacagacggttcagctcttcgcggacatggtaggtcgggtcaggctcgccatttaccgtagccggttcgtcgaattcccagcggaaggcttccggctgaacgacggcgctgatttccagagcgcgactggtttcctgctggtaagccccggtacgggtccgaacgagttgatgggtgaagttcttgctgacaccctcgatctggaaaatgaagtccacgaactcgaacggcgagcggatggtgtccagcatgtacttccagtggtcaagcttttcggcctcggtcatggtcgccgggtcttggccgcgcatgcgagtggatttcgtccccaggagaagttcccaggcgttctgggtgtaactgatcagagaaattttcatcagaaatcttccggaattggcgtgaagtggaattttttggttagagccagggccaggccttgggcttgctctttacgaaggccatactgctctatctcttccttgagcagttcgcaggcctccagacgcgactcatactcttcagcctcctgaacggatgagaaaacggttccatcagaggttctgtacacaagttcaatcgacatgatgacctcagtagcagcggatgatttcggcgcggatatctcgacggtcgaggtagtgctcacgaatcttatcgcgggcgcgctcggcctcttctcgactgccgaacgacaggttgaacgaagtgaaaggcttatcgtccaggcgcccatcgccaatcaggtacaggatgcctaccagcacgaaagacggcgctgtctgtcgcgtttgcggcgggtcgatttgcatttcgaggaaagacatgggaacctcttcaggatgatctggtgcgtacattaatagcgctcctgctgagcagctacggtttccggctcatagatgagcatgtcaacgatttccgggcactggcctttcacccagtcgatggccgcgaccagtgtggtggaagcggagaaagagaaagtgcggtaagactcatggatgtacggcgaccccatcgaatcgcgctcggtcgtgcgagaaatgactgctttgatattaacgatccggcccatcttcggcctccactttagcgattatatctgacaggctcagcttctcgccattcaggaaataactggcgcgaaacttcctgtcaccctctggcccgacgatccgggccgttatggtgagactcccgccgccaagggcatcggtgtccctgaagaaagccagcagcgcccgcttgagcgctgcctcgcgaggatcgacggccattaacctaccacgttccagccgtgctgagcgcaccaaaccgcaccggcccctgcaggaaggctattcagaaggaacacaggagtcaggcgaccgtcctcggtcatatgtatgaagtagcgggcgccttcaccgagccattcggccttggcgatagcgcgttcgagattggccttggtggcgtaggttttggtgtggttcttgtcggtggagaaggttacttcgcgggccatttgtcgattccttttggctgaagggtttcgcgtttcgatgagggaatattacgcccacctgatccagaagtaaagcacttttgtaaattacttcacgaacatctgcttggccttctgataagacgaagaagtcatcaggcgctcgatgacgtccatgtccgaaaccagatcatccagaaggacattgcgccaggtagcgaaccggccgagcgagaagatgccagcctcatgggtgagattccagatcatggattcgcgctcgtcgcggccgagaggaacgattttgcctttggtctggatggtcggctcgccgtcctcgattagctgtttccttctgatcccgaaggccgcgcagacttcatccaggtcccatgccggattccattcgatggtttcgatctcaccatcagcattctccaaaacgccattcgcgacggattccacgatcagagtatcgccggtgatggacgcgcgaaatgtcccgaagtcgggactggggaaataaacggtctggaagacgtcacaagggatggaaagcttgtatcgactcacgatgatggatgtgcctttaccgaatgacgggtcgatacccaggtccatccccgccgcagccaggttggcgcggaacggcgcggtgcttatgacattcacatggtcatcttgccggcgaaggtactggaagaaagaggcgtcgaaaggacgactccaagtgatgcggttcgccagcttggcgacaagctgctcatagaagtcggccggtgcgatccaacgcttttcagtcgccagattccagatggaccggtccgacaggccgcccgttactttcctggagtacatgttgcagtggtcgatgcgcggctgggaaatgaattcgccgtcgatgtagatagctttgtgtacagtgacttcgcggaacgggataccggtgagttggccaattactggcgagcggaatcgcaagagtgcgttgtgacgctccttgttctccggcgtcgccgcgtcgatgatttgggcttgagggaaacgatgcgcggcgatcaggccggcgagtccagcacctacgatgatgactttctgatcaggaatcatgatgtgttccttctgagtgtacaaaacttgagaggataaaaaagggacccattttcatgagtcccttgaagagctagacgattcagtctcagaagagcggcggcttactcttcttcaccatcggaaccgtcggcgccctgatcttcaccgtcgtgctcctggccttcatcaccggccttctcgtcatcgccctggccagcttcgtcttccttcgaagcgatggcaaccagatcgacccagcccatgacttccagcttgctcagatagctgcgaaccgaggctccatacagcaggtgtgccactttctcgccaaaagcttcgatttctaccggctcaccgacggcgcagttctcgttgatgtaggcaaacaccttgccgcgaatcgaaatggcctgcggggtgccatggccgtcgccggtcgggatgaagtgggtggcgcgagggcgacgcgagccgttggacttcagttcctcgcgacgggcttcggccttcgcacggcgctcttcctgctcttccttgcggcgctgcttctcggcttcgcgctcggccttcttctgctcggccaggcgcttgcgctcttcttcacgagcgactttctgggcttcctgcgcggccttcttctcttcggccttcttggcgcgctcggcttccttctcggccttcttctgctcgcgctcggcttccttcgccttcgccttctcggcctgctcagcttccttcgccttggccttttcagcgcgctcggcttccttggcggcggccttttccttcgccttctcggcgcgctcggcttctttcttctcgcgctcggctttgcgcttctcttcgcgctcggctttcttctgctcggcttccttggccttggcttcggccttctcggcgcgctcgcgctctttacgttggcgctcagcggccttctcggccttgcgcagggcagcggcttgttccttggtcagctcttcgccttgggtctgttcgttctggtccatgttcttactccgggaatgtttgaaaggatggcttattggcctgtgagaggattatctctaaactaattgaagaagggaatacctttcgcctgaacttctctaaatatttttctttcgggaaagtccagactccagggaacttatttatgttagcgaagtttttaactcttacgcaaaaacaacaagtattcgattgcgcgagttatcccagtatacatcaactgactataagggatggacggcaagttttcttctaacatggcaacccgtttccattctgaaccctgcgacttgtggaacgtcatcgcccagccgaagtcgaatccgccaatagccttctgcgcctccagccgcacgtcttcctcgaccgaaaagctcagagggttgaacttcacccatcgttcatagttcgtgccgataatgcgaactttggcgaacaacatttcatcaggctcgtcgtcatcttcttgcccttcaggaactggcttgaagtccagcagaatggcttgttcgccgttcatgattccatattcgtgctggttcccagtgcacaccagcttctcaccgattcctggctgcacgcctttgtagccgaggattcggcgagcgcgtgcgttcaagcgacggcgagtattgttgtaagcgcaaagaatcacaccatcgttgtccaggaacgtccgcatttcatcatccgacatatcgaagccggcccggaccactatgtcatcatactcgcggcagggcaggcgctttccctggcggacgaacatcgacgcccgaacgatattgccggcgttgcgctcgatttcggtcatgatggtatcacaactgttctcgtggaagatctggacgccgcgcacaggaggcacctggccaaagtcgccgatttccaggaccggaattcggtgcgacaggaggcgctcttcatcccactcgccgatcatggacgactcgtcgagcacgaccaacttcggcttctcgtcgagcgagtctttgttggcaaacatgatttcgccgtcttcatcttcgccaatcggccgatagatgaagctgtggagggtccgggcattggtgcagcccttctcgcgaagccgcgctgctgctttcccggttggcgcgacgaagaccgtccagtccatcgagcagcaaagttcggcgatgatcttcgcgatggaagtcttaccagttccggcgaaaccagcgagtcgatagacctggcggcggtgcgctcgatcacaccaaccgcgataccagtccacaacggaattgatcgcgtcgatctgctgactgtttggtcgaaagccgaatcgctcttcgatctgatcgacggtgaagttagatgctgacatatttgcgttctccaacgctaggtttaattgaatcgaggctcagtttaagcacgccgtccacagaccagccagtatcacgacgatacttgcggccttgcgggtcgacatagaagttcttcgtgcgccgcagcagaacataatgccaagcagctccaagcgcgtggacccttcctttatacgggaaagccttcgcctgctctgcggcctctttggccccagggagccagcggacggtagaaaggaccaggaccgcacccttaatagcctgggaagcggcgcggccgtcctgtgggctatagcgatgtctatcgaagtctacccagtggtggttgccgcgccggagcttgaccgttcgggatcgcccctcgaacaccacagtgccttcgtgagttaaaatatgttccgccatcgaatgttcctttataacgtacagttatgctttacctctgcgcaggaagagtatactatcagctgactcgccaaagcgagcgaatttaatccaactttacttcggcaggaaagtggccgatactagagccgccgcctgtactgccctccaaaacagaggatacattaaatgcaagaatgcaagatttcccgcgaccaactcccggtcggtaatccgaatcccaatgtcgacaagacccgcgacccgaaccttaagcccggtttcctgcgtcgcagccgcgagctggacccggcgctggccgttcgcatccgtcgcgagctgatccacgccgaagcatccgacttggccaaggccggatgggtcaattcacagtccagcctttatggatcgaaagccttcccgcgccattccgtcgttcgcgtgaccggagttccggaagatggagctttcatcggcatgctgatcggcttcatcgagcatcgcgagcatggcgaatgggcggtcatggaagccggaacgaaagaaggcggcgccgtcattattccagtcgatcacatcatgcgagcgtcattcgccgaagccgaagagttcgccgaaaagtgggagcggaacttggggtggcgtctcctgcgccaactccgcgagtgcggcgccctggccgggactgaagacgagttcctgcggcggatcatcaatcgatacgttcgtgatcgcacgatcctcgatcaccacaaagtcggcgcggacaaaacctatactgatgcagtactcaaaagcatcggcgaaacatggccgaagattccttcggggaaattcgtcggacaccgagtcgcgcagctcctgatcggccacaagctaggtcgagcggggaccatcctgaatgacctggtggacttcctggagaagttcgcggccgggcgcgataaaattctcaacatcgccatctgtaattgaggtgaatgaaatggttgacttggaaaagctgagtccaaagctgagtcctcggcagcatgccgttctactggagatgtacaggcatcctgagcatccagttcacagatcgccaacgaatttaactcttaaggctttgagacgaagggggcttgtcgagctatcctggaaggattccgtggctggatatatgttcggtcgccaaccttgctggaaaataactgatgccggcataaggcgaatcctgggagtgctggggaataatatggaaaaagaacaaagcgaagatcgcccaagcatccctgagtttgagaagaccgacgccaacaaactctatgatgctctggagacgatttcgctgctggagaagaagttggacgaatccgaaaagcgcgggagcgagctggccgcgagctattgtgacggcgtagtcggcgatgaatacggccatccttattgtcgttataaagtggaacgcgacgccgccttggccgaagtagagcgcctgcgagaatcaaaaggcgatccctctggcagcttcgacaggtgtatgaagatgatgtacgagcgcgacgagaatgcaaaacgactcgacgccgccttggccagggtcgcggagctggaagggaagttgacggactgggtgcacgaagggttccggctcaacgaggcgctagcggtcgccaaggctcaacccagcgtgccggaaatatctggcatcggtcgcgatgccgaacatcccagagctgtagtgctgtatctgcgtaacgaacccagcgatgaagatatgcgagcaattcagaactttttgcgcgccatggccgcccccgctcagcacagcgtgccgaaagcatggctcgacgttcaggcagagcgccgccggcaggtcgaggcccaggcgctaaggcaggaagtcgcagcactgcgcgcaagggcggatgttgtgccggaggtgttcgggcttgagcggtaccgcgtagaaaaaactgggaagggtttctggccatactgcgtgcgtgcgggggatggaacgcgtgaactgttcgtcggccacttgaagcagtgtcagcgggtagcgaccgaattggctacggcgtttgaagatgggaagtttatcgccgcgcccggcagctcggctcagcacagcgtgccggaggggtggaagctcgtaccgatggacccgacatcgcagatgacctatgtcggtcagtccctgcgttatgacgcggtaaacagcatcggcgagatttaccggcaaatgctcgccgtagctccctcacccatcgatccggccgcgcatcctcagccgtgccagcaaccacaggcccatcctgcccgctgcgggtgcgagcggtaagtgccaagtaaggaattcatgtaatggaacagaagaaaccttcaccagtagatggagtcatcatgaccagcctcgacgttctccggaaagcacagcccgaagcccaggacgagtatgccgtgtccatgttcgcaacggcgatccgccagaaaatgcagcgctcccgcgataaaggccgaggcggctggatcgactgcgacgaagatattctgatcaacggattcgccgaacatgcgctgaagggaaatgagaacaacctcttggacctggcgacgttcctgatgttcatgtgggtgcgcggcatcgacgatgcgaagattcccccggcgctcgaaaaggcgcgacagcacaagatcatggaagcctggagtcgaatccatgaagatggcctaaactccgccagaaaggcgagtgctgcgcgacaattcgtggaagtgcctcgacgcaaggggcgcccggagcgacttgcatgaagcctcacgaaataagactggcacaggccgaagagttcctgcgcgaactcggccgagggattccagacgacgaacgggtgatggtcggctacgctgaagaggccacagtccaaaccgacgagaacggccgcaagctcaacgccggctggtggcctgtgccctggaaggaagggaaatacataaactcccgatccaacgcctacgcttgcatctcgtcatccatcaagacgcccaacccgaagaccggccagatgcgatactggcgcggcgaagcctctttcggccacggcctggcgttgatggtcgatgacatcggctcaggcaaagggtccaagggcgacttcgaccgcgacgagttccgcgagcgactagagccgaccgcgattgtagagacttcgccgaacaactaccagttctggtatttcttcaaagagccgatgtcacacatgctccagttcaaggcgctgctctattcgttcgtggaccaggtgctaaagaaaggcggcgacaacaccgtcaaggacgtcagccgttacggccggatgccattcggcttcaacaacaagcgcgggaaagacggcaagttcaaatatgccgacgaaaacggcaaacccgaactcgtgcgcctgtacagcgccgactattccaagcgctactcgccagaggaaatcgcgcaggccttcggcgtccgcatcattatgccacagatgaagaaggtggagataaaccgcgacgattgggtgtatgaccaagtatggctgaagtatgccgagcacatctgcacgaaatacaagatgggagaagcggcaggcggccaggtccagcagaatatgtccggcaaataccgcatccgctgtccctggggcgacgagcacaccaacggcgatcctttcggcgcatactttcgcggaccgatacctggcgccgagcacgaatatgtgttcggatgcgggcacgatacttgccgcaaagagcatcgacggacatgggcggccttcactgatgaagtcgtcctgccgtatattgtcgaacaacttgaacgcatcaaccgccgtcacatcggcgaggagtagtaactatgcaaaatgatcctggaattctgattaccgccatcggctcattgcttctcggccttctcgtcttcttcgaaggcctgaatggatggaaaataccagcgtcaaactttctcgcgtcgctcctgtgcttcttcgtcggcctttctgctttaacctgctggttcgtcttggcgtttgacgtgttttagtcgacgaacggtccggaaatttcggatagggacggaacttattagctctgccggtttaggtaggagataatagccgtccctttcgcctcaatatgtagaggcggtgttatatccgatcatgtaaagcagaaggcggcaaacctaacatgattatcgacgacgacaacattcttggtgatgataatattcttggtgatgacgaatcggggtccagtgagttcgatctcacacagatagaagatgctggaatggaccctttgatgaccgccgcaagtaaggcggccgatgatgcgattgcgaggaacgaggcgcaccgcgcgcaaaaggcggcaagatacgccgaggcgtatgctgaaccagacttgaggaagcgagcgcggttgttgatgctcgaccaggcctttgatcttccggtcagccggctggtgaaaggaccgttcgatgactttatcaccaagtacagctcgacttcagacagcaactacctcgcggtctatgatacgttgttctgtaagggcgacggaaccgtcccccacccgcacttcgacgagtttcgcggccggctggttgaccaccgaggcgtggcgttcaataacaagaccctcgaccccattgacctgatgggcgccctcgcggctgcggccttggacgatccatcgatcaagaagacgattgaaacttgctgcgtgtgggcgcgtcgatatcgccgcaactctttgatcgaaacgtttgagaagaagataccggagtgggatggtgaagagcggatcgacacgctgctgatcgacttgttcaaaccgttcgacaccgagcttaaccggatggtgagtaagtatttctggctgagcttgtactgccgcatcaactaccctggaatctcagcgccgatttcgctggcgttgattggtgggcaggatgctgggaagacttacttttcaatcttgatctgtaaagagttgtcgagcgaccgaaagttatcgccggtccagcttgacctgagccgtcatgaccagacgccatttttgcgcaatatcactggcaactcggtgatcgcgaacgtcggcgaaatgtccggcttcaaaaagggcgacatggaacgcattaaagagttcctggtgcgatccgatgatactttcgatcagaagtttgaaccaggcgaaactatcagtcgacaatggatcaccatcatggacggcaacggctatgatggtcttcaacgggatgagtcaggaaaccgtcgattttatccaatgttcgtggcgcaacttcccgacgaggatggcaagccgaattgggttaaaccgggcgatggaaatgaaactttccgcgttgacttcacagacttcggccgcaaattctggcaagccatggctgagtgccgcgcctggattaaggcgaatggcgtggagggatatctcagtctagttcgggcgaccaacaacgaagtccagaaattctctatttcggaaatggagaatgcgcgtggcgtggttcgtgatgacacgattgatatgtatctgatcaacgtgctgatcagttgcgagttcgaagagatcaagcctggcaggaattcaaagaatcctggatggagagtcaacaccatcgaaatcctgaaatggttcgatattctcgccaggaagaagccgatttctcgccacttaactccgcacctgaaggcgctaggatttgttccgaataagaatggcttgaatggctggtgcctgcctgtagataaggttgcgcctggatggaccagagatatgcacacgacgttgccgccgttcaatgatgtgcttgtatacttgctgaggaaggttgattctgaggtgactgatgaagaggcaatgattcaaatccgcaaagttaaggccgagcgcgcaaggatattgggtgaggatttctgatgtagtgatggagtgtacttggactaggccgccttcgggcggtcttttctttggtgcggagtacattcgatttcggttgtggccgagtgagattcggaagctatctggtaattagggtttggtggcgatggcgcgttgtggaaagttcgtgaacgttggatcaaggattttgtgcggtgattggatgaattgtggaaaatcgacgattctgactggatttttggggtcggccgcgccggtcttactggtaattaccgaaaccgggaatttgggtcgagccttagtgccgcgtgggcttgaagcgcttattcggatacttcccggtttcggatgcagccgcaaaagtatactacagcgaaaatcgattgcac

SEQ ID NO: 2 - DNA, 66657 bp, Pbunavirus
  source 1..66657: mol_type = genomic DNA
aatcctaatagaaaaaatctatcacggacgttacctatctttaaaattaataaaattaatagtaatttggtaatttggtaaactttagtatttgaaagcctcgcggcactaagcttgtacatatcccgtcaagtttccgattccagctagctcgcggcagggtcgccggaaacttccggacttccaatccatgggtcgcggcgacaccacggcggactaagcggcaaggaccaaaactcgacgaacggaaccggaaatttgggagcgcgatagaatcgctcagctggacatatttctaacattcgatttaacactcaatccaaacactcaccaccagcgtctcccgccaaccgccgattcgatcctcacccaccagcggatcgcccgtataacatcctataacaccacctaacactcattcatcatcaaacccacccagacctacagcccacccacaagcagcccatagacgcgatccctggccccatagtacaatcgcgccatactcagtgtcgcggcagagcaccaggggccatccgccaaccaagccaccacgacgactccagaatcgaactccagggacgcagcaccaaatgaccaaacactacagccccgacgatctagtcacgccacaggaattcgcagacccgcatttcgcggcgatcaaccaaaagcgattcgacctgtacatcgacctgcgcgtccaaggttacagctcctggcgggtcttccgggccatctggggcgaggagcatatggacggtcccgcgcaggcccgcatcttcgcgatggagtccaacccgtactatcgcaagcagttcaaggccaagttgaacgcgaccaaaacgtccgacttgtggaacccaaagacggcgctccacgaactcctccaaatggttcgtgaccccaccgtcaaggactccagccgtctgtcggccatcaaggagttgaacgttctggctgaaatcacgttcgtggacgagtctggcaagaccaggatcggtcgcggtttggccgacttctacgcatcagaagccgaggctcagaccgcgaccgtcgctgctgcggccgaagccaatggctatgtgccggaaggcgaagagggcgatttcccgtccccgacgccggaaccgaccgaggaagaccgcgccaaccccatttagacataaaataacatcgttctaggcccgaatcggaccgaactaaggcgaaggtagcggtaagggacgaaaaacgattctagggcggttctaggaagttgaagcctaaccctcagaacgacaaagccccggactctagttcagaatccggggctttctttttgggcgccttactcgccagcttcgatgatttcgaagttgtatttgacgccttcgtgctcgaaagtcatcttgccagccgccttcagctgcatgcggaagcggatgtgtttcgaagaaggcaggccgaactcgatgaatgctgcgttggtggaccggaactcgccgcgcttgccttttacagtcacagccacgccatggcgctgggtgcgtttcttggaaacttctgggtctttccaggagttggcgatggctgccgacaaatccttggcctctttggctttctccggcgcgttcttggcctcttcgcgcatcttccggatttcttccagcgcttcctcttcggtgacttcttcttccggcttcagattctcttcctcggccttctcttcttccttcttcttggaagtgcgggtcttgtaaaccttggccggggcttcctcttcctggaaggcctcttcctcggccggcagagcattcaggatggcgaggcagcgacgctcagcagtcttgcggtcagagaagcgcttgacagtcgcatcagcgttgtgagcgttgtagaaagcgaccagttctttcatttctgcgttctggatgtcgccgaaggttttgatggagttggtcatcttgcgatcctctgttttggaagatttcttttgggcttcggtttgtcgcccccgttgaaagagattatgcctaggtcgatgctgcgtgtctacatctatttcatcagattgatcacaaagccgacgaacggttgtcggatgtgaaaacaccgcagagcaggctgcggtgtttgttggtgagggcgatggtcagaaagtcgggatcgtgatcggctcgatgggcggatcgccgggcctgtcgttgtccgatgcgggcgccgggttggacgggattgcgccggaccgaagctccagagattccgactgcctgctcacctgcggagctggaggcgcctttggcgcaggaggagcaggcgggaccggcaggcctggaggcgccatctgcgtcatgggcggttccggaagatcgggaaggcttggcgctatgctgccaaaggaccgctgcgactgctgtgccggattttcgccgaacatttcggcggatcggttgtccttgatgacttgacctatggccgtcttgtcggcgcccggttctgccggatcgaagccagtgaatggagtggttgtgcagcgcatgttcggatgggtcggcagattgttcagggcgatggagtccgcccagacgtacgggtttttatgcttgccagggctgtggctgatgatctcggcaggaatgtgaccgttcctgttcagccatctcgccatctcctgccgattcagagggctggccacgatctggccagtggaatcttcgacgatagcgaacagatcaccgagtttgaatccgatgattgtgtagttggacctggactcgccgacgaaagccagggtttcgatgttgtggtagatatcttggtcttcccagatgtacagcatggttcactcctcaataaggctgcttgttgtgttcgaccagagacataccggccggaactttgaagcggatgtattcgatcatcatcgcggttcggcgtttgttggcgccggattcgtcgttgacgaagagttcgcattggtgcggaatgactcgcgtcaccaggtcttcgcctttcgaaccgtagaacttgatgtaggctgcgacgcctcgcgtcatgctcagatggatcgtttcgcagagtcgctgcgcggccgacgcgctggacagatcggtcggactgaccgtcgcccagtaatggccactttgttctttatcgggcataagctaccctccaatgagaaagcctctgccgaggctggttgttagtcgagccagtcagtcgtacttcctgccgtgaaatgcgtgtccgcagccgaagattgatctgtatgcgttgattgaattcctgttcctttcagattcgatttgaatactgagcatctccagctcgtatcgggccagtccgccccattcgcgctcaatgcgtgaatactcggcctccagttgcctcaatcgttcgctcatataacctccaacaatcgtcattaatcgatcaacccctgccgaaccgcagaggctggttgttaatcgcgcttcagcaaaaccactttctcgtttgcgcgatgattcctgtgccagtcttcccaatagtctccgcactgacgggccaactccagagtgacatagccgtcgtcgctgctacattcgacagaaaggacaatcgcgttgcctctggactcgctgccagacccgaatccgatcagaacttcgtcgccagttttcagctcatctgccctgattactttggccatggcgttctcctattgggtagcgccgcgagggcggatcgggtcgatgtcatgtaagcagatggtgggatagtccctggccagcttgagcttgaagtccacccagtcagcaccgatgagcgccgcgacttcgatgcttactttgcggtgcggcgcagctccagatcgcaggactatagcccgacgccgaacgggatcgttgacgtcaacatgcgtgagtatttcgtcgccgacgagcaactcgcaagccatcaatattttggccataatacactcctatgaggaggcgcgcccaggacgatcccagccgcgccgatggattaacgtttgtgaaggatggacactgcgtccacgtcgaggatgctgatggtacggcgacggcgcggattgctgcgttcatggatgcgaatcaggtcagcggatggcgcttcgtgcaccacccatacatcctccggcttctgcgtccggagcaggaccgtcacttctgtgttctgggcgaggccgttgcagatgaacgtgaacttggacgagggagttctgtacatttcgagattcctttttggacttcgggtccggctcctcagccggtgaagagattatgcctgatcatcgcagtcgagtaaagcacttgtgtaccaattctccagttaaatggaaccaaagcgcggtatcgctgattgctacgctcccacgccatggcccttcttgctcacagacttcgaaccacaagctgatttccattctggccaggactcggccgaaggattcgagccggcaccggctggacagaatgtcgacattcacccgtcgattgatttcgtaccggcgaccgttgatgacgaataccaagcgtagagtttgtccgtccagacattcccagtatctggtttcataccgaagccaatagcgcttgctagcagggcctaccatagtcatttaatcgatgctcctggccgcgccacgcggtccggtcggcgggacgggatcgaaccgacccaggatgtagtcgggccggcgcgcttcctgaggacacacggcgagaaggcgccatcctgcgtccagggcatgctggagttcgtccgtgcagcagtcttccttgagcagcagacgattgatgctctggagatttggaccagggatagcagagccggtgaccgagttccagccttcgataccgtgcaccatctgcggctggttgatgtagccttctgacctgccagccaaccggctcgcggccagctccaggcgctccagcattggccgcagagcggcttccgggtcaacatcgtcccagagcaggaccaggttgatgatggtgtacggatagtccttgtccagatcccaggccgaagcggtcagacggcccaggccgatttcattacacatcacgggaacgtcgttgctccaggtggacggctcccagttccgctcgccaggattcccgattgttacgccttccaggttccccaggagaacgtggagcttgctgacatattccgcctccaaggctttccgctcttcgtcggtctggttgtggcgatagaaggatggagggctgacttttgcatggtagagtttcataactgttcctcggttttggaaggcttgaacgttagagaattgtgtcgcagtatttctcgaaaggactctggcgcttcttctcgcagatcgcacaggtgatttccaggtcgggcagctcgctgtaagtcttgccgaggtacagccagcgcttgcacaggctgcgaccgtccgacgtgaagaaatggactttgcgagcgtcgccgggttgcgcccagccgccctgatagttttcgcgcttgctcatggcgatatttccttttggatcgtggatccatggtgtacgttcagtcacccaaactccatctacatagatcaggactgacagagcagtcgcgccaaacccgaagcctacatagaatgaacctggatcgatttccatggtggcgctattagtggcgctattgcaatcgacttcaaagtcgaatagcgaatgaccaatcataccatcaccatgtcgatttcattgacgaagaaatggacatcgacaccatcggcgctgccggtgtaacgcagccgagtcgtcccatcaatgtgggcctcctcgacgccgacgacttccaggatggtgtcgttgcagtacagtttgacgaacatcttgatgccagagccaatcgcctcgaaggcgatctgcttgtacaggtcttgcttgatcatgctttacgctcctgtttgcggatgtattctgccctggcttcggcttcgagcttcgcccaaagcgcgttgtcgactggaccccagggacctgtctgagttccgtccaccggtgcgaacttgccaccggcgcgacgatacttggacagagttctcagaccgatgattttctcttcttgggaatcgagttggacgatcacttaacatacttcccgaagtagcaggtgtggaggatttccaggcccttggaaatggccttcagcttgataccgaaattcttgatcgcccagtccagatcgtggtgatagaactcgatgatgttgacgatttgaccggcgctgtagtggatgacgcgaaccttgccattccagcggaaatcttcgcggctgtttacggcctcgacttcgatagtgtcatttctgccgatggtccatttggagctagtcatgtcgcaatcctctttttggagcgtttcgcgtttcgatgaggtaactatacttcagtcacctcatcgagtaaagcccttttgaacagattgcctaaaatttctggaagacaaaatcaatcggtcgcgtcatcgatagcgaacgccgagcgcgccaggtcgatgatctctggccaggtcaaagtgaaggttttgccgtcatcgagaatgatgatgggagtccgcagcggctcgccaaccagcagttcgtaggaatgtttctcgctggatgcggagccgatgcgggtgtggagggtgagttaggccggggaaatctcggccgccgtaaaggccgcaatgcgaccgctattcagcctgacgaacaccgggaatgcgccgccctcgcgaatctcgctgatcacgccgtggccgccgccttgcgcatagacattctgtccaacagacaattttttgaggatgtcgctaaaaactacggttttcatcgtcttgccctcggtgatgcccggcgaaccgggcggggtttgctacagcatgcctgctttgcgttcggccttgatggtgtataccgcctcatcgaccagccactcttcagcttccaggtaggctttggcgacttctacggttacgttggcgaatttggctacgttctggattttggcttgcttggtcatttcgatttccttttgtctgaagggtttcgcgtttcgatgaggtaactatacctcagtcacctcatcgagtaaagcattttcttcagattatctgaaaccttttgaagccaggaattgccgccagagccagtcgatgtgttcgttgcagtaacgctcgccatcggacgacatagctaaggcgccatcattgatgccgaagtgggccgcagcgagacattcgaactcgaactggagcgttcctgggcgagggatatgggacatggcgtatttctgcacggtcagtgatcctcagaaggtttcgcgtttgcgatagccgctactttctgcataccgaggcgatagaattcggcctcttccctggccttggccagattatccctggcttcgcacgccagcttgtactgattgttggcattctggatgcttccgtccagactcctgtccagttcttcccgaagagccttctgcgacgctagctcggcctccaaatcctggattctgatctgaagctggcgattcctttcagacatctcgttttcgcgggcgatggagttctgaaggcattcgtcaaggcgagtattttcgcgcaccagctgatgcttttcgactttcgcctttctgcacgtctctcgcattgctgaaagctcactcgcatgcagatcgtcatccgggtctttacgctcttccttcgactccatccgcatatagtactggccggctgcgaaggcgagcactgcctggtcggcatacgctgcggcatcggtcatgtatctggatttgtagcgaggcagaaacttgcactcctctggatcccagaggagactatcggcaataggccagaatttgcggaagccatcaggatcgacttctacattgaccatttgcagctggccggcctccacttcgacttccagaggaacctgaatggtgccggtgatgtactggaagtacactatgctagacataacacaatcctcataagaagttgcggccaggaccatcccagccgcatcgtaatcactcttcgccttcgtccgcgctcagccactcttcgaaggcgaaatttaccttcgactcgacccaatcctgcagctcatcggcgaactcgtcactgtcgatgtccatggtgattcccataacttccatgttccatagcgcggcattcagttcgaactgtaccatctgctcgccatcgacttccaacaggatgcggtctgcgacttcatagtcgtctacatcgaacagatggccgcccgccaggaggtgctggacgaaagcttcatcgaggttggtgacttcgatctggacttgtttggtcattttcgtatccttacttagcggctttgaattgggctttgaggttggcaagttcagctttcagatcgatcatcgcctgaccgcgcaggccttccatttcagcctcgctgattgcgatcttggctgcgcggattttgtcgttgatttgatctttagtcatttcggcttccttttgtttgaagggtttcgcgtttcgatgaggagattatgccgatagtcagaatggaagtaaagtgtctgagtgaagaaatttctgtacaccgacgaacggtcgcgctcgactgtctgctgcggtgtcgatatactcggcctattgcgaacgatggactgattaaatgttcaagctcaatcctgcactgcgagcggtctggcgaactcgtgcccgttacaaagtcatctatggcggccgggcgtcttcgaagtcgcacgacgctggcggtatagccgttttcctcgcggccaactacaagctcaaattcctctgtgctcgccagttccagaaccgcatcagcgaatctgtctacacattgatcaaagacaagatcgaaaactcagagtataatggcgaattcatcttcaccaagaactccatcaagcacaagattaccggctcagagttcctgttttatgggatcgcccgtaacctgtcggaaatcaagtccaccgaaggcatcgacattctctggcttgaggaagctcactacctgacccaggagcaatgggaagttatcgagcctaccatccggaaagaaaactctgaaatctggatcatcttcaaccctaacgaagtcaccgatttcgtgtatcagaacttcgtggtcaaacccccgaaagactcctgcgtcaagatgatcaactggaacgaaaatccgttcctcagtgagacgatgctcaaagtgattcacgaagcctatgagcgcgaccgggagcaggccgagcacatttatggcgggattccgaagacgggaggcgacaaatccgtcatcaacctcaagttcattctcgcggccatcgacgctcacaagaaactcggctgggagccggccggatcgaagcgcatcggcttcgacgttgcggacgacggcgaggatgcgaacgcaactacgctcatgcacggcaacgtcatcatggaagtggacgaatgggacggcctggaagatgaactgctcaagtcgtccagccgcgtttacaacctggcgaagatgaaaggcgcctcggtcacttatgactccatcggcgtcggtgctcacgtcggttcgaagttcgccgaattgaacgatgccagcccagacttcaaactgatctatgatccattcaacgcgggcggcgctgtcgataagcctgatgacgtctacatgaagctgccgcacacgacgatcaagaacaaagaccacttcagcaacattaaggcgcagaagtgggaagaagtcgcgacccgattccggaagacttatgaagcggttgagcatggaaaggttcatccattcgacgaattgatttcgatcaactctgaaacgattcacccggacaaactgaatcagctgtgcatcgaactttcgtcgccgcgcaaagacctggacatgaacggccggttcaaagtcgagtccaagaaggatatgcgcgagaagcgcaagatcaagtcgccgaacatcgctgactcggtgattatgtcggccattctgccgatccggaagcccaaaggcttcttcgacttctaaacatagaaaagcccggagcgatccgggcttcgggtcttactcggtgtggttcctggcgctgagtgtcgacgaaacggcctcgccgacgcccagagcttcctgaccggccgcgagcgcttcggcttccgactcgacgttgaagtcatcaccttggccattgcctggcggaacctcgaccagcacggcttcttcgccttcgaaacgcaggtcataggtcttgtcgacggacagaccgtaacgagcgttgagcgcgtcccagagctgggcctcataggtacgcaggtcttgcagagctttctggtggctgagcatggccatgtcaacggcccgttgcagggtttcgtccaggacgttgaaccgaatgcgaagagcacgaatccgctcgacggtttccgcatccactacatgtctttcgatcattgcttttcacctttgctgaatgttacgttgtagccgttgtcggccaggtaggtcagggcgccttcgaaggaagttccgacgaggtgcttgagcttcatttcgcgttgcgcggccaaccagaatgcagttccggaaaactctgcgcggccttcggacaaaaccctgccatcaggcccggcgatccgtacatggacggaagatagcttgatcggcatcagtgaatacctccactggcttgcgacggcatgctttcggcgcgagcggcttcgcagtccgggcagggacaggcttggcggacgcgctccaactcgtcggcatccatgacatagagcttcccatcggcagtgtcatgtgccatagcgatgttcgggaagtcggttgcgctcaggccggcgacagtgcggatttcgtcccagagcaccagatgctcggcattcagtcgggcggcgagcgcttcgtgctctttagcgacgcgcgccatgaactcgtccatccggaatgcgaattccgcatcgatggcacgggccgaggccatggagctgagtcgaatcggttctttcttcatgatgattctcttttggttggtggttgttagctgctcaggcctattacagcctgagcagcatgatgaagatgaacgcaaggaacgcgaacggcacaagtatgccggacatcagctttgacaggcgctgcatctcagcgtatttctcggtagacattccgtgctgcgccgcctcggccgcgaagcgggctttcgcctcgataacttccgggcgcagcgacaggacatattctaaggcctcttcccgcgctttttcggcctcgaccgacctagggtcgcgggccgagacttcgctgtgccctggcctcgcgggatgggcttgcagcgatggagggagttcagcggccacgactccataatcggcacaggcccaagcgatcccaatgaggatcgcgaggatggactggacgattcgcagcatcactttgtcgctagggaagctcatgatcaatcctccaccgaccgaacgatttccatgttgcggccggcattggtcccggcattgaaggcgcgccgaccgtcgctatcgtccagacgcatgagcttagtaacattagacttcttgtagccaggatcaccgaaatgttcgtgaaccgcagcttccttcgccaccaccagagacgttccggcagaagataccagctccatgcgcttcctggtgatggattgaaggcgatagctgatttcctgggtcgcggccagcttgaattgcgcggcaacctttacgttgaaacgttcgtacccttgagacttctgatactcccggcacagacgatcaacggcctcgaccaaggagttgaacatgttcactgccagctcaacgtccgacttgtagcctttaaagcgtacggcatgaccccagcgcttggtagtgcttccgtcgcgggcactcctggacgccttagccgatgctctgtggttgttgacgccaccggcgaaatccatgatgcaatcattgtacgtcgccacggccaccgagaagaacttcatccagttcgggattgcggaatagtaacgagtggcaatttgctcatcgaactcttcgcgaatctcgccggtcgcttcgaagtcgtgaaggtcatatttgtccttcaatttcttcacgcgctcggctgcgatagcagcttcgtgcggactggaggagtcggccgccatggcggtcagtttgcggatgcggtctttcgccttctcgatggcttccggagtgaattcgttctggtcggtcatggtcggttccttttgtctgaagggtttcgcgtttcaatggagctattctgccttcattcagaatggaagtaaagcactttcttccactatttcggcatcgactggaagaaattccagatccaatcacctgctaccagcaagaggatgagggcgacaaagaacaggacggcggccgcgagctgtgcgcccggcttcagcttgggatggctgagcttgggctctgcgggaacggatggagcgttggcgctgcgaccgtcttctcccaggccgtagccgatgccgcgctcgcgcgcatggagcgacaccagaagtttcagatactcggtctgcttttgcgactcttcgtagatgccggcgacggcgaaccagagggcgaacacgacggacatacacacaacccaggcgccggtcagcaggagggccagcgggccgatgacgaagacggtggcagccaggacgattgcgccgccccagataatgaagccggccagaccattggtgatgtcgatacagaactttttcatttgcggattccttcggttacaggattgaggggatttggaactctgcgccaccgagcacatcggtgacgacttcccagagcgtcggcactgaccactggtagcggtcgaagtcggtttcaggatcgacgcccagcgtcacataggaagtggcaggccatttatgaacgctacctttccgcatgagagtcgccacgcggccgtcaccgagcgggttcgtcttgtgcggaacgtacgcagacatcgaatattgctgcccagcatcaacgatgaatctttgtctctggcgcagacatacagagccaacaggattccaaccgcgaccgccgcaggcctggcgagccgaagaatgctcatacccttcatgagtcatttcgccgaggcaagccgagcgatcttcgtaataattgatgttctccatcgatccaaccagcaccagagactcgaaatcgaatcggtgatcgtgaatggacgagtgatggacgcaacgccggcgcggcaactccgggtgccaaacatggaggcgccctgccgggagctggacctggatgaaccccaggccgtgcaaagtgatcttgtccttcagcggatcatggactgtactcatggataatcctcaatagcagaagtgtatggtgagagttacgatggccaagccggtcgcccatagaagggcgaaccaggccatagcttttatggttatgtagatcatccgaagaattttccggcacagatcgggccgattcccatttcgatggacgcgtggttggtcaactcgcgaccgcagcaggagcattgaccagtcttccggccgtaggcgactgccgattccatcggcttttcgaacatcttcagaacgtcgtcgtgctcggtatcggtgcagtcgcgactcttgatgaatttgccattggtgatacggccgaggtagatgtcgcccaggacgtacaagctaccggcgttccggctgtgagcgctagcctctttcaccacaacgatgagcggctcctcgccttcgccagccaggcgaattttcgggcgcttgattccagattctttcgccttctcaaacgccttctcgatgccggaaatgtccagagtcggcgcagcagcttcctgcgcggccactttctcgcgatacttggcgaagttttcgatggcgcgcttcgcagcagcgatctgattttctgtcaaggagccgtatttatacaacgactcctgaaggctctgagcgaagctgaaggaatttccagtccaccactcgacgatgtccgggtgcgcggcttcgaaggccttaattttgaggtcgcgctcttgcgcagcgctacagattttctcgatgcgcttttctgccgccttagcacggctcttggcgcgctgctccgggctggttttgtactctttgtatccgacaccgccgcaggcgaaacaggcgcgaccataagatgaagggccacggtacaggccggtgcctgcgcattttgtgcacttgtcgcgatacagcttcacttccttccgggagttcgggcgggcgcccatggacacgtcttccagcgtcttcggcgcttcgtcagtgatcgctacggtagcgaagtcatcgcccaggtcttcgaagccggtgaacagattctctgctgcgttcatatcgattctcctgtttggaaagttcgtttcgatgagttgactatacgccagaaatggaaaaacggtagcgatttctcactaccgttcgtcgggtcgaagataatcaatagatgtcgctattgatcttgaacccatgctcagcgccgtcgttgtagtcatactcagcatagctgtcgcagtagtcgttcaaatgctgaatgatgcctagaacgtcgttagcggccttgtgccgtttcgcggcgatggtcttggcgatgctatcgccgacttccagggtttcggccgtccggcgatggatcagtagacgactccaaagatagagccggacgcgacgaattatgtcgcgatggcgctccagtcgtccgtgcagctcttcaatttcttgctcgcgagatttcaccactcgtcgaagctgttgaacttccaattccaaatcggccttagtagccatgttcacctcagaaaggaaaatcgtctgggactccaggaagctcgacgattattgttgagcctgatcggtccagaatgcatccgaccgagccggccctgtggggatagggtctacacgaactataacaggtgacttccaggactatccgccaggtcgatcctccacaccatctacagactggtgggcgcttcgacttcagttttcgttcgtccaagacggcgcgtctgtcgcaggaaaggcagcgcgccttaaccgacgtaaccatgggtatagtcgatcattcggatgagatcatcatcctctgattccctcgacttcagaccgcccaaagagtcagactggccgttgcatttcgcatcgatatccatcgaagacaagaatcctgccgatactacggtgatatcaactttgtcgccggccttcttgaagccttcgcactcagcatcgagggccacaaccgcactcgcagccatgttcacatgacttatgaggtcggggaagatcacgggaacttcacgcgacatgccacggaccgtcatcttcaggactacatacttcatactcactatcccttttgtatgtgaggaaagaatttactgttttccggatggtggaagcgctcggccgcaggcggtcttccttccggacattgaatcgtcgaaggcgggaaaaccgcgcaggcgataatcgccgcgaggagtgcagcggatgtcgacatccagagggcggtttccaggctcacccgaacttccggacggcgcggcttcattcgctccaccctcttcccggttcataggatggtagactgccgccgcgaacccagttgtcccacatgcggttcagaccagtcggtggctggggcggcggactgtagaatccgggagtctcagtgctgctcaggaaataaggcgtgcaaacggcctggacggccagttggtgccgctcccacatcttatcaatcgctcttagcatgacgtcttcgcactgagccttactgtcgaaccgtctgctagtgtggtccggtatctggatgcatccgtctccagtgcaaaggaaagcagtagcaatccacacggtgatactcgccatttcgtcaccctctttagttgatgagcagagtctattccatctgctcgccaggagtaaagcgcttttcgtcgggataaatgccgatgatgtctgcgtcgagcatccaaatgtccacggacggatcgtcgctgctgatttgatataggttgtacagctcccgtccgccgacagcacgctcacctcgcggctcaaccgccagcaccttgccgtgtccttctccgtgctcgtccaggtatatgacgtgatcaccgacttcatagctttcttttgtgacgaggcgtgaacgcgagctgttctgcgattctactacccaggaatccagcacgccgcctttcacgtcgcgaaacaatcttgccgatttgtcgcaatcgaatacgcccagaacttcgccgtctttcaacacgatatgtacgattggcaaaagagtattcatgtttaatctccattggttgataattagagtctaatctgccgaaaagttcccgtaaagaattattttctcataactgattagttgcaactgttaatctgatgtatatgtttgaatctcttttgaacgtttgatgtttcccctataataagcgcacacagccaacaaccacgtggaactacaatgtttaaactttcctggatattcgggcgcaaaaaggataatgctgcctgttctgaatcggcgccggagaaagtcgcacaaatccctcaacacgatccgctcgaccccatgatcaagctgggaaggattcgcggctggaacgtcgagccggagaaagccccggtaattcgtagtgtgaaagatttcctggagccgggcctatctgtagcaatggatagtgcgtatggtgatggaccaactccggccgcgaaggctgctgcgggcggccagaatccctatgtcgtcccgactatgttgcaggactggtacaattcccaagggttcatcggataccaagcttgcgcaatcatttcccaacactggttggtggacaaagcttgttccatgtctggggaagacgcagcacggaacggatgggaactcaaatcggacggcaggaagctatccgatgaacaaagcgcgctgatcgcccggcgcgacatggagtttcgcgtcaaagacaacctcgtcgaactcaacagattcaagaacgttttcggcgttcgcatcgcgctgttcgttgtggagtctgacgatccggactactacgaaaaaccgttcaatccggatggaatcacgcccggctcctacaagggaatctcccagatcgatccatactgggcgatgccgcagctcactgccggctcgacggccgatccgtcttccgaacatttctatgagccggatttctggattatcagcgggaagaaatatcatcgcagccatctagtagtcgttcgcggaccgcagccgccagatatcctgaagcctacatacatcttcggcggtatcccgctcacccagagaatctatgagcgcgtgtatgcggcggaacggacggcgaacgaagccccgctgcttgccatgtcgaagcgaaccagcaccattcacgttgacgtggaaaaggccatcgcgaatgaagacgctttcaacgctcgcctggcgttctggattgccaatcgcgataaccacggcgtgaaagtcttgggtactgatgaaagcatggagcagttcgacacgaaccttgccgacttcgacagcatcatcatgaaccaatatcagctggtcgctgccatcgccaagactccagccacgaagctcctcggcacttctccaaaaggattcaatgccactggtgagcacgaaacgatttcttatcacgaagaactggagtccattcaagagcacatattcgacccacttcttgaacgccactatttgcttctggcgaagtcggaagaaatcgatgtgcagctggaaatcgtctggaaccctgtggactccacgtccagccagcaacaagccgaattgaacaataagaaagccgcgaccgatgaaatctacatcaactctggcgttgtgtcgccggatgaagttcgcgagcgtctgcgcgacgatccgcgttccggctacaaccggctcaccgacgatcaggcagaaaccgaaccgggcatgtctccggaaaacctggccgaattcgagaaggccggtgcacagtcggccaaggcgaaaggcgaagccgagcgagccgaagcccaggcgggcgccgtagagggcgcaggcgacccggttcccgccgctccacgcgggactaagcctctcgcgaaagcggccgaggaaggggccagcgaggccgctgaaccgccgtcgcggccggaccccaaggccgaactgcggaacttgttggtcgatcttttgtcgaagctccaagacctggacgacattaaggcgccggacggcgtagacatagagcacaatgatgcgcctggcgtaaagcgcacgtccaaacctggcgtgtctggcatggagccttcggtgttttcgtccaaccgcatcgtcgggcctcgtgatcattcggaactccagagaatcaaggtgaatggaataaccaccttgatcgaaaatccgcgcggaagcattcggcaaggaaaggatgggagttggcgagttcagatgaaacaccactacgggttcatcaagggaacgaaaggcgctgatggggatgaagtcgattgcttcgtcggtccgaatctgggatccaaacgggtcttcgtcgtcaaccaggtgaacaaggaaggtcagtttgacgagcacaagtgcatgctcggcttcaacaacatcaacgatgcgaagtctggatatctgtcctgcttccgcccaggttgggatggtctcggctccatccatgaagttgacctacccgctttccgtcgctggctggcgaacggcgacacaaccaaaccgtttggaggcgagtgatggcattcaaggcctccaaaaagcgcgaacgccgggcacctcttccggtcggaagagggaagcccataattccatcgtcaggaatcgaggcctggtatcgaaagcagatgaaggatatttccaagctcatgatcgccgactatcgaagcgagattgagaaggcgctgtcccagcctgcggccgaacggttcttcgccagcgacgaatccgttaacgtcctgttcaagatgacccttcgaagcctacagcagcgatggaaccgcatttttgaaggcttcgcggccaagatcgccccggagtttgtcaaccggaccgaagaagcggccaccgccgcgaccctgcacagcttgtctgtggccggcgtcgatcagccaagagctgcgtacaatgagagcgtcaggaataccctggaggcagcaactacttacaaccatactctcatcaccaggattcaagaggaagtccacgagaagatttatacatcagtaatgttgtctctgacttccccaaatccggaagagcaaggaacttccggcataacgaacgcacttcgcaaagtcgggaagttctctgaagatcgaatcgaactcatcgcaagagatcaaaccagcaagctttacagttctctgagcgatgagagaatggcggaaaatggagtcgaggaattcgagtggatgcactcttctgccggcaagactcctcgccatacccacctggagaaagatgggaaaaggttcaagctgaatgaccccagactttgggagggtccgaaggccgaccaggggccgccaggatgggcgattaactgtaggtgcagaaagataccaatcatttgatatcgataggagcgctatatgccgttagttcatggcacttccaatgaggctcgttctgaaaacatcaagcgggagatcgaagccggtaaagacccaaagcaggctgcggccatcgcttactccatccagcgcagtgagaaagggaagacggcgaaagattgttcgcctgagctcgttgccgatcttcgcgccctggtggacgctctgtcgaggctcgtgaaatgaaccgcaagacatgccggcgccgactcgtggtcgatgtaatcagggccaatattcacggcggattcttcagcctgaagtttgccgccatcgatttggcaatcatcggcgtcgccatcttgatgacttttggccgataatgctgagaaaatctggattctgactaaaattctagtccggatagccgcaagttaccgtttacggaaaatagcagtaatttggaaagcctactgccgcgaggctttaacagagctagttcctaatttccgatttagccgcgtgcttcaaaagtatatagcctgggaaattagaagtaacgtcccaatagaattcatctataagtaacgttataatataacgtcaatctatatgctctagacgtattgaaatttaatttttaatcggtaaattggtaatttgaattagtttatgagttgaaagcctcgcggcagtaggcttagacaaatcccgtcaagttccctagaccaaattaccggattttcgcggctgaggaaactggtaattagatcataatacaaattatagtgtaagttaacagtcgcgactacatctaattattgttccgcttatttacccttagatgtactgcgtatataatacagccatagtccacgactcttcgaattaacgatggcaaagtcgaaaagaaaaattgacgaaaatggatatatgaccatcgagggttgcccgatcagctcttatggcgttttccaatattctgctggtcaactcggtcttccgggcgatccgatgcggattgtcaacgtatatcgcccggagtctgccgtcagcgatcctgagtacatcgaatctctgaagaatctcccgttgatcgacgagcatgagatgctgtcgggattcgacgacgatgacgacagtgtggcccccgaagacaaaggggtggagggcatcatcacctccaacgcttactacgaagccccatgggcgcgcggcgatatccgcatctattcccgcaacatgcagaatcagctggaaaggggcaaagaagacctgtccctaggctatagttgccgctacactgagcaacccggcatctggaacggaacgccttatgaagtcgtccaggacaagatgcgcggcaaccacatcgccctggtaaaagaggggcgtgtgccgggggccagagtattggatggtctgtgttttgaccatctcagttttgatttcagaccatccgatgagggtaatgaaatgagtctcaagaaagccaagcagaagccccctgtccagcgcgtagggcaagctgctgactcggcggtcgaagagttgcgcgccctgtggccgaagctctctgcgtctgtccagaagttcctgggcgaagaggcgcaggagccggagcatcaggaaggcgcggccgctccggccgaaccgaccgacagcgagcacatgaccgagcatccgactctggaaggcgctcagaaggacaacgaagagcatgaagaggcgccttccgttgtcgatccggctgtggccgccgccgagtcggagcgtcaagaaagtgccgcatccgaaatgtccggtgaaggcgaagtcgccgaactgatctcccaggtcaaggccattctggctcgactggagggcacggcggccgaaggggcggacgaagagcatggcgaaggcaaagatgtcgtcgagggtttggaggagcagagcagcctcagcggctcgcaaaccgccagcgacgatggtggtgagggcaaggataacagcgaggaacttcctgaaatggcacagaagaacgcgcaagatgctgcaattcgcggtctctatcgcgacattgctgctaaagatcgcctctacaagcgtcttagctccgtggttggcgcgttcgatcaccgagctatggactcggctgaagtcgctgtttacggcgtgaagaagctgaacatcaactgcgcgaagggccaggaagctctggcactcgacatgtacctgaaaggcgtcgaggcctcacgtggcgcggccagccgtcaatcgaaagcccaggattcggccggctctgctccgcagtgcgccgagctggacagctacctgaagggggagtaactcatgttccagaaacaagtttaccgccagtacactcctggttttccgggcgatctgatcgaggacggcccgaagcgggcgcggccgggtcgaatcatgtctctgtctgccgtaaatccggctgccaccgccaccggccccaaccgcatcagtcgcgctttcggttacgccggtgacgtcagcgccctcggcgaaggtcagccgaagaccatcgcggctcgtgcttctgaagtcgtgatcggcggcgccaacttctttggtgtcctcggtcatccgaagcactatgccctgttcggttcggccggagactccctggctcccagctatgatctgcccgatggcgccgaaggcgagttcttcgacatggccaccggcctggtcgtcgaaattttcaacggcgccgcaaccgccctggacctggactatggtgacctggtcgcctatgtacccaacaacctgcctaccgccgacaacgcgcttggcctgccggcaggcgccctggtgggcttcaaggctggctccatgccgaccggtttggtccagattcccaacgcacgcatcgttaacgccatcagtctgccggcccagtcggcggggaatttggttgctggcgttaccatcgtccagctcacgcagtaaggaggcgtcatgagccagatcagcaagacccattcgcgcctcgcaggccgcaatgcgaaacctttcgacctgaaaaacatcaccaatgacgccgtggcgtctctgagtcgcatcggcctggtattcgaccacgccgtcgtccaggaccagatcaaggccttggcgaaggccggcgcattccgctccggctcggccatggacagcaacttcaccgccccggtgaccacgccgtccatcccgactcccatccagttcctgcagacctggttgccgggcttcgtgaaggtcatgaccgctgcacggaagatcgacgaaatcatcggcatcgataccgttggctcctgggaagatcaagaaatcgtccagggcatcgtggagccggccggcactgcggtggaatacggcgaccacaccaacatcccgctgaccagctggaacgccaacttcgaacgtcgcaccatcgttcgtggcgagctgggtatgatggtgggaaccctggaagagggtcgcgcctcggccatccggctgaacagcgccgaaaccaagcgccaacaggcggccatcggtctggaaatcttccgcaacgccatcggcttctatggctggcagagcggcctgggcaaccgcacctatggtttcctgaacgatcccaacctgccggcgttccagaccccgccgagccagggctggtccactgccgactgggcaggcatcatcggcgatatccgcgaggccgttcgccagctgcgtattcagagccaagatcagatcgatccgaaggcggaaaaaatcaccctggccctggccaccagcaaggtggactacctgtcggtcaccacgccatacggcatttcggtttctgactggatcgaacagacctatccgaaaatgcggatcgtgtctgctccggaactgtcaggcgtccagatgaaagcccaagagccggaagatgctctggtgctcttcgtcgaagacgtgaacgcggccgtcgatggaagcaccgatggcggcagcgtgttcagccagctggtacagagcaagttcatcaccctgggtgtcgaaaagcgggcgaagtcgtatgtggaagacttctccaacggcaccgccggtgcgctgtgtaagcgtccgtgggccgtggtgcgctacctcggcatctaaccgatgcctattcaccaaaggccggaaacccggcctttgttcactctgactctgactcggttgtaggggccggttagggcataattactaggactacgccaatgactgtttacatcgtttccgccatgactcaatccgtgtcttacaatgcgtatgacacctctgatccgtccaatcctcgcctccagcgaaagattctgattcgtggccgcgccggcatcgcatccgaaacttccggcttcggcgacatgatttccgacgcggccgggcgtccgatctggaccccgcagggcgattgcactgccgtgagcgattcggatttcgagctgcttcaggccaataagattttcatgcgtcacatggacaagggttatctgcgagtcgtgaagacagacatcaccagtgaccaccagcggatttccaaagagactcgcaccatggagcgcgatggattccagcctctggacgctgatcgtctgcagcagaaaatcaaggtgaccaccgccagcgcttcccaggaacaagagttccggatttaaccgagggtttcggtatggtgattttcgacgaacataagtttcgcacgctgtttccggagtttgctgatccagccgcttatccggacgtgcgcctgcagatgtatttcgacattgcgtgcgaattcatttctgatcgcgattcgccataccgtattctcaatggtaaagccctggaagcctgtctgtatcttctgaccgcccacctcctgtcgctgtccacgatgcaagttcagggcgcggctggaggtggcgtcactgccggtgggacccaaggcggtttcatcaccagcgctacggtcggcgaggtcagcgtggccaagctcgcgcccccggccaagaatggttggcagtggtggctttccgggacgccttatggccaagagctgtgggcgctcctcagcgtcaaagcggtgggcggattctacatcggcggtcttccagagcgccgaggcttccggaaggttggagggacgttctggtgatccctggtgcgaatcttctgcgaatggccttcggggtcatcggcactcaaattgtgaaatatcgcaagtttgagcagcgagtgaagaatgatcaagctcagtacgtttccatgttcgaggagcctttcgacctggcagcgtctgtccagcgagtccgacgcgatcagtatgtccagtttaatctggagttccaacggaattatgttatgatcttcgccaactttgagatggttgacttggatcgcgatgtggccggtgaccagttcctctggaccggaagagtttttcagctggagtctcaaggctcctggttttatcaggacggctggggagtttgcctggccgtggatatcggtgcggccaagctaactgatgacgggaaaccgactttctaggtgatgtatgtttgacggcgaactgatagcgaaaatggttgtcgagctgaatgcggcgatgacatctgctcaagaggctttgcagttcccggattttgaagtcgtccagaaagctcagccgacccaacagggaacgtcaaccaggccgaccatctttttccagaaactgtttgacattcctcgcggctggcctgccaccgattggcacctggacaacacgacccgcaaatatgtagaaataactcgacagcatgtagagacgactttccagatcagttcccttcattggcagaatcctgaaataactcacgtggttacggcttctgatatcgccaactatgtgagggcttatttccaagctcgatccacgattgagcgcgtaaaggaactggacttcctcattcttcgcgtttctcaaatttccaacgaggcattcgagaacgacaatcaccagttcgaattccatccaagttttgacatggttgtaacttacaaccaatatattcgcctgtacgaaaacgcagcatattcggccgatggggtattaataggcgtatgagtctgaggcgcgattcagagctaatcgccgcgcacctccagatgttaagagccatgcgcggcaggtccgtttcagccggatggtattccacggctcgatatcctgacaaggcaggcggatcggtcggaatacaagtagcgagaatcgcacgtctcaatgagtacggcggaactatcgaccatccgggcgggaccaggtatattagggacgccattgttcggggccggtttgttggcgttcggttcgtcagaaacgactttccgggagaaaccgaggtaactaagcctcacagaattaccatcccggctagaccgtttatgcgatatgcttggaacttgttttccgcagatcgcgccgcaatccagaaccggatagccatgaggctggccagaggacagatcactccagatcaagctcttgcccagatcggcctggcgttggaaggatacatagccagaagcatcaggaccgggccatgggtggctaactcagcatctacggtcaggagaaagggattcaacagaccgctggtcgatacggctcatatgcttcaatcgattagcagcagagtaacataaccaggagatcatccagtgatcagtcagagccgttatatccggatcatttcgggcgtaggcgcaggcgctccggtcgcaggccgaaagctgattctgcgcgtcatgactaccaacaacgtcattccgcccggaatcgtcatcgagttcgacaactccaacgcagtcatgtcttacttcggcgcgcagtcggaagaataccagcgcgctgccgcatatttcaagttcatcagtaaaagtgtgaattcgccgtccagcatcagcttcgctcgctgggttaacaccgccatcgcgccgatggtagttggtgacaatctgccgaagaccattgccgatttcgccggcttctccgcaggcgttctaaccatcatggtcggcgcggccgaaaagaacatcaccgccatcgatacgtccgccgcgacttccatggacaatgtggcgtcgatcatccagaccgaaatccgcaagaacaccgacccgcagctggcccaggctaccgtgacctggaatcagaacaccaaccagttcaccttggtcggcgccaccatcggtaccggcgtcctggccgtggcgaaatctgccgacccccaggacatgtccaccgccctcggctggtccacctccaacgtcgtcaacgtcgccggccaggctgccgatcttcccgacgcggccgttgccaagagcaccaatgtcagcaacaacttcggttcgttcctgttcgccggtgcgccgctcgacaatgaccagatcaaggccgtgtcggcctggaacgctgctcagaacaaccagttcatctacacggtcgccacttccctggcgaacctcggcactcttttcgacttggtgaagggcaacgccgggaccggcctgcatgtgctgtcggcgactgccgccaacgacttcgtggagcagtgccccagcgagatttttgccgccaccaactacgatgagccgggcgcttcgcaaaactacatgtactaccaattccctggccgcaacatcaccgtttccgacgataccgttgcgaacaccgtcgacaagagccggggcaactacatcggcgtcacccaggccaatggccagcagctcgctttctaccagcgcggcattctgtgcggcggtccgaccgatgcggtggacatgaacgtctatgccaacgaaatctggctgaagtcggctatcgctcaagcgcttctggacctgttcctgaacgtcaatgcggttccggcgagcagtactggtgaggcgatggtcctggcggtgctgcagccggttctggacaaggcgaccgccaacggcacgttcacctacggcaaggaaatcagcgccgtccagcagcagtacattacccaagtcaccggtgatcgccgtgcctggcgccaagtccaaaccctgggctactggatcaatatcaccttctccagctataccaacaacaacaccggcttgatcgagtggaaggccaactacacgctgatctattcgaagggcgatgccatccgcttcgtcgaagggtcggatgtgatgatctaatggtttgcggcggactcgatccgccgcaaccttccataaatggagtgaggagtaagcaatgatcaacatttctgcgttcggctcgatctgccagttcacggcaagcagaactttcccgaacggattcaccgtcaccgagttcgccgacgatgccgatcccatcgacagcccgccgttcaccgctgccgataccggcgtcggtctcaacggtgacatggtagtttggaaccgggcgaacatcctggaagtagtcgtcaacgtcattccgaataccgagggcgagcgcaacctggcagtcctgctggatgccaaccgcaccggaaaggacaagtcgggcgctcgtgatgtcgtcggcctggtcgtggcgatgccggacggcagcaaaatcacctgcaccaacggcaccccaatcgacggcgttctgatcaacgcggtggcaagcgtcggccgtctgaagaccaagccgtatcggttccgatttgaaaaagtgatcaaagccggtactagctgatgaagaaaattccgctgacagcagtccccaatcaagcgatctcatttaacgccggtagcagctattggaagattcgcctgtaccagaacatggacatgatgaatgccgatatcagccgcgacggcgtgatcgtttgccatggggtccgctgcttcggcgggattcctcttctccagtacagccgtcagtaccgacctgactatggcaatttcgtcttcgaccgcgacgccgattggacattgttcggcgacggcatcaacctgttctatctggacggcgccgaattcgccgagtatcaggcgcttgccacgaggaaagaatgagcacatcaacgatcagaaccgggacgaacaacgatatccttttggacgacaatggaaacatggttatcctcagggatgtcgaagcgtgcgcccaggacgttcgggcggcgatgctcatgcgcaccggcgaaaacattttcgatgtgaactccggtgtgggatatttcgaatacatcttctcgccgcagaaaagctatgatgacgctcgcaaatccatcgcggatgcaattttgtcctcgccggatgtgaccggcatcgagcagctggacatcgacatcaccggggaagtcttcggcgtcgatgctaaagtcatcaccatccacgggcctgttaccacaggagtttgaaatgagcacaatccgcatccaatacgccaacggcacccagctgttcctggacggcaaaaatccgccgctcctggaccctctaccctcgttcaacccgtctgtagaagatctggaaggcctggaccgcgaaaagaacaccggcaagggcgactcctcgccggccggtcttcccgttcccccggtaaacgtcgattccaatgtcgacaacggcggaaccatcccggctccggtatcgaccgacgctcctgcggccgaatcggccccggaaggcgcccaggaagctcctgcagcgggacaaggcgacgagaaaggcgccgaggaagccccgactaccgccccagtagaaaaggccgaggaaacggcctcgccggccgctgaagaggaagccccggctcccgccaaggccacctctcgcaaaaccaccagcaagtaaggactcgacatgatcaacgtcagcggcttcggcacaggaattgtaatagtttccgcctcatcgttcccgatggggttttccttgtcgaagttcgctgatgatgagagtccgatatcctccaaagagctggagccgttcggatatgagatgctttatgacggcggcctattcgcctttgacaaggctgctcctctggaagtatctgtatccgtcatcgcagggagcgaggatgatattaaccttcgcatccttctcaattccaaaaagggatcattccgatttcttccgggaatcatcccggatatgacgactctcgtggccactcttcctgatggcggccgcaccgttctgtccaatgggactatcatcaagggtccggccatcgacaccatacagaacaccggacgacgcaaaggcaacacgtacacttttgttttcggtagctatcttggcgcccagactgcgcgtcaagccatttctaacgttatccaatcggtactggaggtggtctgatgttagggattttcaccagcctcctaagttcgcgatctttttcgattgtggaccaaaacacaaaccagctagttgctgcggatttgaggataagccgggtcaacacccggttttcttctgtagggcaacgccacatgctggaagatggcaagaccaagatggattccagaacgatccaccctatggaaatcatcgtcgaagtattttgcccttcaattgatgtcgtcgatcagatcaatcaattgctcctggatcgcgacactctgtacaaagtcatcactcgcggcatggtattcgaacggatgatgtgtaccagcgaagcgctcaatcagactccggatatgatatcggcgactcctgcgcggctgacattctcccaagttctcgtccagaatcccaagcctataatgttcagaaatgcaggggactcttctatgatcgaccgagggctggccctagctgaagacgtggttggctcggccggcgatctgttcgactacgcagtaaacggcgtccagaacgccgcagacttgttctgaggtgccaattgaactctttcctcaagtctattctcaacacgcctactctcaccatacgtgatgatgttaccaaacttcctgtctggaagagtcttcaagtcaagaaagtggaaatttactcgccggcttccgtagtgtcgaaacctctggcgacgaaagaccagacggaagctcaagtgtacaccgaagctctggacattgatgtgaagaatggaaagatcatccaaccggtgcgactccgcatcaatgctatctgtccggacctgtccaccgttgaaagtatcatgaacgctttcaatgataacacctcgactttcgctatcacttctaagtcgatattggccgataaaatggccatcatgacgctcgatgtagatcagtcgccagacatgttgaacgcggctgagatcaatatggaattcgagcaggttgagcctccagtattgaatgaattcgatcctgcgttccctcaagatagtccgacttatggggtacagattcaatctctttctgatgctaatttgctggatttgggcgccatcggcgattcgatatcttcggccgcaaaatcgctatataatcgcgtgaccagctacttctgaggatgtatcatgcttgaaatcaatcttcccgatggccgtcaaactcgcgtacaaatcgaggcgtggtcggcattggatggctgggaactccagcgccgtttcgtcgaattcgctgtcagccaagattccgacttccgccgctctttcaccatggaaatcctgggctatgcgaaagtgctgcttggcgacgatgacaccggcattccgctgaccaccgcggcagtcatcaacaaccacctcggccactggaagaacgtggaactggttttcaactctgttctcaagcacaatggcatcgacccggccacgcacgccgaccggccggactattgggaacaagtcggatcgcagatggccatcgcatttctggccgaggcgtccaagctcattggtccagcaatgaagatcgccgaaggactcgccaacaagccggagtgattcatgtctagtgatttggatgaattcatacttcggtatgaggccgatactgccagagccgagcgcaatctagagcacctccagaaccagatcaggcgcgtaaacagcgcatcgacgagtggccttcaggatttgcgccacttcgcagacggcgcggccaccgaactcggccgagtcgttcctcagattgattctgtgacgagcgcaattcgcggaatgaacgcgcaactggcaataggcgcaactggcgtggccctggtcgcggccggcgtcaaggcgttcatgaacaccagggaccagtacaatcagcagcgcatccaggcgatggacatcggcatcgccccggcacgcttggaagagtaccagagaaaattcgttcgccagtccggtggaaccatcagccgcgagcagggcgcggagatgaccaaaaatctggcagacactttccggcgtgcttatcgcgatatcgggcgagtcggcccggaagcgcgaattctgcgtatggcaggcgtcgatgtcgggagcttccaaaagggcatgcggccgctcaacgacatcattactgatctggccacgaaaatggccaagttgaagccggacgaaatttctgcctacgctgatgcccttggcgtctcgcgagactacctgagcaccctggcgaagatcggcccggccatgggaaaagtcactgagatgacgactgcggaactccagtccagggtccagggcgagtccaacatccagaaattcaacgatgccctggcgaatctcaaccagacgttcactaccctggaaaaccgagtcggcgaaaagctcgcgcctgcgttcaccaagctgatcgaaatcatcgacaagatagtccaggctattcccaatgaagtggaaagcttcgcgaaggacaccaaatcccgttgggaagatggagtgctcgggaaggcgaccgttggcagtgatatcctatccctcctcagccccggcgccctgctcggtcgcctggcagcgtgggggactcgtcgcggcatggaagaatcagggctcatcgacaaggacaaggttcccggcgctcaaaccagcgaagacctggccaagaaacaagaagaccaggacaaggctactaagtccatgaaagagctagagaagctggctgaccagaccacgaagtctaccaatgattttgcggtggcgatcaacatgttcagtggcgcggtatcgtcgttcgcgaatgccgttgacgagcgccaagcttgggcagcctgggcgggggaaattggtcgggcggtcggcatgggaagcaccgcgccgacttcgcgggccaccggcgtctatccgcacgcgatctatgatcagtcgaagagtggcgcggccggacaagtcttcggcgagccaatcggcgcccagtctcttcgcaatcgcatgttctcgccgcagcgcaaggccgagccggtcaccgttccatcgtacatcaacgacatcatcaaagatgcgtcgaagatgtacaacattcctgagctggacatcaagaaactcatatacaccgaaagccgattcaacgccagggctaccagcgaagccggagcgaaaggcctcatgcagctgatgccggaaatcgccaaggcgtatggtataactgacgtatatgaccctcgccagaacatcctcggcggaacgcgcctattgcgggaaaacctggatcgagccaatggcgacatgcggttggccttgacctactatcacggcggcctcgatccgaagaactggggaccaaggactcgcgcatatccgggtttggtgatgagcgctccaatcgagctgatggaagaggctcagcgcaagcagaaggctgcggccatgaccgtcgccaacgagacgttcgccccggaaggcggcgacatggacattcgtccctatgatggcgggcgactggaaaccccagaccagggcaagaaggaagatgagcgccgcgaagcccgtcgatatgacgacagggttgtgcgaccggaaattcgcatcatcgaccgcatgccagaccgcagcgacggcgaaatcctcaagatgtctaggcgtcaagaggccgaccgggcagattctggattccggaagttcccgaatcaagttcgcggcgagaccaagcagaacatccaggctcaactcactgcaggagccatcgcgcaagtgatcggcgttaaccccaaccagatcatgcgccgcgaaatcagccgttctgacttgctgttcggatacaaccaagccatcctgggcaagcaacaggagatcaaggccgccgcgaccgaagccaacaacgtattcctgtctccagccaagcttgccgaagccacggccaaggtgaacgccgcatcgcgagaaatggatattctcaggacgtacggcgagcaacttctgaagagcgctccagagcgcggccaggagctgaccatcggtcgaatcgatatgttggtaaacgttaccggcgcgaattctccggaagaggctcgcgagatattcagtaagcagactgcagaccagctgactacggcaatccaggacgctcaaaacgattccgcaactaagatactctactgatgaaaaagagaattctgcgagtaacattcaacatgccttatggacccgaagtcatccgcgaagatctggatgttcgggtccggattatgaaggctgcgttgcggattcagaaccgggcgacgatggaaattttcggcctcaccactcagctgcgcgagtctcttctgtcgcagttcaccgcgtggaagcaccggcaacgtcaagtgggcagggaagatgaattgatgatcaaggtgtcggtggaagccggctactctgaccaggggcgcgagcaagtttccagagtctttgtcggcgaagtcgccattgtcgatatcatttctccgccaccggacattggaatccgcatccagtgctataccaggcaaatcgacaggacgaagaccattcggaatatgccgccagccaacacgacgtttgtcaagttcgtcgagtggggcgcgaacgaaatgggattgaacttcatttgcgataccagttacaacgatcaagttctgaagaatccgggccggtctatcactgtcgcgtcggcaatcctggcgtcgattcaggatatgtacatgccggacgtggccgcgttcgtcgatgatgacattttgatcgtgaaggaccgcgacaaagtcattcgaccggatgaggtgaccaacgtcaactcgttcgttggaattccatcttggtctgaatggggcgttgaattccagtgtctgtttgagccatcgattcgcgtggctggaggcgtggcggtcgaatcgctcatgaacccaagcgtcaatggcaactatgtaatcactgctctggaatacgatttggccagtcgggatcggccgttctatatcaaagtcatggggagcccagcagcataatggccagggaaatcaaaccgttcaacatgttcggcgttcactatacttcgcggcaattctctgctgtcgatgggctcagcatgatgtcggaaattcagagtgtgccgccagaagaactgctcaagggaaccagtgtattggcgcatccggaagaccatccggaaggcatctggcttccattgactgctgcgaacatcaatctttatgtcgttgatcgagcgaaagtaatagctcccgtacaagttcttgcacttctgtccgaagtggtaatcgactggaactttggttttctcaaagactggaccggagtcaagattccatccagatttgtcgaagatatcaaaagcgtgaagacggcacattcaccttctgtagttgcgagcttggtcgcgaacggctcagcctctatgcgcgagttggaagagtattattcgactcaagatgcgtttaagatgatagacatcatgacggcgaagagcgtgaacgaggccttggcgtccgaagcatcgcacaacagaatcaaaaagggataattcctaaccgggcctgggaaggctatactagacctgccaaatcagaggctttcccatgtccaatatttctctaacatccgcaaaagctcccgacaggacgcgactgatcgccgctcttgacgctcggtcgcggcgggatgctctagatttcgaagtgatgataccggctcaggttgttcaatatgaccgggccgagaacatcgcgacgattcaacctctcatcacctgggttgacacggaacacaacgccgtccaaaggcatcagctggttgatattcctgtaatttccatgggggctggcggcttccacataagtttcccgattcagcaaggtgacataggctggatttatgcggccgaccgcgacacgtctcagttcctggagtcgttgtcaatgtcgaagccgaacaccggccgcatccataagttcgagcatggcctgttcatcccggacgtattccgtcgatacaccatcaattccgaagattcggccgctatggtcatacaatcgacttccggagcgaccagaatttcgattcgcggcgataacatcaagataactgcgccgtcgaacgttactgtggatactccgcaggcgaacttcaccggcaatgtgactatcgctaacaccctggtcgtaaacggcatcaacgtgaacaaccacggccacctcgaaaacaacccgcctgatgcccggacgaaaggcggcatgattgcttaaggagattttcatggcaagttttgatttttctgatttaacagcgggggggggttgtaatggctaactacaactacatcgtcgatactggtgtgatagtcgcagataccgccgacgttctgagcgacgttgaggccgagttccgcgccgccctcggtgccaatatcaacttggccgcgagcactccgcagggatcgcttgtcgcggccgaggccattgcccgttccagcgtcatgcggaatgaagcgcgaattgccaataccataaacccgaacgtttcattcggaacgttcctggacgcgatctgtgccttgatggggatcgagcgtggttctgacctgtcaaccttcggctatggagttcaagtcaccggccgcagccaaacccgcatttccacagggtctagggtccagactccggccggcgcgatcttcacagtgctgagcgatgtcacgatccctgctggtggtgtcgcgaccatcgatatcaaatcgcaggagtatggcaacattcctctgccggtcgggaatctcatcatcatcgacggcacaattggctggtccggagcgaaagtcatcgcctccactcgcgtcgatccgggcagccgccaaatgagcgatgcagaactgaagaatgcccgcgttaatcgattggccatccaaggccgcaactcgaccatggccatcaaggcgtatgtgagcgccgttccgaacgtcacgtcggtgaacgtaatcgagaacaacaccggcgccgttcaagtggtgaatggagtatcgtttacccttccgtatgctgtttgggtctgcgtcgccggaaacccggataaacaagcagtcgccgatgcgttgtgggccgcccataacggcggaactccatgggactatggtgcgacgaacaacggcgtcccggtggacggtccgaatggcgttcctgtgcgcgatccggcgtccggtcgaaagtatgtcgtgaagtggaccactccaattatgtacgatggatatgttaacgtaacagtccagcaaggttcctcctctgtagctccggaagccattcagaacgcagtggtcaattacgcccaggggaaagtggaaggggaagaggggctggtggtgggcgcgagcctgtcggcattcgaagtcgccggcgccatcgctcgcgaaattcccggcatctacatcaaactctgccaggtcgcgtgcgtcgcggctggctcgccggctccggcgccgggcgatttcacttcggaatacgtcatgagcgcattcggccaggctaccatttccgttggtaacgttcgggtgactttcgtatgactctgcctgcgtacaattcggacatccaacaagctctgaaatggctccataaccaggcgcctggaatcaccggcctgatccagagaaaggcgcaatggtatgacagattcagccgccaattctgggccaactgggagcgcgacgttttccacttgaaaactgccaacccgttcggccttatggtttggtgcatcatcctcggcacgccttcgaaagggttcggcctttatccaaaaaacagttcttgggcattcggtcggctacgccagaacttcatctatagcggtacacaagttccgccaccggcagacgcatcgcctggcggcaacttctacggtggcggcaatgccgaaattctcaacttggacgaaatcaggaaagtgcttcagctaagatatgtagcgctgatttctaacggctcgattgcatatatcaatcgcatgcttcgttacatattcaatgatgatgagccatgggacgaggcgaccggtctgtacttctatctcatggactcaaccggcgagaatggccctgtggagaacttggcgatatatcggaaagattgggaaggtatggtgctgttgtccagttcgcccagaacgaaccacgtgctgacatcgacccctgccagcgacgccgattggccgggagtcgatccggccgcgagcggtattccggtaacggtcgaaacggcgtccgctacggccccggacggctccgctacggtgtgcaagcttactaagccggccgggagtaccgcttacgtctccgcgccgatagatgggccgctggggtccggtagcactgtaacgttctcgttcttcgcgaaagccggctccacccgtttcattgcaattcagtcggctgccgatttccccagtcgagccgatgccgttttcgacctggattccgggaacgtaatcagcgatcagatgctggacagcagcgtggtaagcgcccgaatgattcgtctggaaaatggctggtggcgttgcgttctcacgaccaagaccgtcagctcttcgttccgcgctgcttacgtcgctccggcagaaaccaacttcagctggattgattcgaattccagcgcggcgattgacgtgcttatctggggcgctcagatcgaactgggtgatactccaactggatacttggaaactaccggggcgcccgtaaccatgaccgattatgttttgcagaacgcccagaccggaacagtcaagttcacacagccccttccgaccggagtagaagcgtattggactggagactggaaaggcgggactgcagcagaaccggccagattcgcagtcgggaatgggactcaggatacgtttactctgtcagaccccgcatacatcggcctacccaccagtggggcgttcaagctagaatacagggttggtccggcgcttaatctgtcgccgcaattgatcaacctcatgaatgaccgggcagttggtattatgccgacttgcgccggttgcgatgtcaaagtcattcaggagtaatgacgtgatcacacccgaactgatccccagtccgtttgccgctcagggcgataaagacccgattccacaaacctcctccactggcttcgcaaaccttcgcgacggctatacgccggactacgaaatcagcctggcgtcgaacaacccgcaggccaaagcggtcgagcggaaaattcaaaaccaactcttcttcatcgcgacccagaacgcacaggcgtggcagcgacaaatggcgccgccgtggtttcagggcatgcctggcggctacgaacagaatgcagaagtcgtgcgcgtcggaaatgacggcataatgcggcgttatcgttccatggtgaatgccaatgcgagcgaccctctcagcagcacgacttgggaagaacaacccgcatggtcggcgatgcgctccaacatcccgatgccggccggaggcccaggcctatcttctggcggagaagtcatcacgaccggccgcaacttcaacgacctgttaaatgggacgtgggagttcttctctgattcagtggttatcgcttctcagaatgcccccgtatatccggcgtccgctggtgccgctgctggcatgttggaggcgaaatcttggatatccgggtccaatacgttctgcgttcaacgctacactgaccgcgtcgggaacgtcgctgtgcgcgggcttaatgccggggcatggaccaactggatgtatgctgtaaacgttatggccctccaacaaggtcgagtgacctatggagtcgcggccggcccggcgaacgcttacacgttgacgctcgttccgcagctccaaggcggcctggtggatggcatgattcttcgggtcaagttcaacaccatgaacaccggcgcctccaccatcaacgtctccggactcggcgccaaagccatcgtcggcgcggccaacttccctctcaccggcggcgaacttggccaaggactcatcgctgagcttgtattcgacgcagcaggcgaccgctggagaatcctcgcaggcgcgccacgcatccaagttggcaacgccgatcaagattaccaggcccccagctggaaacaggtgaaggattacgtcgcgtcccaaaagctgactgaagtggactgggctgacgtcgtcaacaagccgaacgtcgctatccaagacactacgccgtggttcgccaatctggagttgtctgacgctcggcctttcatcgatttccacttcaacaacaaccgcgccaaagacttcgactatcgctttatctctgaagctgatgggtcgatggcgttctactctcgccaggggtcagctggtcctacccaggatatcctgttcagcaggtcgaatgttacattcctccagccgcgactggatgttgcgaaaaacctcgcgtacatcgcgaactctggtcccctttggcagaacaccactgccgatcagcccggttggaagttcacattcgcgcaaggcgtggacgcgaacaacaacgcggtgatcgcagtcaataccaccaatcctgacggctcctatcgctcacagataatgcgttgggactgggcgtccacgaatgtaatcttcaacaatcgtccgcttttcgccgggcaatatgttccttgggattctggtaacttcgacccttcaacaaagttgacagtcaatgccacgaaccagatcgccgggcccaccgggattcggaacaccaacggcaacaccggcaatatgaacacatggggttccggttccacgacggcatcctatggcaatgctgccatccagatcttcgggaaagggggcggtgagcctgccgcgatctattttgacaactcccagaccggatggtatctgggtatggacaaggatggacagctcaagcgggccggctggtcactcggcaacaactcttatgtcatcaccgatgaattgaacatcagaaaccacatcaacggtatggcagcaaggccggtttggggcggaaatgaattctgggggccgtggaacttcaatccgaacactaagcttacgttgggcgcattcaacgatagccaacacaccaggatggtaaacagcgccgcgaaggacgtagggatagccgccatgacaagttatggcgacgcggctatgtcgttcttcaactatgaggcttcgacgccgaccgggaatcgtgctgctgtaatttcgtttgttcgtaacggggcacgaggcgttctgttcggcctggacacggacaacaagctgaaatggggcggctattctctaggtgccgtcgcgttcgagattgccgactccaacaacctcatgagcctgtggtcatcccacgctgccgcgccgaactggaacgggcagaccatctggaggtcgggaaacttcaacccagacaccaaggcgactttggcagctcgcaatacgacgtcatcccctacaatattcagttatggggcgtccggaatcgcatcaaccggacaggtcggtgcgttggttgtggaaaacaacagcgtcaccaataccgcagccgccatcacgttccattcgccgcagaaatatcaggtcaacttcggcctggatgcggacaacgtggtaaagatcggtggcggcacaatgggcggcgtagcatatcccatcatccactccggcaactacaacaactacatcaaccaggcgctggttcaggtaggtcttggcggcgtcggttcctacgcgatccttgccgtatttgacacctccgcgccggcagcgtccattgcccccggaacgatcatggacagttccaagctgttctattcgtcctgcgattcgacctatcgcagcagcgccagtccgacgggcacctggcgctgcatggggtatgtgtataaccgagactccaccaacggcgactcggcatccctattccagcgggtaacgtaacatgaaatggacgcgaatcagaaaccctcgttggctggatgagacaaatattcacgccatggttactttcgaggggattggagaagttcctttcaccgccaatccgcacgacgtggaggcccacggaagggccattcacgctgcgatcctgtccggggcgcacggacctatcgccccagtagactcgacgcgggagcaggccttgcaggacgctatacgagcaagggaaaagcgggctatccttcgcgatacccgatggcccatagatcgtcacgacgagcagaggcggctgggtatcgaaaccacggacgggcctgggctgatagcagcccttgttcactggaggcagcagattcgcgattggaatagcggggatcggccgcgacttcccatggctctgaaagcaatattcaaaaatcaggagtattgatgaaaatcacgaaggatattctgatcatcggaaccgggtgcaccacggatcgggcgatcaagtggctggatgacgtccaggcggccatggacaagttccacatcgagtcgccgcgagccattgcggcctacctcgccaacatcggcgtcgagtccggtggcctggtaagtctggtggagaatctcaactacagcgctcaaggattggccaacacctggcctcgccggtacgcagtagacccgcgagtccgcccgtatgtcccgaacgctctggcgaaccgcctggcccgtaacccggtcgccatcgccaacaacgtgtacgcggatcgcatgggtaatggatgcgagcaggatggcgatggttggaagtatcgcgggcgcggcttgatccagctgaccggaaagtcgaactattccctgttcgccgaagactccggcctggacgctctggagcaaccggagctgctggagactccggccggcgcggcgatgtcttctgcctggttcttctggcgcaatcgctgtatccccatggcggagtccaacaacttctccctggtcgtgaaaaccatcaacggtgccgcgccgaacgatgcgaaccacggccagctccggatcaaccgctatatgaagaccatctccgcgatcaatcaaggctcctgatattcaaccccaaagaaaaggccgcttattcagcggcctttttgctttccggctttgcctcttcaaccatcttgacctcaaccggcgcggcggactcctcctgagtgatcgagtccacatagttccctagtgaactcagaacgccgattaacagcgctctcaccaccttgtccttgactgtctcgcctatgatcttggtcagaacggatattaactcttcccggagtctggggctgattcttggccgaaagcgcttgcgatgctctttgcgtttcatgtttagtcctctgtctgcggtcttctcctcaccccgataattgcttggggatgctttgtgttaatcggaagggtcgggcgctattataacccgtcgaaaatgctagcgcttaactgtttaacgatacgcaccgcgatattaaatcgccttctttctggccgaggaactctggcggccgggtccggtctaaggcctaatttgtcgacatcaaaacgagaaaacccggatcgcctgtagggtaaggcgtccgggtttatttcgatctagtgtccgctagaatcagtggcttccgccccatccgtccagccagcaatcgaagacggcgtgtctcggcttgtccttggcgccatgggagaagtgcttgaatcggatgacctggcccttgaggtattccctgtcattccagcggcgctgtttctcgtcgtgggtcaggctggaggccgacacgttgaaggtgacgccaggccacagacgttcgttgcggcagacgaacgcaccgaccattccggacggcgacaggttttctgcgtggctggagcgggccgtgtggccaagttcattgatgaaagcttcattgttgttgtgcatcaactcttccacgtcgatgatctcagcttcatcgtagtcgtatcgcttgactttcacacagtgcccttccttggcagtcgagcgaccgaacttgtacagtccatcagcgcgcttgcccatggaaccttcgaatcccagcattgtgtggcggcgctcgacttcgctgaactgttcgatggaagtcaccagttcctgctcgaccaggtgaatcctctcatagccgaggcagtgacgaaggaagttcacgcgctcggccgccctggctaggcgatcttcggtcggtgcgcgaggatcggtgaaatcatcgaacacatggaaagaccagtccggctcaccgctgtggcggcgaagatcgccggacgacttctggaaaactttcgggtcgctgatgtcgccgcagaccagctcgccgtccaggccgttgaacagcttatcgctgaggtattcgtagatcgattgattgttctgccgcttgagttgacgggtcagcgcctcgccttcgaatacgaagcagcgaaatccatcgatcttcggtgagaaatacatcggcagttggccttccagcagcttcgggtcaaaattcgatgcgagcatgggtttcatacagttctccagaaaagaagcccggcgaaccgggctaaatggcggtaagccggctcagatggtttcgttggcgtggttcagttcggccatgatcgacgcatagcgctcgtccgactccttgatgaacacgccgtcgtacatgacgcctttgcgatccttgatggtgtcgtaggccgcagcgtagcaggcgagcatggtagtgtcgtgctcttccgtcacatcgaacagagtcatgacggccaagaccaggctcttgatggctaatccatgatttccgcgtgccagcgcgccggccagatgtccgaggtgctgcaaatcgtcgccgtaggtgggatgaacttcgacagtctcgctgaagacagatagatgatcgaacagattttcaccgagttgcgcggccatgatcgtggcaaccaccattacgtcgccgatgccgtctttcacctcgactggtttgttataaacccaggcttcgcaaacttctgcgaactcttcgaccaacttcaggaattgatccttggccgaagagcctttgatcaggttccggtcggaaccccatttaacaaccaggtcgtgaagttcgcgactcatgatttgttcgatattcattctttcgattccttttggatttgggattttactgcgttgattatggacgccgtgctctggcgcgatccatccttggtggtgccgaagtagaaggccattaccgacttcagctcggcgaaccaatagccgatgatggtgccgatggcgacagaggatgtcgggtccatcagagcctcgcggccgaatgtgaagattgcgatgatgatgagaatggagcctgtcagaagagcgaatgtaatcgccgggcgaacgaaatcgttctgctgcgccgcaagcctcctcgcagaatccctgtcggccgcctctgcggcgaactggctaagctcggcctggagctggttctgctcagactgaaggcgattttgttcggcttgaatcgcaagctcctggagacgaacgcgctcggcgctctggagttcggcgagacgcgctagagcttccggattcgcgtctagagcgctagcgaccgaggctgggtcggccttcgaccccagcgccgtcgcgacgatagcgcccacggcggcgcctgcaggcccacccaggagcgaacccagagccggggcagccgcgccgatcttactacctatgtctttccagtccatttcgactcctcaaaagaaaggcgccattacagcgcctttctccggccggtgatttagaactcttcggcttcggtcgcatcgccgacgccaccggcgtcactgcgaggctgttcctgcttgctgtagtccaccttcacctcgccgccgacgaacgacttgtacaggtcggccgcagccttgaagtgatccgggttcttcaccaggccttccagctcgaactggacgccggaccagctacccttgtcgttcgacatgcctacggtggtcatgcggaccaggttggcgaaagtcggcggggtgcgcaggccctgcggggtctgaacctttttctgggacagcgcggtcatgagcttcttcgaggccttgatctgcgaagacgacagggagatcagagcctggccgaaatcgccggtgtccggatcgatgacgatgacgtaatgaccacgggtgtcggcgaagtagtcagacttcttgtcgctgaccgaaccgtcttcgttcggcgcgtacaggcgtccttcgacttccttcaccttggtcgggtctttcatcatttccttgaagtcttcgacgctgatggcgcccttgaaaccgccctcggcctcgcgaccggcccagcggatgaactcgcggcggtacgcggccggaatgatcagcaggccggtcttgccgtcgtaaatcttgccggtgacggtgttcaggaacatgccggccttcgcgccttcgatgtacttcgggtcatcttcatcgacctggggagacatcttctgcagaacctggatgaaggggatggcataggactcggcatcggcgccttcgaagcctgcgccgtcatacgatcccaaatccatgaagtcgggaacttcggtagttgcgacggcgccgccaccggtggcaactgctacggccttggtttcttcggttgcttcggaagtttcggttttcttaccagccatgttaggctccttgtttgtcgaatttcagttatcgctaactgtgggtttataataacggaagttgcaactaagtaaagcaaattacatattaagatttgctctttttcaccttcggtttcgtgattttggcctctttgtattcgtgcacgccgatgaaatctggcagctcttcgcccttctccaaatactcgcgaccgaacgcctggagggtctggtagtggacatcgcggttgatggtggcgtcatagccggcctcaatgatagcctcggccgccttcttcgcatcttccatttcgccgcgaccgaattcggccagaaccttggtcttgatgatgccgtcgttgtcggtttcttccagccacttccagaacttcgatttgttctcttctttgacggaaatgatggccttcggctcgactttgaccgtgcgaccgtcagccagagtagtggtcttttgaccaagctcctccagcagctccggaatggtgttgcgcttgagggttttcagctcctcttccttttcggccagcgccttttgaagatcgaggatttcgacgtccagctgcgaagccttgtccaccaggttcagcagtcgatggccgatgtcggtggcttcaaccgccatttcatccatgacgccaaaatagtcgatttcgcccggcgcgttctctttcaagtattccgggatttcaagctcttgctctttcatgtccgcctccaacttagtgatgttcccttacttgaaccaagtattgagtagatattatgccgcatcttccttgatacggctactgatttacatattaaatttcgtcgcgagtgctaacgtcagcctcaaacacgccatcaacgacataacttgccaggttgcgtttccactccaagctgacctggattttctcgtcgatggaatccagacagatcaggtcgaagtacagaaccgagttgacggtgccgattcgatgatttcggtcttcggactgcatccgcagctcgttgtcttcgtcggtcgtgtagtagatggccacgtctgcggccgtgagcgtgatcccgatccctgctgcggccgggttgcccaggaacacctggacgcgcttggcctggaaatcgtcgatcaatttttcccgctcggcctctttggtctcgccgtagtaggtgccaaacgaaatcccttgggcctccaaatacgccttgatctggtcgatttcctgaatgcgcatggcccagacgatgatggaacgctccgggtcttcctccagcagaccctccagaagatcagtaaacacggcgaatcgcgggttgtcttcgggcggcaggatcaccggctcaccatagacgttgatatagccggacgcaacttgcttgagcttcgaacgcgctgccgcagcatcgaaagatacatccagcatgaaatcttcgttctggagaacgaagtgatagtcttcttccacgcgctgataaacctttcgttgctccggcgacatttcgaagtatatgcgcttgtacaccttgtccggcaggaatggcaatgcttccttcttcgtgacccggaagctgtgcggctcgatcagggatcgcagcttgtccaggttccggaataccgggcgcccataatcgtctttttcgacgagttgcggcggcatggtttgcttcccttccagcttgcgcatgatagcgatcattcgaggatcgtcactgggcaccaagacggaaaattcggccacaaacgcccgataggatttagtccccagaattccattccgcaagaattggaactgcatgaacaaatcggtcggtgcccgcgtcagaggagttccggaaaggatgcgacgggccacggccttctcgcccagctttacgatctttttcgcacgcttggcttgtgggtttttgatcctcgttgactcgtccacaattgcgcaaactttgaatgtatcaaggaatcgctcgacctcatcatagccagcctggtggttgattgcgtcaacgttgatggcgaagacgcgaagaactttttcatctgcgaacgtctcggaatacagacggtccaagcgcgccctggcctttttggaagtcggtcggccgcgccaatccacgctcaaagtcttgatcgcgacgtgggtgggaatctcgcgcagaatccagttggtgtggacgcctttgggggcgacgatgagcagcgcgtccacgcgcccctgtaggaagaggcgaacggcatcggccaaagtcgtccaagtcttcccggtgccctgctccatcaggtatgcgaagttccgtttgttcagggacgctgccagggcattgaattggtgctgcatggcctcggtcttcatgcccttgacgggatatgttttggctttcatttgttctccaaatcggcgaggaactgaacaatgttatccagtccttctgcatagctcgcaacttccaccaagtcgcggctgttaagctcgaacaaatcgaacataggattcagcagcagccaatcggttccgatcttggccaggacgaagccccggccaccccagccgatccgctcccgaagaaaagggatttgcccaggttcgaaacatctggccattgggcaggtggaagcgcgtttcggccactcctccaaagccttgaactcgacccagaactggacacctcgacgattcaggcagatcgaatcggacatgccagaccgccgcgtctccagaaagtcgatcaggattcggccgagcgagcgctgcttaaacgcattcgccgctttcgtttcgcgatcattcatcaccttcgccctctttggaaactttctctgcttgcgatgccaactttgacttctcgcgctcggtcaatatccgcttgacggccttcacgatgaacatgtcgatgccgctgagcctccatcctttgatcaggaaccaagcgccggtcggcgtcccttcagcaatctgctttccgtattgcagatatttttcaggccgaattctgaaacgtatcggctgatcaaccgagtcatcaacgcacatgatgtcgagaaactgcgactggcccttgtacaccgggtttttcccttgatcggccctcttcttctggcgaatcggttcgttctcatcggacagaactttcttcaccatcttgacgatgactaggccatcgtctccatcgcggatatcccgaatgttctgaatggggtttccggaagtcactccaaccagctccggattgtcataagcatgaccccagagcgtgtgagcttcgttcaagtctgcgaattgcacttcagaattcgacaaactagctgcgactttctcccaatcctgaagcgtcttcaggtgggtgcctgccagctctttatattgagccttcagctccttaagatcggccttcaactccttcagatcggccttcaacagtttctccagttctttgtcttggctgattttcgccgaaagaatctgggcttccagagctgctacatcagcagccttgtcctcaacatcctgtgccgatatcgggcaattggccagggcgatcctcgcggccttgacttcctcgcgaagacgcaggaaccgctcggccttcgccgggccgaagcctttggcgttcatgatgccgccgatcaggcgcccgtccgccaccacccagttgagttcggaatgctccgggtccagggccgtatattctacgccttctttggccaattcgcgaaggatggacacagtttgctggtcgtctttcgccgcccgaagacacgcggccgcgtattccaggcgatgatatcgcttcatgtagcaggtccagtacgtcaccacagcgtagctgaccgagtgggagcggttgaatccccaggcgccgaacgttaccatttcctgccaaacacggtgagcatcgtccggggcgacgcctatggtcttggcgccctcgatgaacaattcccggcgcttgttgaaaaattcttcgccctttcgcgcagacatggctttccgaatcgccgacgtttgttcccagtcgaactgcccaatgtccttcacaatggacatgatctgttcttggtacaggaaaactccatatgttccagacagatactgctcgacctgcgggatggtataggtcacaggctcgcgaccggccacgcgctcgatgtatttggtggccatgcccgaagacaacgggcctggacgggcgagcgccgttatgtggtcgatgttttcgaacgcggtgatattgatcgcattggcgaccgagcggacggcctggccttcgaactggaagatgccggacatcttgtcttcgttgagaatgtccagaaccgccttgtcgttcaacggcaagtcgtacagctcttgcgccgtcacgcaattagcatcttggatgacgcccagagttcgaagcccgagcgcatcgatcttgagaagattcagatattctgaatcgggcttgtcgagctgcgcgacaccttcagaagttaccgtgcagaagtcgatcacttcatcgttgcagaccaggatgcctgccgcgtggacgccggagtgggatgggtggatttcgaggtcgcccatgcaggcggacgcaatctcatacttttcacggaagtcgcggccgggctgagttttttcgaaagtatcctccaatccttttccatatcgttcgtccgccgatgtatattcgatgatcgagtttttgatgttgtcggtgtcgtggaatggaatgccgaagcgttttccgacgtgagcgataaccgacgcggccttgagtgtgttgatgttcccaagctttaccacgttccaagtgccgtatttctgctggagatattcgaacactaaatagcgatgggtatcggcaaagtcgatatctatatcgggaagatcggaacgggaaatgtcgataaagcgctggaagagaaggcgatgcgggagcgggtcaacctcggtaatgcccaggaggtagcagaccaaagagccggctgaagagccgcgagccgggccgaccagcatatgcttcttggcgaacgcaaccagatcggcgaccaccagaaagtagctgtcgaagtctttcagctgaatctgcttgatctcttcttggaatcgatcctcatactcctgggtccattccttgatgtggccgcgactgagacggtaggcttgcccctcgcgagccagcgcgacgatatccccatccaggtggatcataggcgccttcgccagtttcacatccgccaattgttcgactaccgcacgagtattggcggcggcggcatcgaactcttcgcgagtcatgatgtggcgtaaacggctccacaactcctcttcggtggcgatgtggcgaaggccgaccgattcccgcaccttccaggccgacgcgaaatcagcatggtcgatggacggcatgtcgttgtaagaggtaattaccaccggctttccgaatgccctggccgtctccatagcgccgtgcgcggcgaccatcgacgcgggattgatgtcaatgtagtcgattccggccagatccagatgggcataggcctcgccagcgaatttgatgacgccgtcagcttcctggaattcttgcggagtcaatccttgattctggaccgacttggaagtcaagcggtagaacttctttgtgtccttggcgagcacccaggctttgagcttcagctctttctcgccatcgtcggcgcatttgatcgggatttccatgccgaatccgcgaggcagttctgccttggtagcggcttgttcccaacggacgtggccccatgttccatcatcgacgatggcgacgaatggggattcgatctctttggcgcgctcgatgatctccgggaatcgaccatatgcggcgccgtaggagtaaccagagcgaacgcggagctgagggaaagacatcatgcggcctccattgcttgatacgcccgatacactcccatgcgcttgcagacttcgtggagcagccgcacgtcgtcgagcgcccggtgtttctgtacatatgggccgcagtagtgctcataaagatgttgcagccgcatgcggtggccgaacaacggcgccgactcttccacagtacagatatcgagcgatgggaaattgacttcgtccaggccgaacttgccgcgagccagatcgcaggccagcatgaacttatcgaatggcaggttgtgggcaatattcgcgtcggctctggaaaagaagtcgcgaactttctggcgctgatcgaggaaagatgggtgcttgatcaggtcttcgttcttcaacccggtgatcttggtgatgatttcctcgataacgattccaggattgcagatgaactctacttcatccaaaatcttttcgccatcagttatcacgccggcgaattcgattattctcggctgctttctcagactcaccctttggtggaacgggagtcctgtggtctcagtatcccatacagcgaatatcatgtttgttccctcttatgtcgaaaggccggctgctttcgcgaccggcctgaggagtataccgcgacggctgaagatttacgccttctgtccgtctttcggcgtgatgcggccggagcgcatggtggcgtgaacaaacgccgaatagttgatcgagtccaaggccgaatcggcatccttgaacccgctattcgccaggcgagtgagtttacccaccatgtgcatcacgaacagggcgagtcgatgatcatcggcggtcttcgccaccaggccgttcgggaagaggatttccatgatctttccgtacatcagatcattgcgaccataggtgctctggcgggcgcggaagacttctgctgcggcgtacagattgttgagaacatcttccgcgaaatcatcgggatgggaatcatcttcgcccggccagacggattccatggcgaacggcgcggcgtcttcggtcgggtctttgggctgagccgtttcagcgagcggagacggggctttcgcaaacgcctcgtcgagggtaggggcggagttcggggcggccgggaacggctcgcctgccatgtcgttgggcgcgctatcggggtcgctatcggccgcgacggcgaagaacggcgcatcgcaaccttccaggttcaggatgtaggagtcgatccccaggctattgtaggcatcgatgatgtcctggcgatcatcgaacgccgcgacgatcttggtgacgccttcgattttcttcaggatgtcgagcgcgactgcccgcttgaactgaggcgccggctcggtgttaccatacggccgcatgatgagttcatactcgcgatgttcggcgatgccgagttcgcggtggagcttggccctggtctggaaaaagtggttgtcggttcggccggtgacgaagaaaatcatgaggtcggcgtcgatggcattcctgatgcgacctacagcgtgcgggttgagagtgtccttgtcgagacgagaatgatactcgtcccattgccgttccaaggcgaagctcttgcggtggctatcgtcgaatacgcagccgtccagatcgaagatgatgatgccattcttgggtttgcgttccatattcagatttccttgatggttgctttctgggtgacggttttatcgatgaacgtcccatcagaagtgaggcggaaaacttcgccattctggctgaaatcgaacgattgcacgttcatcgtgatgcgaatggattcgctgccgttggtcacttcgacttgtgcgatgtcgccaactttctcgacaatgatcttcatgttacatggacttcccattaacggccacagggctggcctcttgtttttccgatccccagaaatcgcggcgcagttcttcctgctcggccgagcgatccatccatggacgatagaacttgcactgatagatcggtttcaccggcaactcaaccacaggaatctggccgggtttcgtctccagagcggacatgaagcggtcataggattgctcatgaatctcatcttcattcagaaccttcgatccatagcgcgggaaggcacaggagccagtagcgacacagtgcggctggagcagactatcgaacatcggatagacttccagaaccagtcggcgcatttcgcggaaggcttcctgatactccccttgcgtacgaacacacaggcgaactttcgccatgtcgctcagagtgcgcaaattgaacttggccgcgatcttcgtttccatgttggaaggaatgatggcacgagcatcctggagcgatgcgccggcctccaagagcttctggtaactggtctgcgcgtcggcgatggcatcgtgccacaggcggttcaactcttcgcgggcgtgataggtcgggtccggctcgccattggccgtagcctgctcatcgaaatcccagcggaatgcttccggctgaacaacggcgctaacctccagggcgcgactggtttcctgctggtaagcaccggtccgcgtccggacgagttggtgggtaaaattcttgcttacgccctcgatctggaaaatgaagtccacgaattcgaacggcgagcgaatggtgtccagcatgtacttccagtggtcgagcttttcggcttcggtcatggtcgccgggtcttggccgcgcatgcgggtggatttcgtccccaggaggagttcccaggcgttctgggtgtaactgatcagagaaatcttcatcagaaatcttccggaattggcgtgaaggtgaatttttctgtgagagcaagtgccaggccttgggcttgctccttacgaagtccatactgctccatctcttccttaagcagttcgcaggcctccagacgagactcatactcttcagcctcatgaactgacgagaagacggttccatcagaggttctgtatacgagttcaatagccatgatcgcctcagtagcagcggatgatttcggcgcggatatctcgacggtcgaggtagtgctcacgaatcttatcgcgggcgcgctcggcctcttctcgactgccgaacgacaggttgaacgaagtgaaaggcttatcgtccaggcgcccatcgccaatcaggtacaggatgcctaccagcacgaaagacggcgctgtctgtcgcgtttgcggcgggtcgatttgcatttctaggaaagacatgggaacctcttcaggatggtctggtgagtacatcaatagcgctcctgctgagcagctacggtttccggctcgtagatgagcatgtcaacgatttccgggcactggcctttcacccagtcgatggccgcgaccagtgtggtggaagcggagaaagagaaagtgcggtaagactcatggatgtacggcgaccccatcgaatcgcgctcggtcgtgcgagaaatgactgctttgatattaacgatccggcccatcttcggcctccactttagcgattatatctgacaggctcagcttctcgccattcaggaaataactggcgcgaaacttcctgtcaccctctggcccgacgatccgggccgttatggtgagactcccgccgccaagggcatcggtgtccctgaagaaagccagcagcgcccgcttgagcgctgcctcgcgaggatcgacggccattaacctaccacgttccagccgtgctgagcgcaccaaaccgcaccggcccctgcaggaaggctattcagaaggaatacaggggtcaggcggccatcctcggtcatgtggatgaagtagcgtgcactttcaccgagccattcggccttggcgatggcgcgttcaagattggccttggtggcgtaggtcttggtggtgtttttgtcggtggagaaggttacttcgcgggccattttgtcgattccttttggttgaagggtttcgcgtttcgatgagggaatactactctcacctgactcagaagtaaagcacttcgtgtcgattatttcacgaacatcttcttggccttctgataggacgaagaagtcatcaggcgctcgatgacatccatgtccgaaaccaggtcatccagaaggacgttgcgccaggtagcgaaccggccgagcgagaagatgccggcttcatgggtgaggttccagatcatggactcgcgctcgtcgcggccgagcggaacgattttgcctttggtctggatggtcggctcgccgtcctcgatgagatgccttttcctgatgccgaaggccgcgcaaacgtaatccatatcccagtcgctgtcccattcgatggtttcgattttaccatctaaagtctccactatccccttagtgatggattcgacgatcagagtatcaccggtgatggacgctcgaaacgttcccactttaggaccagggaaatacacggtctggaagacatcacaagggatggaaagcttgtatcgactcacgatgatggaggttccttcaccgaatgacgggtcgattcccaggtccagccctgccgcagccaggttggcgcggaatggcgcggtgctgatgacgttcacatggtcatcttgccggcgaagatactggaagaaagaggcgtcgaaaggacggctccaagtgatacgattcgcaagcttagccaccagctgctcatagtagtcggccggtgcgatccaacgcttttcagtcgccagattccagatggaccggtccgacaggccgcccgttactttcctggagtacatgttgcagtggtcgatgcgcggctgggaaatgaactcgccgtcgatgtagatagctttgtgtacagtgacttcgcggaacgggatgccggtgagttggccaatcactggcgagcggaatcgcagaagtgcgttgtggcgctccttattctccggcgtcgccgcgtcgatgatttgggcttgaggaaagcgatgcgcggcgatcagtccagcgagtccggcacctacgatgattactttctgatcaggaatcatgatatgttccttatgagtgtacaaaacttgagaggataaaaaagggacccattttcatgagtcccttgaagagctagacgattcaggctcagaggagcggcggcttactcctcctcaccttcggaaccatcggcgccctgatcttcaccgtcgtgctcctggccttcgtcatcggccttctcgtcatcgccctggccagcttcgtcttccttcgaagcgatggcaaccagatcgacccagcccatgatttccagcttgctcagatagctgcgaaccgaggtgccgtacagcaggtgggccaccttctcgccgaaggattcgatttcgaccggctcaccaacggtgcagtgctcgttgatgtaagcaaacaccttgccgcgagtcgagaaggcctgcggggttccatggccgtcgccggtcgggatgaagtgagtggcgcgggggcgacgcgagccgttggacttcaggtcttcgcggcgggcttcggccttcgcgcggcgctcttcctgctcttccttgcggcgctgcttctcggcttcgcgctctgccttcttctgctcggccaggcgcttgcgctcttcttcgcgtgcggctttctgggcttcctgcgcggccttcttctcttcggccttcttggcgcgctcggcttccttctcggccttcttctgctcgcgctcggcttccttggccttcgccttctcggcctgctcggcttccttcgccttggccttttcagcgcgctcggcttccttggcggcggccttttccttcgccttctcggcgcgctcggcttctttcttctcgcgctcggctttgcgcttctcttcgcgctcggctttcttctgctcggcttccttggccttggcttcggccttctcggcgcgctcgcgctctttacgttggcgctcagcggccttctcggccttgcgcagggcagcggcttgttccttggtcagctcttcgccttgggtctgttcgttctggtccttctgttccatgttcttactccgggaatgtttaaagggatggcttattggcctgtgaggggattatctctaaactaattgaagaagggaatacccttagcctgaactttcctaaatattttctttcgggaaagtccaaactctagggaacttatttatgttcgagaagttcctagcttttacgcaagaacagtaagtattcgattgcgcgagttatcccagtatacatcaactgactataagggatggacggcaagttttcttctaacatggcaacccgtttccattctgaaccctgcgacttgtggaacgtcatcgcccagccgaagtcgaatccgccaatagccttctgcgcctccagccgcacgtcttcctcggccgaaaagctcaaaggattgaacttcacccagcgctcatagttcgtgccgataatgcgaactttggcgaacaacatttcgtccggctcgtcatcatcctcttggccttcggggaccggcttgagttcgagcaggatggcttgctcgccgttcataatgccatattcgtgctggttcccggtgcaaaccagcttctcgccgatttccggttgtccacccttgtagccgaggatgcggcgcgccctggcgttcaaacggcggcgagtattgttgtaggcgcaaaggatcacgccatcatcgtccaagaacgtccgcatttcgtcgtccgacatgtcgaatccggcccgtaccagaatgtcgtcatactcgcggcagggtaggcgcttgccctggcggacgaacatcgacgcccgaacgatattgccggcgttgcgctcgatttcggtcatgatggtgtcacagctgttctcatggaaaatctggacgccgcgcacaggaggaacttggccaaagtcgccaatctccagaaccggaattcggtgcgacagcaagcgctcttcatcccactcgccgatcatggacgactcgtcgagcacgaccaacttcggcttctcgtcgagcgagtctttgttggcaaacatgatttcgccgtcttcatcttcgccaatcggccgatagatgaagctgtggagggtccgggcattggtgcaacccttctcgcgaagccgcgctgctgctttcccggttggcgcgacgaagaccgtccagtccatcgagcagcaaagttcggcgatgatcttcgcgatggaggtcttaccagttccggcgaaaccagcgagtcgatagacctggcggcggtgcgctcgatcacaccaaccgcgataccagtccacaacggaattgatcgcgtcgatctgctgactgtttggtcgaaagccgaatcgctcttcgatctgatcgacggtgaagttagatgctgacatatttgcgttctccaacgctaggtttaattgaatcgaggctcagtttaagcacgccgtccacagaccagccagtatcacgacgatacttgcggccttgcggatcgacatagaagttcttcgtgcgccgcagcagaacataatgccaagcagctccaagcgcgtggacccttcctttatacgggaaagccttcgcctgctctgcggcctctttggccccagggagccagcggacggtagaaaggaccaggaccgcacccttaatagcctgggaagcggcgcggccgtcctgtgggctatagcgatgtctatcgaagtctacccagtggtggttgccgcgccggagcttgaccgttcgggatcgcccctcgaacaccaccgtgccttcgtgagtaaaaatatgttccgccatcgaatgttcctttataacgtacagttatgctttacctctgcgcaggaagagtatactatcagctgactcgccaaagcgagcgaatttaatccaactttacttcggcaggaaagtggccgatactagcgccgccgcctgtactgccctccaaaacagaggatacattaaatgcaagaatgcaagatttcccgcgaccaactcccggtcggtaatccgaatcccaatgtcgacaagacccgcgacccgaacctgaagcccggtttcctgcgtcgcagccgcgagctggaaccggcgctggcagttcgcattcgtcgcgagctgatccacgccgaagcgtccgacttggccaaggccggatgggtcaattcacagtccagcctctatggatcgaaagccttcccgcgccattccgtcgttcgcgttaccggagttccggaagatggagctttcatcggcatgctgatcggcttcatcgagcatcgcgagcatggcgaatgggcggtcatggaagccggaacgaaagaaggcggcgcagtcatcatcccggtcaatcacatcacgcgagcgtcattcgccgaagccgaagagttcgccgaaaagtgggagcggaacttgggctggcgcctcctgcgacagctccgcgagtgcggcgccctggccgggactgaagacgagttcctgcggcggatcatcaatcgatacgttcgtgatcgcacgatcctcgatcaccacaaagtcggcgcggacaaaatctatactgatgcagtactcaaaagcatcggcgaaacatggccgaagattccttcggggaaattcgtcggacaccgagtcgcgcagctcctgatcggccacaagctaggtcgagcggggaccattctgaatgacctggtggacttcctggagaagttcgcggccgggcgcgataaaattctcaacatcgccatctgtaattgaggtgaatgaaatggttgacttggaaaagctgagtccaaagctgagtcctcggcagcatgccgttctactggagatgtacaggcatcctgagcatccagttcacagatcgccaacgaatttaactcttaaggctttgagacgaagggggcttgtcgagctatcctggaaggattccgtggctggatatatgttcggtcgccaaccttgctggaaaataactgatgccggcataaggcgaatcctgggagtgctggggaataatatggaaaaagaacaaagcgaagatcgcccaagcatccctgagtttgagaagaccgacgccaacaaactctatgatgctctggagacgatttcgctgctggagaagaagttggacgaatccgaaaagcgcgggagcgagctggccgcgagctattgtgacggcgtagtcggcgatgaatacggccatccttattgccgttataaagtggaacgcgacgccgccttggccgaagtagagcgcctgcgagaatcaaaaggcgatccctctggcagcttcgacaggtgtatgaagatgatgtacgagcgcgacgagaatgcaaaacgactcgacgccgccttggccagggtcgcggagctggaagggaagttgacggactgggtgcacgaagggttccggctcaacgaggcgctagcggtcgccaaggctcaacccagcgtgccggaaatatctggcatcggtcgcgatgccgaacatcccagagctgtagtgctgtatctgcgtaacgaacccagcgatgaagatatgcgagcaattcagaactttttgcgcgccatggccgcccccgctcagcacagcgtgccgaaagcatggctcgacgttcaggcagagcgccgccggcaggtcgaggcccaggcgctaaggcaggaagtcgcagcactgcgcgcaagggcggatgttgtgccggaggtattcgggcttgagcggtaccgcgtagaaaaaactgggaagggtttctggccatactgcgtgcgtgcgggggatggaacgcgtgaactgttcgtcggccacttgaagcagtgtcagcgggtagcgaccgaattggctacggcgtttgaagatgggaagtttatcgccgcgcccggcagctcggctcagcacagcgtgccggaggggtggaagctcgtaccgatggacccgacatcgcagatgacctatgtcggtcagtccctgcgttatgacgcggtaaacagcatcggcgagatttaccggcaaatgctcgccgtagctccctcacccatcgatccggccgcgcatcctcagccgtgccagcaaccacaggcccatcctgcccgctgcgggtgcgagcggtaagtgccaagtaaggaattcatgtaatggaacagaagaaaccttcaccagtagatggagtcatcatgaccagcctcgacgttctccggaaagcacagcccgaagcccaggacgagtatgccgtgtccatgttcgcaacggcgatccgccagaaaatgcagcgctcccgcgataaaggccgaggcggctggatcgactgcgacgaagatattctgatcaacggattcgccgaacatgcgctgaagggaaatgagaacaacctcttggacctggcgacgttcctgatgttcatgtgggtgcgcggcatcgacgatgcgaagattcccccggcgctcgaaaaggcgcggcagcacaagatcatggaagcatggagtcgggtccacgaagatggactaaactccgccagaaaggcgagtgctgcgcgacagttcgtggaagtgcctcgacgcaaggggcgcccggagcgacttgcatgaagcctcacgaaataagactggcacaggccgaagagttcctgcgcgaactcggccgagggattccggacgacgaacgggtgatggtcggctacgctgaagaggccacagtccaaaccgacgagaacggtcgcaagctcaacgccggctggtggcctgtgccctggaaggaagggaaatacatcaactcccgatccaacgcctacgcctgtatatcgtcgtccatcaagacgcccaacccgaagaccggccagatgcgatactggcgcggcgaagcctctttcggccacggcctagcgttgatggttgatgacatcggctccggcaaagggtcaaagggcgacttcgaccgcgacgagttccgcgagcgacttgagccgaccgcgattgtggagacttcgccgaacaactaccagttctggtatttcttcaaagagccgatgtcccacatgctccagttcaaggcgctgctctattcgttcgtggaccaggtgctaaagaaaggcggcgacaacaccgtcaaggacgtcagccgttacggccggatgcccttcggcttcaacaacaagcgcgggaaagacggcaagttcaaatatgccgacgaaaacggcaagcccgaactcgtgcgactgttcagcgccgactattccaagcgctactcgccagaagagatcgcccaggcattcggcgtccgcatcatcatgccacagatgaagaaggtggagataaaccgcgacgattgggtgtatgaccaagtatggctgaagtatgccgagcacatctgcacgaaatacaagatgggcgaagcggcaggcggccaggtccagcagaatatgtccggcaaataccgcatccgctgcccgtggggagacgagcacaccaacggcgatccattcggcgcctactttcgcggaccgatccctggagccgagcacgaatatgtgttcggctgcggccacgatacttgccgcaaagagcatcgccggacgtgggcggccttcacggatgaagtcgtgctaccctatatcgtcgaacaattggaaagaatcaaccgccgtcatatcggtgaggagtagacaatatgcaaaacgatcctggaatcctgattaccgccatcggcttgctgttcctcggccttatcatcttcttcgaaggcctaaagggatggaaaatacaagtcgcaaacttcctcgcgtcgcttctgtgcttcttcttcggcctttctgctttgacgttctggttcgtcgttgcgtttgacgtattttaatcgacgaacggtacagaaattttcggatggggacggaacttattagctatgccggtttaggtaggagataatagccgtccctttcgcctcaatgtgtagaggcaatgttgaatccgatcatgtaaagcagaaggcggcaaacctaacatgattatcgacgaagataatatttttgatgatggcgaatcagggtccagtgagtttgatctcacgcagatagaagatgctggaatggaccctttgatgaccgccgcgagcaaggcggccgatgatgcgattgcgaggaacgaaacgcatcgcgcgcaaaaggcggcaagatacgccgaggcgtatgctgaaccagacttgaggaagcgagcgcggttgttgatgctcgaccaggcgttcgatcttccggtcagccgggtggtgaaagggccgttcgatgacttcatcacgaaatacagctcgacgtcagacagcaactacctcgcggtctatgatacgttgttctgtaagggcgacggaaccgtcccacacccgcacttcgacgagtttcgcggccggctggtggaccatcgcggcgtggcgttcaacaacaagaccctcgatccgattgacctgatgggcgccctcgcggctgcggccttggacgatccctcgattaagaagacgattgagacttgctgcgtgtgggctcgtcgatatcgccgcaactctctgatcgagacgttcgagaagaagataccggagtgggatggtgaagagcgaatcgacacgctgctgatcgacttgttcaaaccgttcgacaccgaactcaaccggatggtgagcaagtatttctggctgagcttgtactgccgcatcaactaccctggaatctcggcgccgatctcgttggcgttgattggtgggcaggatgcggggaaatcatatttcggcttgctgatctgtaaggaactgtccggtgggcgcgatctggctccagttcagctcgacctgagccgacacgaccagacgccgttcctgcgcaacatcaccggcaactcggttattgcgaacgtcggcgaaatgtccggcttcaaaaagggcgacatggaacgcatcaaagaattcctggtgcgatcttcggatacattcgatcagaagtttgagcctggcgaaacgatcaagcgacaatggatcaccatcatggacggcaacggatacgatggactccagcgggacgactccggcaaccgtcgattctatccgatgttcgtggcacaacttcccgacgaagatggaaagccgaactgggttaagccgggcgatggtaatgaaccgttcaaggtggacttcacagacttcggccgcaagttctggcaggctatggctgagtgccgcgcctggatcgaagagcatggcgtcgatggatacctgaatatggtgtcggaagctaaccgcgaagtgcagaacttctctatttcggaaatggagaatgcgcgtggcgtggttcgtgatgatacgattgacatgtatctgatcaacgttctgataagttgcgagttcgaagagatcaagccgggcaagaattccaagaatcctgggtggagggctgacaccgtcaccattctgaaatggttcgatattctcgccaggaagaagccgatttctcgccacttaactccgcacctgaaggcgctggggttcgtcccgaacaagaacggcctggctggttggtgcctgcccgtcgataaggttgcgcctggatggacgaatagtatgcaaaccacgctgccgccgttcaatgatgcgcttgtgtacttgctgaggaagggcgacccggatatcactgatgaggctgcaatggcaaagattcgggcagtccgggccgagcgagccaagattttgggcgaggatttctgatgtagtggtggagtgtacttggattaggccgccttcgggcggtctttttctttggtgcggcgtacattagattccggcgttgggcgggattggtagaagtgaatacagtaatttggaccagtttcgagcgcgaataatggaaagtcgatagattttcggtatcggtttagcgtgtatggtggatggattttgcgtgaaatgttgagaaattgcgtgtttgaggtggacttttcgtgggaaatagccgcaaattactgtatagcgattctgagcggtaatttgggaagcctactgccgcgtgggttagcgggccaatttcctaatttccggtttttcgagcatgggttaaaactattctacagcgaaaatcgattgcac

SEQ ID NO: 3 - DNA, 43643 bp, Phikmvirus
  source 1..43643: mol_type = genomic DNA
tctaattttggtatcgtcgtgtgagaaccctcccgactctgatcagcccacccttcccccgtaggccctccgcctggtgggccactgcctcgcattgcctgggtgttgcctgggtcatccctgggagcttccagctacgctgggtggtggtgggcttccctgccctgtcgctgtcctgtcgccgcccattctacgcatcctggcgggagtgtcaacccctgggtggtcggtgccttgctcggctacgctccagcgcttccgcgtggtcggctaggcggttggctcgccagcgcttcgcccactctacacctcgctccacctcggaccacttgtccgccagcatcatgcgctgccatgccgcgtcctgctgtagccatgccctgctggctctgtcctgtctgctcagcatcctctgtctcctctgtctggctccctggggcttccctggggcgctgctgtggtcctgtcgggtgatggtgcgggagtggctggccttgcctcttgtgcctctgtacctgtggcattgccctggctctacctggctgctccctgggtattccctggggctgcctgggtggccctggccactccctctaggccacgtactctactcgcctccacctgtcctgtctagtcctgctctgctccctggagcttccctggatgctacctgggtgctggtctatctccctggctctgcctggcgctgtgctgtgctaccgctggtcctgctgtcttgcctcgccgctccctcgcctgctcggtcgcacctgcggcgctgatggactcctgtttgtccattgtgtgtgacataaccgcagccttagtgccatgcgggttccagggcgatgggtctggctggttggctgctccctgggtgggggctgtcgctccctggtaacgcaaatcctggctagctagactaagcctcgcgcatggggtctctatacgcgtgggaaggctccagggagcgcctggggaggggttgacacgttggcggtaggtctgtagagttcgccctgtcttcacgcaataccgccttcacaggcagcctggagacagggttgacacactacccgggcatcggtagagtacgcagccagaacgacgggagattgcaaccttccaagcgcggcacaagccataggcgcaagggacacggcaagctcttagggcaggaaccgcagtgtgtaaggccggcaggcatcactggggggattgacaaggtaatagatgcggtaagatgtgcggcgtcaagtggtcccgatgtacacactgtgaagggattacggcgcggtcagacagatgaccggcaccgcttgacactgtaaagctcagtcggtacgatgggcacccatagcggacgtgatggtccggggcgatgcggataggacgccttgtttataacctgaccgcaaagctgtgactccagccgataggactgacccaccacgtaaatacagacgggttgacacgacaaggccaagtcgataacatggccgccacaaagggaagcgatagcttcctggcggtagaggttcgaagcttcaccagcggtacatggactggtgcggtaggttgaccgaagctgcaactggttaggcagggtcccagggaatacctgtcgggtgctgaagactcacccaaaagagtctgagcgggaagcctccccgtccacggttaagcaaaggcacgttagtgccggtgggaacgaatagagtgtcagtgggatcgagaactagaaacctcggttaatcgcgactgacagtatgctgggtagtatcggtgggccgattgaacaaggccaggcagatagcgcaaagggtacgggggatgagtgaagacgatcccgaagagtatgcgcaggacaagccagaaccgctgatactacagggactatgccaatgccaaggtttgtcccttgaggcccttccaccgaggggattcaagagacagacctagttgaggaatgccgatggcacacttcaaggctaaggctcccaagtcgcccttcgctacccaggtagcgtactggcgggattgggaagccaaacgtactaagctcatcgcacaggataacgtcgaggggcgcaaagagcttcgcaagatgcgtgacgtgcgctacgctaccgacccggagccagcgccaggacgctaccataaccctgaacagaaagcgttcgtgaagggtagcgaaggcaaggcgcggaacatcctgaagggatggaacgctaagaagtcgcaagggaagggtttgtaatgccacgtgtgaatgaactgacgccgcgtcaacgcaaggccgccaaggctcgccgcgacaaggcacgccggattgatctagcgcacaagatgccgaaaggcgccgactgcccgatcttccgcaaggctgaacaggcgcaagctaagcagccccgcgtcgataccctgaccactccccgcagtgccggctacctggccgccgctgcttacctgaacaaatccatctgaggtacataccatgaccaacgcaatctccaaaaccgtaatcgcattccgtggcaccgaagagatcaatcgcgctatcgacgccatccgtgtccgtggcaaggaactcgacgaagccatccaactgaccggcctgtcgatcatccatcacatcgaccagtgtggtgacgtgaccgtggtcaaggcgctgtatgaagccatgccgaagggcagccgccgcaatgcgctggtcgagtggctggtgctgcacggcaaggtacaggtgaataccgacaagaagtcgaacaaggacctgcccttcctgtacaacaagttcggcaagaccgatctcgtaggcgccaccgacaacccgtggtacagcttcaagcctgagaaagcgctggaccaggagtttaacctggccgctgccctggccacgatcaaaaagcaggtgctccaggctcagaccaagggcaaggtgatcgtcggcatggaactgctgggtgatctggaagcgctggccgccaaggctgcacccatcgccgagcagagcaagcgcgctgccgcccattgactcaagtcgaacgcctgctaagcgggcgttccgctggaatcaatgacaactggagaaacacgatgagctttaagcaacgtctgcaacgtcaaatcgccctggcccaatacagccgcccggctcagttcccgtacggcgagcaggccgtccaggcgaagggagagtgaccatggacttctggattgccctccccttcctcgaactcggcctcaacctcggcgaggatgaactgcgcatgttgtggttcagcggcctgacggtattcttcatccacctcctgaagcggtgactcaagtcatggccctggcgggcgaccctcgcctactccggggccatcgctggactcatcacaagcgagaactaaaccatgcaagctttgaatactctgttgatcgcaatccccaaggacccgtcgaacgcattcaatgcagccgacaaggtgctgtgcgcccatggcttccgtatgggtgacctgaataccgcgcacgtgctgacccctggcgggttcgtagtagtgggcgccggcgtgaccgtcaaccgctacgacgaagcgtatcgtatgagccggaacctcgattccgaaggcttcgacgttctgctggtccagggcagtccactgtccgggcacgtcacctgccaggcgtacggctggatcaatgcggaataccgcaagggctgcgcgaacgggcgcccgatcttcgacattgcaggaacctcgtaccatgtcctcgcgtgatccctaccgtatcggccaccgcgtggggctggtgaactacagcgaccgctacctaggtgccgacgcggcaggcaccaagggcgtcattgaagccataacccgaccgtcccgctgtatgacgatctatcacgtacgctgtgagcggaccctgcgcttgatcgaggccgaggcccgtaacgtgcgattcatcagacagctaccgacccgcaaatgacgtggcgcataatcgtcgtcagcccatcaagcggctgcgccttcgtgtggagtctcaagcggcctgtgcggccagtgcgattctactcccgcaaggcagctaaacgctggctccgcaagcaccgccgacagggcttgcctggccactactacctcatcgtgaactggagcaaacgcctatgaatcctacttacgtcgtccgcctcaaggacggaaccacccgccaggtagtcgccgacagcatcgtcaccggccacgccttcgtcgaactctggttcctcggcggggcggtcgctatctacccggcctgcgaagtacaggaggtccaccgcactgacctcgtaaaggagggtggtgatgaatacccgcactgtatacgtcaagccgcacagttcgaggtgcccgccggtattgtccgcaggacgcctgaccccgggtgaactctaccacgtgatcgcacctgccgaggtcgaaggcgtcattgtgctggcaacttcaggcccgtggcacatccggtccgtggtggtgcatagcatgcacccctcggtatatcccgtagggatggctgtcactgacgattcctggcggttccgccgcctgggtgtgagcgagtacgtccaactaattcaagggtacgaacaatgatcgccatcctgttcgtactcggtctgtactgctgcctcggcctgctggcaggcgcctgctactgcatcgcagtggccccgccattcgagaacccgacggaagtgcagttccaggacgcatgcgtgatcgggtgcatctggccactcgtgatcctcgtcggcatattcctggcactccgtgcagtaggccggggcctgctgaccgggctgaagcgtcacctgaacatccaataacctaccggaggtaacatgatccgcacccatacccacaacaccgaccgcgaacagcgccgcatctacaagctcactgagctgacgtcgggtgagatgtacagtgtagtgcagcccgagtccaagcgtggcacgctggtggtcggagtagcaacctgggatagccagagccgacctgtagtgctgcccgtggtcattcacgatgtgggtgcgcatccctcgccctgtcccaccgtgctgcgcaacgacggctggcgcatggtgcttgccgccaagggcacccaggtaacactcaccgccgagtgaccaaggcgaaggctggtgcgccagccttccaccgtggccattccttgccgcgaaccaactcaaccgaggagctacaacatgaccaacgtcaacaccgccaccaccgagaccaccaccgctgctgccctgggcgccaagctcatcaagaagccggctaccgtggaagacttccgcaacaacgtggtcttccatcacaccgccctggccaagctgaccgaagtctacaacgaggcggtcgttgccctgcaaaccgccgagcgcctgtccagcctcgtcgccggtgacgtgatcaccttcgaccacggcaagggcgagaaagccgaagtgctgagcggcgaagtcatcagcgtggttgccggcgtttaccaggtgctggtccgcttcagcgacagcgcacctgccaagctgctggacgtgaaggccagcgccatccgcgccgtccagtcgtcggcagcccaggctgctaccctcgacgaagccatcgcccagggcgagtaaggcccgcacgtaataggcccggccctccgggcctattgcgagctagccataccataggaggagtcaccatgagcaagcgtaaccccgagcacatcagcggcgccgtgcgtagcgtcagcgtccagaagtcggcagccgtccaggaactggaggatcgtctggagtctgccctggccgtgtgccagcagcgggcggaagacatcgatctgctgagccgccgtctccaggccgccgagcgcgcccgccgctgggagatcgacgagattcgcaaccaccaggcgaccatccgcctgttgcagaacgacctgaacgctgcgcatgatgcccacgaggcacaagagcgccgcgctcgcaaggcaaccatcatggcctgggtatgcctgctgaccgcaggtttggccgtcaccctgaaactggcaggagtctgaccatgcagtgcaacgacctttacactaagctcgcagcgagcatgttcaacgtgccgtgctcccaggtgaccgccgagatgcgccgcgtagccaagagccgggcattcgcgtatgcttacactcccaagcgacaggcgtcgggtgggacgtacaccgcccgcgtgagcggcgtcacctgtgacggtggcaaggtggaggtacgtctggacaacgtggagcgcgccgacacctgtggctatgccaagctggaggcgctggaagcggtcagcctgtaccagggtgccgcgaagcgcgccgatgagtatgaaaagctactgctccaggcattcccggtggtggctaagcgtcgtgagcgcttgcgtatctccgggccgctgtcggcggaagacttccgggcaaacctgctcgggacgtgttccgcatatcggaatgccctcgacgccatacggggcgagattacctcgaccggcccgttgcggaaccgcatatgggcgctggtcgaacgtatgcaccgggccgagacgaagctcaggaatgctcagtcggagatcaaccgcctgcgggagcaggaactggaccgcctccgcaaggacatgtccagctactgcgccaacgacgttacctctacggtgagtgcagcatccgcgaaggataccctacgggtggcaaccttcgccgccgccctcgccggtggcgtcgtaggtagcgccctgatgttcctgctcagctagggcgaccagggcctactccggggtcaaatctgagggcgttcctagagcgccctctcgtgtgagtctggaggatcacgaacatgcaataccatttcacgcattacaacggataccgcttcggcgtcgagctggaagacgaggctgtcttcccgtgcatcgacggtaagcgggcgacctgggacaaggtggcggcgtgtgccggtagccttgtgcattacatggcgcaggacctgattgacttcggccagcgcaagttaagggagatcgaagatgagcaagacgagcctgtacccgctgagcctgcatcccggcctgattcaaatcaggacgattcacgtattcagcattcaagctccgagcaacgccgagaactggtggcaatggttcctctggcagcggaagtaccacccgctccgggagagcctgagtccagccggggaactgagtgcgagtatcgccgagtgtgtccaccgcctccgccagagtggctggcaagatagcgacatctggcgcaagaagggaggcgtgctggccctcggtgccttcgacctgtccggcctgatggtgggttcctgcctcgtagtaggcggtgagctgaaggccctgtgcgttgatgaccggcacagcaggcagggtatcggcgctgagctggtacgagctgccgagctggccggtgctgagcacctgacctgcttcgagttcctggagccgttctacgccggcttgggctggcgcaccgagcgccgtgaggcaaactggactgaaggcgagccggatgtgctgtacatgagggcacctggccatgacgcatgaggtgatggtatggcttatcgcgaacaaaccgctggtcatcggagtcgccttcagcctggtggccctgggcgtgctgctcacacagaacaacggcggcccgcctatggcgcccgcatgacctggcacctccaggacatgttcgaggcccgaggtgggctgaggcccttgtgggaggagtggtatcaatggcactgcgccgcgactcctggctaaagcaagcgcaatccctggcagtcggccaggcgggtcgattccgccacgtcctgggatgccagagcatgagccggggcgggaccaacatgacctgcaagaacctgcctgaccgctgggtggcatactgctactcctgtcaggaaggtggcgtggtcgagaaaacgcacgtgcggagggtgcaatgcgcggatcaagaacgcttcatgccctggcccgaggatgcctcggactggacgcaagccgactgctatcaatcgctatatggtttgctgctgtccaagggcatcgactacaacgtgatgacgccggggctgccgctgctctacagcgaaaggcagcatcggcttatcttccctaccgacgcgggctggattgggcgcgctactgccgaccaaaatcccaagtgggtgggctacgggtatcctgccccggactaccatggatggccccaggaatcatcaatgggcaggccatgggtgctgacggaagactacttgtcggcgctgaaggtgcggtgggcatgtcccgaagtcttcgctgtcggtctgaacggtacaaggctgcgcgacaggctggcggcgatcatgttgcagcagacctgcaagcgcgccttcatcttcttggatggcgaccgggcaggtgtccgtggtagtgcaggcgtgatgcgccggctccggtccctgcttatcgaaggccaagtcataccaacgccggacgggttcgaccccaaggacctgacccgcgagcagataaggagcctagtaattggacgtattgacgcttcacgcactgagtgaccgggaccgcttccgcacgttgcggagtgtggtgcccgaaggaatgatggggccggagacgtgcttcgtcatcgactggatcgagcagtattggaaggtctacccggtgcatcagaaggtagacccgcaggcactgcgcgaactgatcaagctgcgaggtggctaccagccagagcaactagcggtggtcctgaacctcgtcaaccaactggacaagccggtggacccggactcgctacagggcgttgtgtcccagctcaacgaactggatttctcagggcgggtggatgccctcctggcgcagtacaaccagggcgaggacatcgacctggcgtatgagctgcgccggctgagcgacgaggccctgcgccgcgagggggtcagcacgccgaccgactacgtgacggacgacgtgtttgatatcctcgcggaggagcagggtgaccacggcatcaagctgccggggctggtgctgccggcgtacatgaagggcctccacgccggggcctcggtgctggtggcggcgccgcctgatgcgggcaagacctcgttcatggcctggatcgctgtccatatcgcgccgcagctcaagcggtacttcgacccggggcggcccatcctgtggctgaacaacgagggcaagggtcggcggatcaagccgcgcctgtactcggcagccttgggcatgaccgtgggcgagattcttgccctggacccggaggaagttcgcaggatgtacgccgagaaaatcggcggcgactctgagctgatccgcatcaaggacttccacggtgggtcgctggctcaggctgaacaggtcatcgacgcgatgaagccagcggtggtgttttgggacatgatggcccacgtcaagggcggccagcgcaaggaccagaaccgtaccgacgagatggagtacaaggtggctgaggtccgcgagatggcggtacggcacgacttcatcagcttcatgacgtggcagattagcaacgacggccacgaccagttgttcccgccgcagtcctgcctcaaggattcgaagacagcggtacagggtgctgtggacgtgcaaatccacctgggccgtctcaacggcgcggatcaacaggtcatgcgtggcctgtccctgccgaagaacaagttccagatggacgggaagccttcgaacgtggaggcaatgattaacttcgacgccgcacggtgtcgtttctttgagagtgtggatcatgcaagctaagcatagccgggtgctcgaaggcaccaaagaaattccgctgggtagcatcgcactgttaccgggcaccgtcgcgggcctgctgctgtgcctgtactccgacgcaactcacgaggagggcgtcgccttggccggtgggttccctcgcgacttgctgcacggcgccactcccaaggacgtggatgttgccctgtacagcatgacctgggggcgggcagagcacctgatccagaaggcactcccggtcctgaaccccatcttcgtccgggatggtgggtggcgctcggactacgccgatggcggcgacggtggtatcttcaagggcgtgatgtccctcgtgggctgccgtgggttgaatggcatggacttggactttaactactacgacgccgacagcctcggtcgagtgatggagtcgttcgacttcaccatcaaccaggtaggcatcgcgtacaactggcccgaccccgaaggcggtccgcgcctgggtgcgtacctgcacaaggacgttacctggggcgtgaacagggaagtcggtaacggctcgcgactgccggagcgatgcgagaagatgcgggccaaggccgcgtattacggatgggagaacgtgtgatgagcaagcgcgacgtggtactggatatcgagaaaggcatctggcgcggcgtagaccagaacgacaaggccgtcgaggccatcatcaagaagcacgggtacgtgatcgtcgagcctaagatcgacgggtgccgtgccatcgtcggtgcgcatggcgtggtgtcccgaagcgggcgccgcttcccggccctggatagcttggaagaccgcatcatcgatcgactggcccgccccgggctggactccggcctggtgctggactgcgagatgtacctggccggcatgcccttcagcgaggcgactggccgcatgtcgcgcaagaccccactgaccgaggaagagctggggtgcctgcacttcgcggtgttcgacgccacccatatagacgtgctccgcaaggcgcgcacctcccacctggtatacgaagagcgccgcgccatggccagcagcctcctggcagcttgccgcctcagcgacactccgacgttcttccaggtaggctcgcaggtgtgtcggtcgatggaggaagtcttaggccggtactccctccaccgcgccatgggcttcgaagggtcgatggagaaagacccgagcatggtctaccgcaacggcaaggtcgccggctgctacaagcgcaagccggagatcaccgtagacgggcgcatcgtaggctacgtgccgggcaggaccggcaagaacgctggccgcatcgtgggctactatgtcgagttggaagacggctcgggcaccgtggccgccaccggtctgaccgaggagcacatcgagttcctgacccgtagccaatactactcgaccgtcaacgacacgatgccaaacttcggtcgcatcgtcgaggtctctgcgatggaacgctcggccaacaccctgcgccatcccagcttcagtcgcttccgcgaccttcccagcaatccaggagtcaaggtatgaagattcgaaagtcccgtaaccgcaactacccggaagatatggtgtaccacgccaccaaccgggattcactgctgtatccgaagtacgtcatgggttccgtgttcatcagccaggacggaacattccgcatctgcgtcatggcagggacctgggaccacgttgggtccgaagttctgcatcatgcacgggacatccaatcccttggcgccggtcgccgtaagttgcaccgggtcatgcgacggctgcgccgcaatctgcaacaggtaggagtcaaggtatgagaatgccaaccgaagaagaacgcacgatccgctgcctgctggcagatatccacgaacccttgaacctgctgttccccggtatccgtgtaaaggccgagacaatgcccttgggctggggagatagtatctgtgccctggtactccgggtgagctacgaacatcgcacgctgggtcgcctggagtacctgcacgaggtccccatcctgcacctgacgcagtggggccgggacggcatgctccagcacctgatgaacgagattccccgtcgggtgctggatggcatgctgcgccaggcacagaaatacagccagagcaactggtacagcaaatgacgactatccgaatcctcgacctcgaaaccgagagctacgagcacaaagggcgcaaagcgtcgccctttgacccccgcaactatatcgtcatggccggctggcgtgacgatgttgacggcaaggtcggccagaaggtggagcatcgcttccgcagccgggccgaagccgaagatccgaacaaccgctggttcaacctcgacggcgtggacgtgatcgtagcgcacaacgccatgttcgaatcgaactggttcttcacccgctaccgggacgagtacctggccttcctgcgacgtggtggccgggtctggtgtacccagcaggccgagtatctgctgagccatcagacgtggctgtacccggcactcgacgaactggccccgaagtacggcggcacccacaaggtggacggcatcaagctgctgtgggaccagggcgtgctcacctcggagatggaccaggacctgctgagcgagtacctgtccggcccgtgcggcgacatcgagaataccgccctcgtattctacggtcagttgatgaagctccaggcccgtggaatgtgggctggctacctggagcgctgcgaggccctgatcggtttctcggcgatggagtgcgccggcctgaaggtggacctcgaagtcgcccgggtgaaccacgccaagcaactggaagaggtggccgggatcgaggctgagctgaagaagctgatgcccgacttcccggaatacttcgagttcaagtataccagcctctaccatatgagcgcatggctctacggcggcgaggtgcggtacaagggccgggtgccctacgaagatggccggatggagaaagccgacttcgtgcgcttcggcacggccaagcgggggactcctatcgagagtacctcggtgcgggtcccgatccacgaagtgaccaaccagggtgagtggcactggcccaccatcaccgagctggcgaccaagcacggcccggtcatcacgttctccgccggcaagaacaagggcagcgtcaaggtgttccgtgaggatacggacatcccggcgaccaagtgggacgatgaccagcgattccgattccccgggctgatcaacctgaacaacctgccggaagtggtgcgcgagaaattcctaggcaagcgcccggagttccagtgcgccctcaccctggcggatggatcgcccgtgttcagcaccagcggcgacgccctccaggctctggagaaacagggcttcgaggcagccaagctgttgatgcgcctggccgagttgcacaaggacaactcctcgttctacatcacccacacctacaacaaggatgggacgatcaaggacacgaaggggatgcttcagtacgtggacgatgatggtatcatccaccactcgctgaatacgaccgcgacggccacgacccgactgtcgtccagccgcccgaacctccagcagctcccgtcaaaggacgaagacgacccggaagccggcagccgcgtgaaggagatgttcgtgtctcgcttcggcgcggacgggatgatcggcgagaccgactataccgccctggaggtggtgatgttggcggccctgtcgaaggaccggaacctcctggcgaagctgatggccggcacggacatgcacttgtaccgcctggcagggaagcacaacaactggaacgggttcgattacgaccagctcgtggccatcaagaaggaccccaaccatccgtggcacggtcgcatgatgcaggctcgaaagaacatcaagcccaaggcattctcggcgcagtacggtgcgagcgcggctggtatcgcattcaacaccggctgtaccgtggaagaggcccaggaattcctggacaacgaggcggccctgttccccgagtccatcgcattccggcagatcgtccgcgacagtgcagaggccaccagcctcgtgatgtacaaggccgaggaccagatgccggcgggcgccttcagcgagatggggtcggatggtaactggcgccagtaccgccgaggattctggcaagcgccgggaggcacctgctacagcttccgccaacaggaacgctgggacaaggaacagcgcaagacggtcatggacttcaaggacacgcagatcgccaactactggaaccagggcgaggctgggttcatgatgaccgtgagcgtggggcgcatcttccgttggatgctgcatcgcccgggattcatggtcaccgagttcctgatcaacaacgtacacgatgccgtgtacaccgactgccacaaggacaccgccgccgaggtcaacaagggcgtgcgcgacatcatggccgacgcggcccgctacatgagcgagcggctgggctacgacatcgccgacgttccattcccggcagtggctgagatggggccgaacatgttcaatatggaggtgatccagtgaaagaactgcatccgctgcacacgcccgagttcgtcaaaacattcctggaccagaccgggtgcctgcctggggtacgccgtacgggccgcaccaccggcattgctctacaggccatcggcatggcgctgtcccatccgagggaaaccctgacgttcgtggaccacccggacggcagctcggcagcactggtggccagcattgaaaccatactggcgaccctgggctaccggaacgtcctcgttcgacccacaacccgtgcggacgggcgcagcgtgaacatcgtcttcaagacgctgccgaacgcctgacgaccttccctactccggccttaaatcttccttcgacacaagagagaccacgtatgactcagcaactcaacgctctgcaagctgcactcgccctggccaacaaggctgccgagaccgcaaccatcgacatgtctgaaacctccaccggcggtggcggcggtcgaatcttcccggctggcaccgccatgggccgattctgcatctacatcgagctgggtgaccacgccaaggaattccagggcaagctcaagaacccggcgcctcaaatccgcctgggcttcgcactgtggggcgacgtgaacccgcaggccggtaatccgcagagccgcccggacgacctgttccacacctacgaggccgacggctcgatcaagcccggcctgttccgtaccttcgagatgaccctcggcaacaacgagaaatcgaagaccaagctcgccttcgacaagatgaactggagcgggcagcatacccacttcgctcagatgctcggccaggcgttcatcatcccgatcaagcgcaccaagatcaccaagggcaacaacgccggcaaggaacgcaacgacatcgattggggcggcatcatgaagccctacaatccggtcgatggcagcccgtacaacgtgccggaactgccgatggacctgttgcagtatttcttcttcgacgcgccgaccaaggagacctgggacgccctgcacatcgaaggcacctcggacaatggcaagtccaagaacttcctgcaagagaccattcgctcggccaccaacttccctggctcggccctgcacatcatgctgggcggcggcgacgatctgatcatcaagccgacgacccaggccgcaggcagcaacctgccggcagtgcccaacgtggccgccgatgcaggcgtagcagcagcccctgctgtcccggcagttccgcaggcagtgccgcagacggcccctagcgtgccccaggtggcgaatgtagctgcccctgtggtaggtactgccgaggcacagaacgtgctgcctgacgtaccgcaggtggctcaggtggcagctccggcggcggtcgaagtcccgtcggtcccggtagtgccggcagtaccgcaggtctaatgcgcctgccatcggaagagttcctggcaggactatccgcgcagttcgaccgcagcatggcaggcgggacgttggtgtgtgacgccgacggacccgcctacgtggctgcggccactgctaagaccttggacactgcactccggagattctggaagctcattttggagcagcagttcctagcgcactgcacggggacacgggttcacctcacggcagcaggtggggcgaaggcgtaccgggacacgtatccgaccatgaaaccctaccagggccagcgcaagggtaaggcaaagcccgcgctgctggagcctctgcgacgggccgtggcggacgtgcatgagcgcggcggcgcacccgaagggatcgatgtcatcctgcacacgttcttcgaggcggacgacggcatgatgatggacgcctacgccatgcaggacaaggccatcatccggtccgacgacaaagacctgcggatgacgatctacccgtattgggagatcgacacggcgtgtgtgagcaggatcgaaggcggcttcggctacctcaaggaggcatacacgccttccggccagttcaagctcaagggccacggacggaagttcttccttgcgcagtggctcggcggcgataccgctgacaacatccgagggatcgatcgattcaacgggaagctctgcgggatgaagacggccttcgatatcctccacccgatcacggacgaggatgaagccatcgacatgatcctggaggcgtacgccaagatcaagcaaaacccgctggcagaggccgaggtgctgtggatgcgccgaacgcctaccgacaacgcagcgcagtacctgttaagccgcgaccttcgtccggccttccgccagtggatcatcgagctggacgcctaccacgaggcgctgctccagaagcggagggagagtgactatgacgagtgagccgaaggtctaccagataccgcgcagccaacagcgcaccttcaccctgaagctgtgggccgagcagggcaagctatgcccgctctgcggtaagcccatcgatatcagcgtgaagggcgaggcggtgatggaccacgaccacgagacggggctggtgcggggcgtcctgcatcgatcctgtaacaccgcagaaggcaagatcacgaacgcggcgggttcctggggatgcaagtcgatgaagtacaccgacatcatcccctaccttcgtgccctcctgacgtacctggaggggccgaagcatccgctgatctaccccctgcacaagaccgacgaggagaaacacgaagcgaagctggccaagcgccggcaggcagccgccaaacgcaaggcggcgatggccgtcgcaaagcacaacgcgaggaacgtatgagcaaactccgcaagcaattcaccaatgagtacctgcgcaacgtctatgtcgagctgggtctcaagaagggcgccgagcatctgaccaggcattcgcgcttcggcgaagtgagccgccagtgcttccgcaactggtgcatcaagctgggcttccacgacagcaggacacgcggcacgtacgccaagaagggtgcgctgcactggctgggccgaaaggcggccgaggtagtgcgcaagttccctggcgccgtgggcaacgtggtcggccaagggccgaaggtgttgagcctggacatcgagacctcgcctatcgagggctgggtctggtcgctctggaagcagaacgtgggcctcaaccagatcaagcgggactggaccatcctgtcgttctgcgcgaagtggatgcacagcgacgaggtgatctacatggactgccagggcgaccccctggacgacatgcacctgctggtcgccctgcacaagctgttggacgaggccgacatcatcatcgtccagaacggcaagcgcttcgacgtgcccaagatcaacgcccggttcttcctgaacaagatgccgccgccacgaccgttcaaggtgatcgacaccttgatcatcgccaagcagcaattcgcgttcaccagccgcaagctggagtacatgacccacaaggcatgcaccatcaagaagcgcctccacggcaagttccccggattcgacctgtgggcagcctgcctccaggacaacccggaagcctgggaggagatgcgcctgtacaacatcgacgacgtacgatcgatggaggagctgtacatcctgatgcgcccgtggttcgtcggccatcccaacgtggccgtgtacttcaacgacgctgagccgactatccgatgcccgaagtgtggcgacacggatgtcaagcaagaaggctgggtgcatacgcagaccggcaagtacgagcactatcactgcggtggctgtggtggctggagccgagggcggtatacccgcaacacctcggaacagcgcaaggccctgctgagcaactaaggaggctatatgagcctggcgttctccgatccctacgaatctacgggcacccagcccggccagtaccgcaaaggcgcggccccggacgagcgaaaggccggcaagctcccgatgcacctggtggttgaaggcttcccgctgctaaagcgggagcttgcccgcatgatgcagtgggccgccgaggtcaagggctacaagccccacgactggaagaagatgtcggtgggcgagttcaaggccgcccaacaccggcacgaatcccaccgcctgctggacgggccgctggatgacgagtcgaacctgatgcacctcgtgcatgaggcattcaacgcaatggccgccgccgagcgtgccttgatggaccgggagaaaggcaatgagtaaaatctgttggtgtacccgaccgcacgagaccgacgaaggtgtacgtgtcatctgggccttcaacgagcggggcatcggggtaaactacgtcacggcgtacgtcacgccggcgatgatccaccacccggactggcgcgataccatcctcccggacatcctccaggagatggcggagcgcctggaccgcgaggttaagctggtggaattgcgctggttccgcgctgagattctgagctgcggggaatggcgtgactaccgagcaatgacgctggacggggcggtcagcctggccgaggccgagtggggtcccgaggatatcgggcgcgtaatcgaaagacgataggagacggaatggacctgatacagcagcagatcgcccacgaagaggcccttgtcggggcggcgcagaacgacgcccgcattgccttggaaaaggcgatagcccaagggtccatcgaccgcatcccgagggcacgcatcatgttgatgcggatgctccccatcgtgaccgaagcgatcttcgcccaccaggaagcgaaggcggcgggaccggcagcgaagctgcgacacctgctgcggatcatcgacgcccaggacctcgcggtcatggcgctacgggccgggctgtcgatgctcatcaactacccaacgatcaccgcgacgaagtattacacccatatgggcaagatgctctgccgcgagatcgaagtgcggttggccttcaaggtcaaccaaccctattacgaccggacgctggactacctcaagaccagcaggactcgcagcgtccggcacatccagaagacgatggacgcccttctggacgcggtactgcccgaggaggcacgtatcgacctgccggatggcgactacctgcgtctcggcaagttcatcggtgacccgctgatccaatgcggcctgttcgagccgaaccgcttcacaggccggggcggtacgagcgtccacctggagccgtcgccggaggccaaggagttcctgcaagacccgtcggcggcgatgacctggggaggcccaggccgtagcgtaatgctggcaccaccgagaccctggaacgactggtgcgatggcgggtactacagcgccaaggcgcagaagcatcacgtattggtgcgtcgtaccaaacaccagaccaagcgggcacgtcagatgcagctccgccacctgggccgggacaagatgcccaaggtatacgcggcggtcaacgcactgcaatcggtggcctacgagatcaaccacgacgtgtacgagatcatcgagcgcatcttcacttccggcggcggcgtgctgggtatcccgcagcgtacctacccggacaaacctgagttcccgctcggcgacgagtgggccaaggagaacgccagtgaacaagagctggaagccttcaaccgatggaagcgatccgtccaccgatggtacaccggggagcgggagcataccgccaagcttcgcgaatttgctgcactctaccgagttgttcgagagcatcatggcaaggcagtgtacttcccgatgcacgttgactcccgtggccgcatgtactattggggcacaccgaatccccaagggtccgacatcgccaaggcatgccttcagttccacgaaaagcgcgccctcggcaagcgcggcctgtactggctcaaggtccacgtcgccaactccctcggatgtgacaaggtgtacttcgacgaccgggcagcctgggtcgatgagcgatgggacgacttccagcgagcactcgacgaaggcccggagaactatccgaatctcttccccgaagacgagtcgcccctgtgcgccatcgccggtctgctggagctgcgggcggcctacgcatcaggccagccggagaattaccgaagtgggttcatcgtccatatggatgcaacctgctccggcctccagcactactcagccatcctccgagacgagatcggcggagcatacgtcaacctgttgccacctggacttgccaaagctgacatctactcccgagttctcggtctcgttgcagagtctctggcacgagacatcgagagtgctgaaggcgaggctcggggctacgctgtactgtgggataaggccggtcttgccaggagcctgacgaagaaaccctgcatgacgctggtgtacggaaccacgttcaagggtgttgtggaccactgcctggactacctggacgagtccggcctggagattcccgagggtatcccgtcataccgcctgggaagctacatggcaacgctcatactggacgcaattcgcgagacagtaccatcggcagtcttcgccatggaatggctccagcggctcgctaaggcccttcctgacgcatccaaggatttgcactggaccacgccactcggcatgcaggtcttccagtcctacccgaagaccgaggaggtccgggtgcggctgcgggccgaggctgtcgagtacgtcaccctgtacgaggccaaggacgagctggacccggtacgcaacgccaacggcatcgccccgaacttcgtccacgggctggatagcagccacctgggcctgacagccctggcatgcgcggcggagggaatcccgatccaggccatccacgacagcatgggcacctatgcggcagacgtggatcggatgcacgtccacatacgggagcagttcatcgccatgtacagtggcccctgtgtgctcgtagagctggcaaatcagcttggggtagaggctaccccgccccggaggggatcgttgaatctggaggctgtacgggactcctgggcgttcttctgctgaggtggattatgtcacccacataggagcaagtgcatccgtccaaggccctcgtagagggagcggggagagaggagaggtcagggaagacctggtagaggagaggtggagatgagaatggatgactacgaaggattctagatagaatagactaaccagcataggagatatgatagatggctactatgaagacccaccgccctacggttatgtcacccacagtggaaggatcgagaacaggcaagggtacggcccgtcctgtcacgttcacctctcagcagatcgagtggttagaacagaccttccccgaacatcagatcggtcctggaaccacgatggaagacatccagttccaggccggcaggcgagacgttgtgcgagcagtacgactgcgccgacgtgatgccatcgcagtggagctgaagtgatgagtaagtccatctggcgagtacacgcaaaggccggcactccctcggaactccagggcctgtgctggctggcaatacaggagctggaggagttcaccctcttccgctcgaaggacgacgccctgaatgcgatgctggacagtatcgagggcaacgatcgaaccgagctgttggtattccgcgatggtcagttggccggcggtgcctgcatcgtgttcgaggacgacccccacgtcggcccgtgcgtcacagcacagtggcagtacgtcctaccgcgctaccgcaatacaggcgtggtccgggagttcatccgcgaactccaccgtcaggccggctggggtcaaatccccctcgtgtgctggagccatcgtgaaagcgatagccggtacacgatccactaccggagagccaagccttatgggcaagaaagtcaagaaggtgctaggcaagaccatcatcggcaaactcgctgatggcctgctgggcaccgaccttagcggcgcacaatccgatgcccgcaagatggaagagcagaaccgcctaatgcagcagcaggcggaccagctcgcacgaaaccagcaggttgacctcaccgccgagaacgtggcgcaggttgacctaggagcgatggccgatgccactggcaccggcactcgacgacgccggaatcaggcgggcacaggcgtatcgcaaaccctcggtatcaactactgacgaggtacgccatgaaaaccaccgcagctatgctgtgggagaaacttcgggatgggagcgtggagagtcgagccatcgagttcgccaagaccacgctgccctacctgatggtcgatcccatgtccggcagtcggggagtcgtagagcatgacttccagtccgccggcgccctcctggtgaacaacctcgccgccaagctggcgagatcgctgttccccacggggattccgttcttccgatccgaactcactgatgcgatccgccgcgaggccgacagccgggacacagacattaccgaagtgaccgctgccttggctcgggtggatcgcaaagcaacacagcgcctgttccagaacgcctccctggcggtcctgacgcaggtgatcaagctactgatcgtgactggcaatgctctgctgtaccgagacagcgccgccgctacggtggtcgcatggtcgctccgctcttacgcggtgcgccgggatgcgactggccgctggatggatatcgtcctcaagcagcgctacaagtccaaggacctggatgaagagtacaagcaggacctgatgcgcgcaggccgcaacctgtccggttcgggcagcgtggacctgtacacccacgtacagcgcaagaagggcacggcgatggaatacgccgagctgtaccacgagatcgacggcgtgcgtgtgggcaaggagggccgctggcctatccacctgtgcccgtacatcgtgccgacctggaacctcgcccctggcgagcactacggtcgcggccacgtcgaggactacatcggcgacttcgccaagctgtccctgctgagtgagaaactcggcctgtacgagctggagtcgctggaggtcctgaacctcgtggacgaggccaagggtgcggtagtcgatgactaccaagacgccgagatgggcgattacgtgccaggcggtgcggaagccgtccgtgcttacgagcgtggcgactacaacaagatggctgctatccagcagagcttgcaagccgtggtcgtccgcctgaaccaggcgttcatgtacggtgccaaccagcgcgacgccgagcgcgtcactgccgaggaagtccgcatcactgcggaggaggcggagaacacgctgggcggtacttactcgctcctggccgagaaccttcagtcgccgctggcgtacgtctgcctgtccgaggtggacgatgcgctcctccagggcttgatcaccaagcagcacaagccggctatcgagacgggccttcccgccctgtcccgctccgccgctgtgcagagcatgctcaacgcttcccaggtcatcgctggcctggccccgattgctcagctcgatccccgcatctcgctaccgaagatgatggatacgatttgggcagccttcagtgtcgatacctcgcagttctacaagagcgaggcggagctacaggccgaggcagaacagcagcgccagcaggccgcacaggcccaggcagcgcaggaaaccttgctggaaggcgcttccgacatgaccaacgcactcgcaggagtctgatagatgacccaaccgaacgaacagcaactgccgccgggcctcgctaacctggttgccaacgtaccgcctgccgccgcaccgaccccgagtcatgtgcaggtgatgccgaacccggtgatccaaccgcaggccccggtccagcccggccaggtaggtgcgccgcagcaactggccatcccgacccagcagccgcaacccgttccgaccagcgccatgacgccgcactaccaaccggtagcggcacctgccgtgggtcaacccgttgttccgcaagcacccgctcagccggccccggtagctccgccggctgcgggtgcagttcttcccgagaacctggaagtcccgccgccgccggccttcactcccaacggggagatcgtgggcaccttggcagggaacctcgaaggcgacccgcagttggcgccctccatcagctatctggaggcgttctctgacaaactggataccgtccgagccttcggcaaggccgccgagaaccgcgatcctcggttcatcgacgagcactatctgaaggaagttctcggcccggcccaggcgcagcacgtcatcaacgtggccaagggcgtcctgacctatgtcgatgcgcaaaccaaggctgtcctgaaccagacctatgccgccgtcggtggcgaggccgtgctgaagcaggccgcaggcgtcttcaaccaacacgctgacccggccaccaaggccgccatcggtcggctgatggactctggcgatgcccaggccatgcagtacgcagcgaagcagatcattgccttcgcacaaggctccggtgccgttgtacaggctaccggccaacccctgggtgctgcggcacctgcactagcagccctgaccgctgagcagtaccgcgcagaagtgtcgaagctgccgctgaacgcatccgaagccgacatggctgcactgcgagagcgccgtaaggcaggcatggcgcagggtatctaacgaccctgccctactccggccttaaactcacatccaaaagagagagaatcgcatgagctttctgaacgacctgacccgtccgaactacgctggcaaggacgcggacgttgacatccacctggaagagcacctcggcatcgtcgacaagcacttcgcctacacctccaagttcgcaccgctgatgaacatccgcgacctgcgtggctcgaacgtggtccgcctggatcgcctgggtaacgtcaaggtcaagggtcgtcgcgccggtgaagagctggagcgcagccgagtcgtgaacgacaagtggaacctgaccgttgacaccctgctgtacctccgccaccagttcgaccaccaggacgagtggacccaatccttcgacatgcgcaaggaagtcgccgagctggacggccaggaactggctcgcaagttcgaccaagcctgcctgatccaggtgatcaaggctgccgcgatggacgcaccggtggacctggaagacgccttctcgccgggcgtgctggagaagctggacctgaccggcctgaccgccaagcaggctgccgagaagatcgtccgcatgcaccgccgcgtagtcgagaccttcatcgaccgcgacctgggcgatgcggtctactccgagggcctgaccccgatgtcgccacgtgtgttcagcctgctgctggaacacgacaagctgatgaacgtcgagtaccaggcaaccggcgcgaccaacgattacgtgaagtcgcgtgtggccgtcctcaacggcgtcaaggtgctggagactccgcgcttcgccaccgacgcaaacgcagcgcatccgctgggccgccacttcaacgtgagcgccgaggaggctgagcgtcagatcgccctgttcctcccgagcaagaccctgatcaccgcccaggtggcgccggttcaggccaagctgtgggaagaccacgataagttctcgtgggttctggataccttccagatgtacaacatcggtgcccgtcgcccggacaccgctggtgccatcgagctgaagggtatcggcgccttcgacatcaccgcgtgatgccacgaaaccccgcacttcggtgtggggtttcttcaaagcctaacgacccgcgcagattccctgcgtgggtttttgcgctttaggagaaaccctatgctactactcgacgcagtgaatgtcatcctgcgcaagatcggcgagctgccgatcccgagcatggatgagacgtatcccaccatggccattgccctccctgagctggaggaccagcgcatccagttgctgacgcaaggctggtggttcaacacctggtggaagcacaagctgacacctgatcccacgggccgcatcaacctgcccaagggcaccttggcattctacccggattccccggacctccagtgggacggcctgggagtgcgcgacgccaacaccggcgacgaccgcatcggtaagtcggtcgagggccggctggtgctgtcccgcgagtgggaccgtatccccgagatcgcacagcgcgtcattgcgcaccaggccgcactcgcggtgtacacccacgagattggcccggacgagaccgcccaggtcatcgcccaggaattgcaggcgtatcagaacgaactgtcccgcatgcacacccgatcccgtccgctgaacacccaggccaagcgtagcttcagccggtggcggcgcagcttgaggacctgagcatgagctacaagcaatccgcgtatcccaatctgctgatgggtgtgagccagcaggtgcccttcgagcgcctacctggccagctcagcgagcagatcaacatggtatcagaccccgtgtcggggctgcggcggcgcagcggtatcgagctgatggcccacctgcataccgaccaaccctggccgaggccgttcctctaccacacgaaccttggtggccgcagcattgcgatgctggtggcgcagcaccgtggcgagctgtacctgttcgacgagcgggacggtcgcctgctgatgggtcagcccctggtgcatgactacctcaaggccaacgattacaggcagctacgggccgccacggtggccgatgacctattcatcgccaacctgagcgtgaagcccgaggccgaccgcaccgacatcaagggcgtggaccccaacaaggccggctggctgtacatcaaggcgggccagtattcgaaggcattctccatgaccatcaaggtcaaggacaacgccaccggcaccacctacagccacacggctacctacgtgacgccggacaacgccagcacgaaccccaaccttgcggaagcgcccttccaaacgagcgtaggctacatcgcctggcagctctacggcaagttcttcggtgcgccagagtacaccctgccgaactccacgaagaaatacccgaaggttaaccaggatgccgatgcggcaaccatagccggatacctcaaccagcgtggggtgcaggacgggtacatcgcattccggggagatgccgacatcaacgtcgaagtgtccacggacatgggcaacaactacggcatcgcgtcgggcggtatgagcctcaacgcaacggcggacctgccggccttgctgcctggtgcgggcgcacccggtgtgggtgttcagttcatggatggtgccgtcatggccaccggctcgaccaaggccccggtgtacttcgagtgggactccgctaaccgccgatgggcagagcgggccgcctacgggaccgattgggtcctgaagaagatgcccttggcgctacgctgggatgaggctaccgacacctacagcttgaacgagctggactatgatcggcgcggctccggcgacgaggacacgaaccccacgttcaacttcgtcacccgaggcatcaccggcatgacgaccttccagggtcgcctcgttctcctgtcgcaggagtacgtctgcatgtcagccagcaacaatccgcaccgctggttcaagaagtcggcagccgcgctgaacgacgacgatcctatcgagatcgccgctcagggcagcctgaccgagccgtacgagcatgcggtcaccttcaacaaggacttgatcgtcttcgccaagaagtatcaggccgtggtcccgggtggcggcatcgtgaccccgcgaacagcagtcatcagcatcaccacgcagtacgacctcgatacccgggcggcacctgctgtgactggacgcagcgtgtacttcgctgccgagcgtgccctgggtttcatgggcctgcacgagatggccccgtcgccgtccacggacagccactacgtcgccgaggacgttaccagccacatcccgagctacatgccggggccggctgagtacatccaggcggcggcctccagcggctacctggtgtttggcaccagcacggcggacgagatgatctgccaccagtacctctggcagggcaacgagaaagtccagaacgccttccaccgatggacgctgcggcatcagatcatcggcgcgtacttcaccggcgacaacctgatggtcctaatccagaagggccaggagatcgccttgggccggatgcacctgaatagcctgccagcccgcgagggtctgcaatatccgaagtacgactactggcggcgtatcgaggcgaccgtcgatggtgagctggagctgaccaagcagcactgggacctgatcaaggatgcctctgccgtataccagctccagcccgtggccggtgcctacatggaacgtacccatctcggcgtgaagcgcgagacgaatacgaaggtgttcctcgacgtgcccgaggccgtggtcgggtcggtgtacgtggtcggctgtgagttctggtccaaggtggagttcactccgccagtgctccgagaccacaatggcctgcccatgacctcgacccgcgcagtgcttcatcggtacaacgtaaacttcggctggaccggcgagttcctgtggcgcatcagcgacacagcccgacccaatcagccgtggtacgacacgacgcctctgcggttgttcagtcggcagctcaacgccggggaacctctggtggacagcgccgtggtgccgctgccggctcgggtcgatatggctacgtccaagttcgagttgagctgccatagtccgtacgacatgaacgtccgggctgtcgagtacaacttcaagtccaaccaaatctacaggagggtgtgatggctttctggctaccactattggccgctggcggcatgtccgcccttcagcagggattggccaacaaggaagagcgcaacaagatcaaggccgagaacaaggctcgactgaagacggacctcgacaacctgggcgccgccgcccgcgacatcgccaacctcggagtcatggccgctagctaccgcaagcaggccgtggcctcgcaggtggaggccaaacgccaggggatgctcgccggcggcagtgccgaggctcaggccggagcgttcggcgtcaagggcgcatccgttgatgcggtggccctggatatcgagcgggaggtcggcgaggctctgttccagattgacgacaacctggacaatcagatgtggaacctcgccgagcaggcgcactccatccaggcccaagctaaggccggcctgctgggacagaagagcaccactgcggggcaacgatccccgctggtggctggcctgatgtcggcgggttccctgtatgcaagtcaatacttcaagttcggcgccacgcctaaaggaggcaactgatggcggaatcgcaacgtgcttcccaagagcttgggatcaacgtcgggcagacgcaactccagccgggccagagtgcccggcgtggggtgcgcgactccgaagtcaactacagcgggccgagtgtaggctcacagattctcgacggcatcctcggcgccggtcagcaaatcgcaggcaagtggttcgagcacaacgtgcagcaggaagtgctgcgcggtgagcgtgcccgcatggccggcgaggccgaggaggcggtagacagcaacatcctggccaagcccttcgtgaagggcggctggcgtaagcaggactaccgtatcgctcaggcggacttcagcctgaagatgcagcagttcatcgccaacaagggccgggagatgactcccgaggagttccgcaaatacctgtcccaggaggctacgcacgtcctggactcgacaaagggcatgaaccccaacgacgccctacaggcgctggcgcagcagcagaaggccgaggagcagctcttcggcatgcaggccaaggcgtacatggactggtccatcgaccaggccgcacgaggcttccgcacccagggtaacagcatcctggccaaggctgtacaggcccaggccaccggcgacgaactgtcccgacaactcagcctggaagaggctggcctgttctataccaacatcatgacctccgaggatatcccgctggaggtgcgtgacaaggtgggcatgcagttcctggcagccagcctggacatgaaccagcggggcatctacgagagtctgcgcgatgccggcttcctggacagcatgtccttcgacgaccggcgtgcgctcaacggcctctatgaaaagtcgaaggcacagacccgggccaaggaatcgatggctaccctgcgggccgatgcggacttccagcagcgggtggctaacggggccatcacagaccttgccgaggtcgaggcgtactcccggggcatggtcgaggagggccgctggagcgacgcccaggccatctcgttcatgaccaaggccatgaccggcctgggcaacgctcagcgcatgcagggcatcatggcggccctggaggctggggacatcaacgccctgcacacgctggggacgaacgtctccgaggcactggagcagtgggacaagatgcaggcggccaacggctcaagcctgaccgatcgactcgtacagggcacgcagctcggcctgcgcctggggaccttccccaagacctacggcgagtccgtgggcagcgccgtgcggatgatccaggcggccaaggaaggcgaggcgaacccggagctggtcaatacgttgaacagcatcttcgagcaggtggcctcggcccaggagatcaacccctccgccggcaacgtgatgctatccggcatcccggaagccgagcagggcgctgtggcctgggcactcaagcagatgaagatgggcatcgccccagctcaagcactgcgcgagttcagtgccaacgccgaagtcgtgaagcagatggacgagttcgagaaaggacagaacaccaaggcattcaaggacaacctcggcaagcaggtcaacgacaagttcgtgaacaacatcttcggtcgggcctggaacatgctgaccggtgagagcgacctgagcaacaacgaggccgttctcagcatgtaccgtcgagcaaccatcgacgaggcgaactggctggccagcgaccgcaagcatgcgggtctgcttaccagtgacacgggccgcgaggccctgctggagatcgccgccgccaacgtgcgtaaccgcaccatccaggtaggcgaaggtcggaacctgaaggaaggggacctgttcagccgccgcgacagcgcgccactgatcctaccccgtggaaccaccgccgagcagctattcgggaccaacgataccgagaccatcgggaccgtcctggccgagcagcacaagccgcatgtcgaaggactcctcggttacaagtcggtagtcgccttcgagtacgaccgcaccagtggcagcctcctcgccgtcgagtacgatgagaacggtgtggccctggaccgcacgcgggtcgatccccaggcagtcggtaacgaggtgctcaagcgcaactcggacaagctgaacgcgatgcgaggtgccgagtacggtgccaacgtcaaggtcagcggcacggacattcgcatgaacggtggcaacagtgccggcatgctgaagcaggacgtgttcaactggcggaaggaactggctcagttcgaggcttaccgaggggaggcgtacaaggatgccgatggttatagtgtgggcctggggcattacctgggcagtggcaatgctggggcaggtactacagtcacgcctgagcaggccgcgcagtggttcgccgaagacaccgaccgcgcactcgaccagggtgtgaggttggccgacgagctgggcgttacgaacaatgcctctatcctgggcttggccggtatggccttccagatgggcgaggggcgtgcccggcagttccgtaacaccttccaggcgatcaaggatcgtaacaaggaagccttcgaggctggcgtacggaacagcaaatggtacacgcagacgcccaaccgggctgaggcattcatcaagcgcatggcgccccacttcgatacaccgagccaaatcggggtcgattggtacagcgccgcaacagcggagtaagacatggcacagcaattcaagggccgcatgacgcccaagtacccacttgaccaagcacagctcgacgaggcccaagtacagggccaactcgacgcagtgcctaccgtggggttcgacgccctgacgggtggcgagatcggagaacggaacgtggcagcgggccaacgagccaacgcgcgggaactggaacgcatcgtagcggaccaggaactgccggcccttgaccgtgcttccgcactctggaaccagtccaccctcgtcggacgctggggcgatgcgctccagctcgacgcggaccttgcggcgaacagcaccggcgaggtggaccccaacttcgacgccgggacctacggggtccaggcgctccaggcggcgggtatccagccgactgacaactatctccagatcatggcccgtgccggcaatgccgaggacgcggcctacctcctgtcgaggattcaacggtatgagcaggacgagcaaatcgtgcgggacaacccgtactggaacttcgcggctggcatgctggaccccgccgctctggcagttgatgcggttactttcggcgctggccgtgctctgcggctcggtcgtgctggcatggctgctgctggcggcgctgggcaagtcgggtatgttgctgggctggatgccgcaggggccgacgtggatgccggaacctacatcgtggcaggtgctcttggcgctggcgtgggtgctctgctggggtctggtgcgggacgcattgccgcagaggccccaacgcaaccgcatgtgcccgaagtatcggcgcctactgtcgggctgccagaagtagccatgaccgccgaggaggccgccgcacgcggcttcaaggccggtgacgtggtagacctgctggacgagggcaccgtgctgtcccgtgtcagctcccgtgtggagcaggccgagataccggccatcccgcgccgtgacactgccttcggcgacgagctgcacagcctgtcgggccggaagctgtccgaggtcctggaccacctcaagacccacgcagaggttcccaagccgctccagggcatcgccgccaaggtggctgataccatcaggaccctggagggcctgggccagcgaaccgcgttccgagtggtgcagggtggcgacactgccagctccgcattccttaagccgggcacggcgggcatccactccacccagggcctcgacaccttggtccaggtacgcggcagcaccgcacctggtcgagttggcaccaacccggtgaccgtgctccacgaggcggtccacgctgccaccgtaggcgtgatgaacgccgccctgcgcaaccctggcgcgatgagtccgaaggtggctcaggccatgcagaccctggagaacgtccggggtaacgtgctcaacgccctgaagcaggaccgcgccgccggtcggcaactgtccgagttcgaagagacgctgctggccggcaactccaacaccctggcaaacgtcaaggagctggtggcctggggcctgacggatacccgcttccagcggaccctgaatcgcctccgctacagcgacggcgggccgggcctgtggacccgtttcgtggagggcatccgtagcctcctgggcctccggtctgatgccgacacggccctgagtcgcgtcctggccgcctctgagacgatcatggacgccatgccggggtacactaaggctcaggctaagtgggccaacaagggcgctccggtgaccgaggaggccagcctggagaccatcgtgcggaccaccagggagcgtgcccgcgagggtgcgggcttcgtgaaccggttcttcagcgaggcggacctactggcacagcccggagagggcgcacggcgcctcctgagccgtcttatcgacgaccctgtacgtcgggatgggttcagcacgaacgacaacgcagcgagctatttgcgccgttaccggaacgagttcgagggctacgtgaagtcctacgacgagatgatggccaaggcaatggctgagcagggcgtgggcctgacggcacgtgcgctgaactcccgccgcgccatggcagtccgggaccagcttaacgagcaggtcacccgcgagctgctgcgccgggaccgggagtggaccgcctacggcagcgtccgcgtagaccccaacctgccgccgaccatcaaggccctggccgaccgctcggacgagattcacggtctgatgggtcagcgtgccagggaagccggggtccggggcttcgaggacttcgctccgcgtcccggatacttccaccgctcgtggaactggtccaagatggcgcagatggatgaggccgcccctggcctggcccggcgtgctatcagcgaggccgtgttccggggcatccctgggctggagcgtgccgacgccgacaccatcgcacaggccattgtgcagcgggcacgggaccgggctaccggtatccgctccgagttcatgggcgcgatgggcgtggcggacacggcattcatccggcaggcgctggaggaggccaacgtgtcccaggccaagttcgacagcatcatggccaagatcgagcagaagcagtccgaccagggcaccgtcaaatacggcaagggccggctgtcgctggacatgaccgccgagatcaaccacaatggaaccgtgtaccgcgtgcaggacctgatcgaccgggacctagaccgcctgatggagaactacgccggcagtatgtcgggccgctcggcactggcccgcgcaggcatgcccggcgactccgaggtggaagccttcatccgtgagtaccagcgggaggccgcgcacctgggcaccgacaaggtgcaggagctgacgggccaactgcggggcgtcttcggggacttcaccggcaacgtgccgcgagagcatcagctcggccccgtcgcacagcgggccagcgggctgaccagcgccaccatgctgggattctccggcgtgtaccagcttgctgagctggccacgatggctcaccgccagggcgtcttcaacgtaatgaaggccatgctgaactcccgcctgggtgacttcgtaggtgccatgcgtcgagacccggacctcgctgatgagatgcagaccgtcctcggcctgaacctcgccaacgacattcggatgaagccctggaagcggcagttcgacaccttcctggccagccaagacaccttcatggatcgcttcctccacgcgggtaagcaggctgtcccggtgctcaacggcatgaagttcatccacaactggcaatcccgcatgaacgccaacctcaccttgaacaaggtggcgcgggcggcgcagggggatgaagcagcccttcgcgtgcttcagcagtacgggaaggacgtggactggacgccagtcctggcgcgggttcgcggttatgtcacatacagaggaaggaacgcccaatccatgaattggggcgcctggagccaagcagacgtgaacaccgtcatgaacaccgcattgcggatcatggacgactcactgctgtacggtcgagtcggtcagaactcgggctttgcccggtcacctgtcggccaaatcctggggcagttccgcagctttgtggccttcgcgcacaacaagctcctccggggaacctatgagaactccggcgtgcttggcgtggcctcgctcctcgcattccagtatccgctcaccgcgctgatgatgggtgccaaggcagcgatcaacggcaagttcgacacctctgatgaaggcatccgcaagatggccatcgacggcatcggttacactgccggcctcggcttcaccgccgacatgtggggcgtgatcaccggacactctaggatgtccgccccggtcttcggactggcggagcactccaacgaggtgttccgtggcgtcaaggacctagtaaccggcgacgaccccgcagccgccaccggcgatatcgtcaacggcgccgcaggggcactgcctttcgtcaacgtattcccggcgaccaagttgctgctggaatccatcaaaggggaataacgtggctcggttcaagaatcccgagaccatccacgttgcagatggggtcgaggctgtcttcagtctcgacttcccattcctgcggcgtgaggacgtattcgtccaggtcgataagatactcaccaccgactatacgtgggtggacaacaccaacattcaattggccgtggtgccgaagcagggccaagaggtccgcatcttccgcgacacgcctgcccaggtcccggacactcagttcagccagggcatcccattcctgccgcgctacatcgacgcgaacaacaagcagctcctgtacgctgtgcaggagggcatcaacaccgcgaacctcgccctggatggcgtactcgacgcgatccgtatcgccgaggaagctcgccgcctggcacaggaagcactcgacgccgccaatgaggcgctgcgccgtgccctgggcttcgctgagattcgcaccgtgaccgaggactcggacatcgatccgagctggcgtggttactggaaccgctgcatcaccgctgacaaacccctgaccttgaccatgcagatggaagacccggatgcaccctggatcgagttcagcgaggtccacttcgagcaggcaggcgtgcgcgacctcaacatcgtggccggccccggcgtgaccatcaaccggttgcagaacaccaccatgcagctctacggcgagaatggcgtgtgtaccctcaagcggctgggcgctaaccactggatcgtgttcggagccatggaggacgaataatgcgcggcattatcgcgggcatcatggcctcccaaatccggcgtccaaaaccaatcctggcgacgtacccgtatcccatcctagctacagacgacgcatggtcctgccggcccaacatagtggcggcgctgacacgcgacactctgcacgaggttgtgaaccagccaggagaggacacctaccacgcgacctccagcgtggtaagcgtactgctgcggtcgctgactcagctcggctacggcggtggcgatgggttcctgaccggacctgccgtcaatgcagccttgctgcgcgatacggtgaaggaatataccgcagagccttacgcattcctgtcgcagaccgcagtggccggcgcagaactgaaggttgtggttgtatactccgagtatatcgtggagccgtacgccttcgccacctcgacagcaattaaacaggcggaactgaccaatgtttgagacacgagttaagggtcgctacaccgtgacccatctgaaagccacgggtgaagtcctggcacagtacaccttcgacaacctcatcactaacgcgggtctcgactggatttgcgccatggacacctcagacctgttctcacaggccctggccgtgagtaccagcacagcagaccccaaccccgctgcaccctccctgccggaggaagtacgacggaccacctcgtacgccccgaacggggatgttacctcgggtctggatggggagtggatttactggcacaagcggtggcgcttcccgataggcacccttaccggacaggtactggccaccgtgggcatcgtggcccaatccgaagttgggttcgagagtaacaccggcgcgaagattccggcagggactccactgtcctacacccggatcaaggatgccgccggccaacccaccaccctggtggttcaggccgacgagattctcgacgtgcagtatgagctgcgcagcaaggctgtggcgatggccgaggccaagttcgtgatctctggagtcgagcgtaccatccgccttactccgctgcccttcgcgaaccggcgtaacctctacggtgagcgctacatcttctacaacgagagtcctcggattgacggtaagaatgcgtccggctcggatgtccaggatggccagtgggtgaagctgtacccgcgatatacgcggggcacctacaaggggcagctaatgctgcgggccaccgttgataacggcaacatgccgggaggcatcaccggctgcaaggacctgaagatttacaacggtcggaactacgcactcaccatcgacccgcctgtagtcaagaacaacacgcaggaattctccatcacgatggagttctcggtagcgagggcataacccatggcactgatctacgacttcaacctggacctcgatccgaaggctaagtccaagttcgtaggtgcgcgaggccgtagggacatcagcgacgtgctagacttctgcgacgggggcgtggccatccaggacccgtcgcagggtatgatggtccgcgtgtggcgaacagagcttcgccaggacgggacctacctggggcacgaggacggctcgaacgagattcgcatcggcggaggtatcgaagaaggtatctccacgatgtccctcgacttcgacagtaacatgaactacgtgtgtgctttcgtacgagccgatcgaactggtgcaatctcctacttcaacgtgcagcagggccgccggctcctcgtggagcttgggcaggttgactatgccaaggtggccttggacgataagcgtcctggagctactgcctgggcacaggtcatcgtaccttacacccgtaacggcaacctgtacgtccgcacacagaacgagaactatacggtagagcacctggaggtggataccggcaaggtattccgaccgctggtcaaatgcggtatgggcaccaacctccgcttccaagtccaattcagagggcacatgtaatgagcaaaaagcagaccgcgagtgctgagcggctgggcctgctacacgagctggtctgcaccgctatcgagcgcaacttcaagtggtacatggacaacgacatcccgatccccgcatcggatatcgctgccgccaccaagttcctcaaggacaacgagatcacctgtgatccgtccgacaccatcaacatcgaccggctccgcgaggagatgcggcaggcgcaggccgagaaccgccgcattgccttggagggcttcatcgccggtgagaccgacgacgagatggaacgcctgtacacccactaaggaggcagcatgacgccgcaagaacgattccagatagcccacgaagtgcgggacatgtacccgcgcttccgggacttctgcctggacgccatgctgttcctcggcttcaagatgacgtggatgcagctcgacatcgccgacttcatgcaggattcgcccaacaaggcgatggtcgctgcgcagcgtggcgaggccaagtccaccatcgcctgtatctttgtggtgtggtgcatcgtccagaacccggctacccgcgccatgctggtatccggctctggtgacaaggctgaagagaacggccagttgatcacgaagctgatcatgcactgggacctgctggcgtacctgcgccccgaggcccgaatgggtgaccgtacctcggccaccagcttcgacgtgaactgggcgttgaagggcgtcgagaaatcggcctccatcaactgcatcgggatcaccgccgccctccagggttaccgtgctgacatcctaatccctgacgacatcgagaccacgaagaacggcctcaccgccaccgagcgggccaagctgacgcggcagtcgcaggagttcacctctatctgcacccacgggaagattctgtacctgggcacgccgcagagtcgcgagtcgatctacaacggcctgcccgcacggggcttcctgctgcgcatctggccgggccggttcccgaccctggaagagcaagagcgctacggcgactggctcgcaccctccatcctggcacgtatcgcccgcctggaggagaaaggccacaacccgcgcaccggcaagggcctggacggcacccgtggctggccggcggaccctcagcgctacaacgaagaagacctgatcgacaaggaactcgaccaaggccccgagggcttccagcttcagtacatgctggacaccagcctcgccgacgagcagcgtatgcagctcaagctgcgcgacctgctgttcatcgacgccacgcatgagagcgtacccgagcaagtggcctgggctgccgacgagcgcttcaagctcaagttcgacgcccaccgattcccggtcatcaagcctgagctgtacctgccggcgctgatggctggcggctgggcaccgctccagcagatgacgatgttcgtggaccctgccggcgatggtggcgacgagctgtcgtatgcagtaggcggaactctcggcccgtacatccacgtcgtgagcatcggcggctggaagggtggatttgccgaggagaacctggagaaatgtattgccctggctgcgcgttacggcgtcaaggtgatctatgtcgagaaaaacctcggcgcgggtgcagttggccagctcttccgcaaccatatgcgatccatcgacccggacaccaacaagccccgctatgaggggatcggcgtagaagaccgccagaagtccggccaaaaggaacgtcgcatcatcgacaccctgcggcccatcatgcagcggcaccgtctgatcttccacgtctcggcgatggattccgaccacgtgtcctgccagcaatacccagcggacaagcgcaacgagcgctccgtgttccaccagattcacaacatcaccaccgaccgaggctcactgccgaaggacgaccggatcgatgcccttgagggccttgtccgcgagctagcacccacgctcgtaaaggacgacgaagccgcaacccgcgctcgtgaagaggctgccaagaaggaatggctgaacaacccgatgggttacactaagtctgtccttcggtctctcggcatgggccgggagcgtcgcaagggccgcccaaaaggacgaagactatgatgctcgataccgccaccgaggcgggcaaaggcaccctcgccgtcaccggcgtggggattgccgtttactcgccctatgagatcgccagcctctgtgctgcggtactcaccgcgctctacgtgggcgctcagctcatcaccctactcccgaagatgctcgatagcatcgcggagcttcgccggaggttcaagaagtgaacaagcccctgcgcggcgcagcccttgcggctgccctcgccggccttgtcgccctggaaggcagcgagaccaccgcctaccgggacatcgccggcgtacccaccatctgctctggcaccactgccggggtcaagatgggcgacaaagccacaccggagcagtgctaccagatgacgctcaaggactaccagcgcttcgagcgcattgtcctggacgccatcaaggtgccgctgaacgtcaacgagcaaaccgccctgacgttcttctgctacaacgtgggtccagtctgtacaaccagcacagcgttcaagcgcttcaaccaaggccgcgccaccgagggctgccaagccctggctatgtggaacaaggtcacgatcaacgaccagagggtcgtatccaagggcctcgtgaatcgccgcaacgcggagatcaagcaatgcctcgaaccatcgtcgcaatactcgtccttgctgtggtagccctgggagcctcatacggcttcgtccagagctaccgagccttgggtatagcccaggaggagatcaagcgtcagacggcccgtgcggaggccctggaggtgcgttacaccaccttacagcgccacgtccaggaggtcgccgccaagaccaacacccagcgccaggaggtggaccgtgccctggaccagaaccgcccgtgggctgaccggcctgtgcctgctactgtcgttgacagcctgtgcaaccgccccggcgcccgctgtgctgtgcgaacaccctctgattgaccctaccacccaggctggcctaatccgcgctgtagcggcctatcaggacgccctggacctatgcaacgccctgaatcaaggagactgacatggcgaacacccgtgatcaatacctcgctggccgtaacaccggcctgaccttctaccaggtctgccagcccggcaccgacaaccgcatcgccctgcacgacatggacgaggccgatgtcaaggctaaggccaccgctgtgattgcagcagcctctgccctgggcggcgagggtggcgctactccaccggacccgctcaccgcctacaaggtgaagaacggtgacaccctgcccgtggacggcggtggctccgtgaaggtgaccgtagccaacggtgccatcaccaaggtcgtgtacaccgcaccggcgggctgagctacagcccgtccaacctgatccacccataacacaaggaactgaaccatggcaaccttcgccgctgcaactcagaaagacctccgcgccttcgccggcaccatcgagaacctgatccgtccgctggaggaagcggccctgggttctggctacaacgagaccaagctgcgcgctgaactggtcgcgcacctcgacgagctgatggctgctgtcgagactgccaaggcgctggtctacaagtgatcgacgagtagctcaagccgagcacctgcacagtcgggtgctccactggaactactggaatttttattgagggctggctgtgggtgggagttggtagtggtgggcgggagtagttactccgggtctaattttggtatcgtcgtgtgagaaccctcccgactctgatcagcccacccttcccccgtaggccctccgcctggtgggccactgcctcgcattgcctgggtgttgcctgggtcatccctgggagcttccagctacgctgggtggtggtgggcttccctgccctgtcgctgtcctgtcgccgcccattctacgcatcctggcgggagtgtcaacccctgggtggtcggtgccttgctcggctacgctccagcgcttccgcgtggtcggctaggcggttggctcgccagcgcttcgcccactctacacctcgctccacctcggaccacttgtccgccagcatcatgcgctgccatgccgcgtcctgctgtagccatgccctgctggctctgtcctgtctgctcagcatcctctgtctcctctgtctggctccctggggcttccctggggcgctgctgtggtcctgtcgggtgatggtg

SEQ ID NO: 4 - DNA, 93744 bp, Pakpunavirus
  source 1..93744: mol_type = genomic DNA
gcttacatccgctcccattttgcaatggaaattgcatacagttcatcatgcgcttcaaaagtgacttcactttgcatgcggatgcatgctatagtataccctgtgatagctccgctatcccgttttgcatggcacacgaattgcataagcatgacaagggtaaccctcgaaagcggagctttcaaagtgtaggctgagtgtgggctctacctctattatatttgcgaccggaagtagtgacactgaaaacgttgactctagcccagtaaatacgttaaactaaaaggttgatagctgccgctatcgagtaaccaacattcacacaaggaggcacaatgacaagcaacaatcatgccaagattcacatccattacgctaagcaaatctactacgccatgcgtaaacgtgccatcgcaagcgatgagatatgcaaggaatgggccaagcccaagacaggctttgaagcgttctatgattgggtggtgaatgtgtcagggtacgccgtaggctaccgcctagacaggaatatcctcttcccgggaaacaagctctatgctccgcatacatgtgagttcacacctacatacatgcatactctattcaccaactgcgacaagacaagcaataaccgtgccaacaatgatctacctctaggcgtccgcctagcccgtcatgacaagtacggaatgccagtatacgtctcacagtgcaggacactaggcaagcagtctacccttggatcgttcgacgatccgatgcaagcccatgcggcatggcaacatgccaaggtagcagccatcctcgaatgtattgatctctatcagatggaggatgttcacagtgtaaacgttgttcaagcgttgcttgaaagagtggacaaacttggcaaggatattgcacagggaaaagagacaacccttttgcaatgatttgatggggtcgatggtcaaccctctgagagtgcgagaactccgccagagtaatccgatagcgaagctatcaaacgtatatgcatattccatgccaacatgtggaaagatttcacccggcagggcgggagcccgttggcattagttttgcatagcttagctgtcgctaagaaggaaagaccacggccacccattattttggatttactaagggttagggtagcgaggtgggttcgtggttaagtagctcggaaataaatccataactggcagaaggcgaaccagcagagggcaggcccgctccctccattattttcccagcagtagaggaggcacactctacaaacgtatcactctattcggcgggggtttaggattcgaatatacctttagcggctaaatgccatcattgcttatttcctattttcgtgctataatccttataggatgttcttattcttcattatagctggataagcgatggttgtatagattcaccacaaatagaaggaatatagaatggaagataatattcaagctccgcttgcagctagtgcaggtggcaaattcgcaactgtatacgaagctattgtcgcactcggagtagaaggggctgccgctgtgtacagggtaggtgtagggaatagattgacaacagctagaccatcggcgtggtaaagagaagccccgggcagcgaaagctgatcccggggctttttattgccttgagtttatgtatgaagagattccagttgtctctgctcttccatatactccctagtggcgtagttcatcatgaggttgcaatactcttcgtttatctggtccatgtattgcaacactttctccatgctctggcatggactaaatccattatgacggagaatcttgcttagattaccctcattccagaagtctctggcccaagcctccaaagctactgcgtagaggcttttgatgcacccgataggggatggataccaatattgctcagacattagaccctccaaacgcagcaaacaccccttgcttagctaggatagtctttagctcctccagtgaaatggtctcgtctcctacgaccacatacttgtctgccttccctagagtcatcacacacttagtctggaaggtaggccgatacaagtcatacacatcgggttgccacttgcttcgcaggccagttccgtagctaatgaaccggtcttcgggatgatcccggatgtataggcaccggggactatcatctggcccatctacggagatagggtgttccatccactccctgatcttatcaacgacgccctctcctaccttcaattgagcgtactgacagtactcaaggaacgcatcaaactgttcggcagtgaaattgctgacatcgatctctttagttttcattctcttcctccatgtctgcaatgatttccttcaacgcttgaagcgtgtaggtgccatttagctctgtagtaggaccagtgtcacactcatgaagcgtgtacgcggtcactttcttctcagtgacgaaatggaagtctacccttcggaagtcgtaggtcgatttcgagtatccaatggcctctttgagttcttcctcgtaccacaggaatgtcattggacttccgtcgcttttacgagtgtagtccagcagattatctccaacccacagtagcacttgagccttgtcgtacatgaagccgtttccgctcccaaactcgataccataagccttaaggtgctgttgtactgcaatgttctcttcgggggtcttcacaatagtgtaaaacttcaccaaacgctctttcaatttcagtcctcctgtctgtgttttatgggagtgtaaaacgttcccagtccattgtcaagccttctgtggtgatagtctgttccagacgctctctagctccttttagaatgatatcccactcatctccttcttggacccctacatacttctccatcatcagcgcacgatcaacaagcccagctctgtagttctgtcgctcttttctacgcgatagcactcttgagatatggtccttcttcttcgccaacacgctgatagctttccttgccataagagttgcatactcgctctcctcggcggtcatccattcctgatacagcagccctagacgagtgtcatgctgtacgagtggaaggtctttccatatgatacctactcgtccagtatcagagacggctttccattccagcgtagtgccgccggtcttatagtcggtgatctttacattctccgagttagattgagactggaaagcgtgcctccagtctcggtatacagtccaccgtttccagtcgaagaatgtctcacagatggctttaacaggttctccgattttaccctccagttctttcaggcggttctcctgctcagcactcatgtatttgataggtcgggaggctggatcgtagcactcctctacctgaaactcctcagcccgagactccaacactttaggctcatcgttactttcttcctctcggaaccatgcgaacagcttcttaaacatattcagtcctcctctcctgtgatagctaccctagtcagtctccacacttttctaggtagactaacgaggaatagcatagccataaacggtacggcgataggccagaatattccagctaacaccgctcgggcctctttcttacgcctctccgtactttctcccctccacccaagaaggggtcgtagagattcccatacgaacatccctatcacagagtagaacaataggcagaccactccgacgactatgcatactagaatgagaagccctacttgttccatggtgcgatcctcttaagtagtttacggctgttccagatagacagagcccacttaggtaacaacaccactttcaaaacgctgtatgttgcgtagagtagcagaaagctagcatacactgtgaatgtaataggccatagcagtcccagtacaatggcaaaagcctcgataccctctctgtgatctttagtcgcactagctgggaagttatctttgaaatactccgtgatacccatgtaggtccacatgaacgcaattccccacgcgagcgcgaggacgaatagcattgggattatctccattactcccctccttttcgaatcaagtcgaagtaggcccacacgtagaagttgcaccacgctctgcctatggcccagccttcccaatagtcttcccagtccttgttcggagggttattctcgaacatggataacacgcatgaatcagctacttcgtccaagaggtgcattaccgaattaagcggcccgattccaaaggtcttatctagccaccccttaaatcgtcccacgtctgagacggtgacgctggagtcactgcacagtgccaatctctccagaatgtagcacatgtaaggctcttcttcgttctcgaagaatgcccgcatgccttccttgattagtggtgcaatactattagagttcattttccctcctttcggatcaggtcgaaataagaccagacataaaagttcatccagttcgtctcagtgtctcttagacaattgcgatgaagataagagataactgattcccacgacgtaatcccgtgctgctctattagccactctctgaatgaccgatactctccgtgggtgatttgcccttcttctactaggtcactcaggatataacacatatatgtgtcccgggcgtttaccgagtaatcttccagtccgatctttatcaactctgcaactgatctcattgtttcctcctctgagagccccactagggctctaaatttttggttcgacctgcggtcagcacatcacaacccagttgtacaggtcggcctcctcataagctgatgggtagcgattgtactccaagaagaacgcgtggtcaatagctgagtatttggttgcgaaactcgtaatgtaagtcagaaacccgttgtcctctttcctgaacagggcgtattcttcagtaccgtccttaaacgtatctagcgagatagtatacttgtcgaagatcacagcatttcctcccggctaatgtagtagttgtagttgtcctcttggacgaggaacgcacgatagaagcctttctcaaagtctcccttgaccagcaccagattgccctccaccttgcatgtatagatatacatggtgtttgctactcggataacaggatcatccccgggacgaacatccagagcagagagcatagcctccattggcatgcttgtcaagtgtgcaactacagccgagcagtattctgcatcgcggccagaagtgtcctctgcataagcaggagcgaccccgcacgaatgcagggcgagtgtaaacgcaatagctacgagtttcttgaacatactaaccctcctcttggtctgtctggggaacatccggctttgggtagacgaatgtctctggatacttcatgcatcttagctcatctttgcagaacccgtcaatcaatttctcatgtgcgaattccgcagccttgtagtagcgattagcctgtcttgcctccactcgaaggaggtggcttatcgtgtgagcgttgatattactaagacttgcaaaaattgtcaagagcttttttgcagaaagaggaatcgacctttcatcgggtctgtaccagtccagccgggcaactccttggagaacgtcgtctacccacaacgggtagtctccgtctagctcgaccatgacttcgtacatttcaggctgaacagcgttgaaaaagaaagagggctttcgccctctgctggtatctagaggaggaacaagccccctctccaccttgtgaatcaaccgatcagcattcgcccctatccgagactttagctcctcgatctcttcacatgtcaacatacggagggcacaccttagatttctcgatagtgaacacgccttcgcatgtcaggttagcaggtccataccacttgaacatgttgttgatatcgtatcgaatcaactggcggaacttctgcccgtcgcacatatccacgtcgaaccacgccacgacccatctgacgtaatcttcagggtcgttctcttctcgccatctgcactctagatcaacgtgactgggctctagaacgtaaatgtcttcgaaccctgtactctggttgttcttaagtcggatgattcgagcgcgaatccattgcatgcacctgcggtttgggtctgtgatatcgcagactaccggaacctctggaacctcaactgtatacatgattgtacctctatttgttttacaagaacgccatgattctgtctctgtctgcatggcggtacagattgaagcaaggcacgcctctagaggacgccagttgccaagcggtcctagtcccgccttctggaatcccgttgtggtctgtcttgctccagcacaccaagaacttgctaggcgtgttgagatcgattcccagcacttggaaaacgttccgagtgtgggctcgtcttgcgaacgggcttagaacggacctcccgtcatttctgacagagttccaagccggatgaatttgactggcaatgcctttagcttcttcccattcagccggcaactcttcctctggcaggatggtagctccgagcgtctccgttatctggtactggttgaagccgggagacggaagatagatttctgccgtagttcctcccttgttattggatatataatccagccagcccgattcgaacgctgagtccgctcccttcgctcctcctgaccgaagaataaaaccttgttctgccagtttacggcctacctctcgaaggatgccccactctctgtttggcgtatccctacttccgactcctgtgtaatacttcataagatcaccatttcggatagctcttctggtgttacccattgatgccggtattctccgttcttcgggttagaatattccaatagaacagggtaatactcgtctcggtaatcggtgtctataacctcgcagttccaacctacagggataggacaagaacgccccttgggggccatcttagttccaatagacaacctgccttgactagccgcctcattgacgcttatcaggctgtatctgtgttttaacgcttcaactaccttgacttggaggtctaaaagttcctcgattgtaaagtggcttacatcgattgtcatattactccctcccttccagtttcttgaattctttgtccagcttagctagatgcttatccaacttgtctagctttttatcctgataaagctggaaagcctccgagcccggggccaaccaagtccccttatacttaattgcaccccggatcatatctcctcctattacagttcgtaaacgtatacctgaaactggccgagcgtctcctcgataagaggctcgacattgctccagtcctctccggctaaaccgcagccaatcttcggcagacctacacacaactccgaggtaggaatcgcccgagcgtcagcctctgcctcaaggaacagagacatagtgtacagggcttggcccagtgcgtcaagctgagtgtagactcgtccctcttctcggccatagttgtactgcccgtacagattgtaaatcgatccatactcgttaattgtgaaggtgagggagccgagtttgcctcgatcccctttcaccgttgcttggtctgcctcgtaggcctccgggaattgctcccggatttgcttagcaatgccgctgcccatggtgttgaagcaattagcctgatgtgcaatagcgtgcaactctttgtttttgaacgcggcgagcaggtcgccctttcggtatttaatcatttgaacctctctacacttgtgaatctgacttcagagcctctcgctccgtgagcaatgtccgcgtacattgagttaatggcagcaaacggggaccaatactccttctcccagattttgaacttgaacattttgtgccctttattttctgggcgaccttgttcgcagaaggttgtaaagtaatatttagctaacacctttatcctccttatactccgttcttaatccgataacggatagatgccaagtcattgttcttcaggtcttcggtgtcccatttcccgtctttgaagaacgtccgcaaggaaccagtagcctcctcctcttcagatacattatctttcaactggaggaatcgcccattttgcaggtctcggtacactttcaggaggcctttagccgacttcttcttgctgtcagttttcgggtctttgaagattgcaatgccttcaccgttcacttccgtgtaggtagctttcactgcgaatccgaaagtatcccgggtgttgcactggtaagtgtaactgccaactccaaacactacgttcagggaagcgaaacctttctccttcaagcgctccaagattttagctgctcggcgagttgtaatggaatctccatagatcaaaccgatatgagaatcgagcatcttatagcctgcttcgttcacagtaccgccgaaggtttcccacagaacttggatagctcctttcacctgcgcctcgctcacttcttcaagtttatagccaattacatactcgtattgatcccactcagtgggaataaccttgaagtacttatcttcaaagttcagaacaaatgcatcgtttccatttactgcatccatgatatcccagtgttcgagcgactcgacaacttcaatatcacccagtccgcagataacctctacaggatcaccagagtctggacgaacaaccagcttgccgtcacgttccatgatctgatccttgatggacggcagaatgtcagtaagcacgccccagaagtcgaagctgtctgccacgtaagacagaataccactcgggaacttacccatcagttcaacaaggaatcgacgttctgcttcctcacggccacctttaccttctccatccttcatttctttctcaatgcggaggatgttactagtagctacagcgtgttcagtcgcaggaacggagcaagctaccaaaccagtcgcgttatagtagtcctcagcataaatagctgctgccaatgtgtccgaacctacgaacgaggtcaagtgaccaacaccactacgggctgcgtcttcgatcccgctcataccccgggcactgaagtcgtggaactgaacggacagcaggaagtcgtcatagcatccagtgtgattcgcgtagtatcggcccatagctgcgtattctgcggcgatagtggcgttagtcgcggtcttccaagtcatagcagaaatcagtgtttcgtggtagttcactagccagtagaactccggcagggtgttcttgatggtgagaacaggcacgcccatcggtacactgacgccttcagtcagagacttgacctccagaggcagatagccgagcttgtgtagggctcgaagctgctccacagcctccatttcccggccaaaatagccagtcaggaaccgggcataccggccaacggcgttctcttcttcagccgcgaagaagccttcccaagactctacgatctccatccaagcggcccgtccgccgacccacttgagagtgccgtcgtagaagtcggtggcatgcgtctttcgataaatcttatcggagcgaggggtcaggttgctatagacaagctgagtcccttccgagtacatggaaccgtgtccaatcttataaccatcggtggaaagatgtggcagaattttcatgttatttcctcctgttgtgttgaataggcccagactacatcaatctgggcctcctgtcaatattcgacttcttctactggcagcgtcagcacagggtagatgcatggaaggcgcagcaatggttgcttcttgctgtggaagtcttcccaaaacttatcgtgcatcgtcttgtaccgagcgtccagttcctccttggtgtcgaactcctccaccttgacaaccctcttctctggagccgaacgcttatactctacaatccagatactcaagctcacaggcgttccgccttggagtattcaaccggaatgacagtcagcgcttcgtgctctttttgagggagcgtatccgaggtgtagatgcatccgaaggaatccagcaagcagtcgatacccttactgaagattccatgagtgacgaacaggtcagggagcactttactgtactctcttagggccttagacacgcttcggaatgtagcacctccgtcacagatatcgtcgatcaccagaagcggaagttcaggatcgatatccgaaggattcagaatttcaaagccttcgattttaccggtctggagatcgcgcttcttattgcaacgaattacagcggctgctccggccttctttgcaaaatcctcggtccgctttgttgctccgatatcaggggctacgagttgatattgctcccactctgaacggctcagtaggccaccgaagaccgaagattgacggacaacttcgacgttgttaatcaggtgcagagttgcgtcgctgtgagggtccacaacgataactcggtcatatccggcagagttcagcatgtttgcaaacactttcaaactgaaggcgtcgcccggattgcaccgacggtcttggcgagcatacgggacataacccagcagaagagtcatgtgcggattaatcatttctgctcggatcgcctcggtgacgttgagaagagccatgatatcatcactattctgaatctgagctttaacgtttacgaacgcatggctttcgatgccgcccacattaacgcccacttcgccgcccgggaacgtccacacttttgcctcttgccacggacggctcataacaccttccatttcctgaaggcaacctacagcataactaatcatacatcctcctcacagtttcacagagaagcgattccgcattgcttccatcgtgctctcgggaacatcgtgtacagacttattcccatgacgattctctacaatcagagagataacagtgtagccaaactcttcagccatgtcaatgtatggtgctacctctcgctcccgggtactagtattggatacgataaccgcatctagtcctatctccatagaccgtcgcgctttgtccatgcactttttgtgagattcaactaccctctcagctttccacacatacttgccgaactccatttggtaatcgtccgcttcgcagatagacgcctgccggcctgactcccaagttttgttatacagaatctcggcaagagaggacttcccggagcccgggagtcctcgaatgatatacatgatcttttcttgcatacttcctcctttaaattcgagccatatcgaagtaggtttcgatcagaagtcgtcgctgtgcatcggtcatttctgagaaccgagcctcatccacttcatttaccaagaagtctaccagaggatagaactcttcgtcaagcgtctgcttgaatccagccgggtcttggtacatcgcattgaccttcttactacccatcctcatgataaacttcttgccgaggtagtgagttgacttgcacttcactgtccctagccctgtttgtaccatgtaaccttctttctcacaagaactcagaagaccctttgcatgttcccagctacactctatgtgctctggacgaagaatctttacagaactgtggtccgttacacctagggcgtgagagtcaagaatatattctgaaagctggcccccagtgaagatatcgcggataccgatcaaatatgccccttcttcttcctcgacaatgtgagggtcgtctggagagcatatctcgaagttatatgtgaagcctgcgatgtaatcatctgggttattcgacacatacttctgaccaagggcaacgtaatcgccggtcaatgaccccgtagtactgaagataagggagccattgtgcttagtcacggagaacatgaatccattcactttctcaatcagccgcacacggaatttaggatggaggaaactcccagcaccattctctcccagattaaacaccttctcgaaggggcgtacaatacaatcaccggagtgctggtcaaatacatgaccccgtgcctccagaagaagcgggtgcttgttccacaagttgtcgtagaataccttacgagcgtatttaataaccgacataccgttgaagtgcttaacagtcaccagcttattagcgatcaggtctttgtacatctcaatatggagtttaccttccatcctattcctccttattctacttctacaatcgggcagaatttagacttcttcgctttcaaatacgacaagaaaatcccatcctttttatcgggcctcttagacatcagtcgagcgagccgatagaagaccgatacaccatagaatacagccgctacggcaatccatataaaccccataatagccaaagtcccgcctagaatgtagccggtcgcgggtccaagtagcagtgcatacaggctggagcctataaccgatgcaaatgcgactgaactgagggctagccacactacaagaaagaccgtttgccagaaataagagcagagagtaacgctcttccatccgctggaaatgtccaagtaggtaggactttcgaatttacgatgcaggcgcatatgccacgaattcttattaatcttcatgcttgttcctccgggaagatgttgaaattgagtacgttgtgctcttcgagttcgaaagaagctaccatcttgtagcctccgagcttgtcaacgatctccagtatactctcgatagagaatttgtcaacatgctgcttcatcagattagagattcgactctgatgagtaccacatctctcagctacttcccgctgagtgaggcccgactgagaaatatagtgtgcagccactgccattacagcctttttgaaatcttgaactgggttgctcatgttaatcctccttattactcagtgtaatttttccgctaaagactcgaaactggctgatctcgaactggtcagtccagcgagcgtcttcgaaagccactccttcgaaagttccatcaaacttgacgtctgaagtcatcagtacaatgaaaggcacgccttcatcgtggatcagctctacaagagtattagccttgggtgtaataccgttttcttcacgtgaaatcaacacattaaccatattatcctctctgtccgtcatggtgatctactaccacaaattcttgattccgcatgtattctctcacttcatcgtaagagaatacctgatgatctgggtgattgtcaatacctacatcaagcctctttcctttggaaggcaagctgccgtgagtgtggccgtgtagatgccaagcaccatgatgagcagtattccacgtctcgaaagggtagtggcacatcacgatcttcactccgtcaattcgaatctccttgtactcacgaatgtcttctacgtgagagagattgctatcagcgatcaacttccacagacgagagtcgcaatggtttcccttcaggaaggtgatacggccattcaactgcttgatgatatccagcacaggctggagcttgttctttcctgcaaatgcgaagtctcccagatggtacacttcgtctacccgacctacccgggagttccaccgagaaataagctcctcagtttgctcctcgaaagtccaaggcctgttgcagtattcgatcacattcttatggaagaagtggagatcggaagagaaaaatacagacattatgcctccttttcaaattcataaatcttgttgatcctgcggatcagtcgaatagcagcccctcccagcagatgctctcgatccggtttcatatgggccattgccttgaactctgacagcatatctcggcgttcatagtggaagtctactacccagtaggtgtctgcattaatcttaccctctcggtacaggtgcccttcaacaccaagccagtggtctactgcgtctttcttcagtaactctttcggagaccacttgtctacaccccgcaacttctcgaagaaagagtaaggacgagaatagttgttgatggcttcctctacagccgactcagcctgcaatttaatgaactcccatcttgcaagaacttctttaatctcctcggtggtggctggggtgtagctgtactgctctttatattcattccacattatactgttctcctacgtagcctttgaatttgtcggaacgggttgtcttcttctgtgccttgttttccagaaccgatgcttccctttcgagcatgctcagttggttgctatacttcttgatccgtttcgcattgccactcatcacagaatttgtaagattggcaatagtgtcgcagattttaacctcttttgcaaccggatgattacggcaaccctcgatatacttccgatagctttcagctcggtttttgtcaagaatgaccagagcctctacgatatgcggcatcacgcccatagactctaagtcctcctctgtcaggtcggtatcctcaagaacgtcatggaggaagcagaccgctagaagggtgtccatgtacggaaagtccgagaaggcctgattcgggtccatatccttcggagcattacgtgctacgcagattgtatgcacttggttcagatggtaggcatacggatagttggtctctccataccgctgaccttcatgggccgagagtgcgatctcgatagcaataccgagctgagttttcatgttaatctcctttgtagaatgtgtggttgcctatcttgatggtacgcttgtacttccgagcccaccgagggagcctgccattattggctctccttacctttctctcgttcaggtagtggtccgctcctcccgttggatcaacagtatacccatacagagcgttgtatgcaacatgttttgctgtctcccacttgtcgggctccttgacgccctgccgcatgctaccatcgcaggtgtacgaatattgacatttgaagtataacactccagctacggtgctgggccacctgtcgtgctgcatcctgttgatgacggtatgagctacagcaatctgcccgatttccggctctccacgggcttcgaagtagaccgcttctgccagcagtctgcaaggctttctgtactcgcacagtgttcgcttgctttctatgatttgagcgggactggcttggaactccactacaggctccgtgccgtattttagacgagagtattccatgtcgaggaacatcccaatgaaggctagaaggatcgacaaaacgagagcttctaaggtttccataacacctccttagacaaagaagcccgccttgtgggcgggctgtatatcactcggctattatacttcagcccaagttgtaacgacgggcgtagtctttgttggggaactcgaccatcatcgactgaatgtgaatgttgcctttacgatccttctggattttggcatttttcacaatcttacaggcctgcgccttagccataagctcagggcttacaaccagatcgatgaaccctgcactccgatacccgcatccggcaggggcccagaagccgtgctgggtcatcgtcgagccgggaacgaggtacaggttgtgcagacgcacagcagtgttgaaactcagcttgctgatatgcttcgcttcccgagtttgggtttcaaaacacccagtcgtgtagttgaatttgtaagtgagagcatccatgaactgaatgacgcttcgaatctggatagcagaagtatccaagagctggaactcctcagccgcgtcgattgcagtggtcacgttgacagacttagcgttgaacattttatatcctccttattcttcagggacaaatacaccgccgattacccagccagcgcgaattagtttaccagttgggaactgagcacgcaaggtctttttgaaacgactttgaatttgcacagttagccacttaccccggtagttctcaaaattagtgatctgatccttgcgttcgtcaaagtcaccgtacgtcacttcaagcagctcttgaggtacagggtcaaacaccaccagaacagcgttcccattcttgtctaccacgtagttcacgatctgcatttccatatcgaagaactctttgtacttctggagaccgctggagcgcttaccagattcgtacaagccctctgggctgcgccacatgataccctcataaccgttctgacggtacacgtcgtgaagacgtttgaggtcttcgaaagtggagcagaatacgtactcaacgaatcgaatactccccagatcactgtgtagtgcagactggaactggaagtctaccagacgctccttgaatgtcaagccttctttcacgatatcgaatacgtgaaattccagtcgctgccgcagtccgtaaataaacgatgtgctatctacttccttaaggagccgatcatactcctcctctccgtcttcaataggataggcgtccagagctttctcggccttcatccacttgtcgtaagcatcctcccgcttaaccgcagagttgatatcttccagcacctccccatggacgtacagttcgccgtcccacacatcaccctcttgcatgatctcttcgagttctttgatgatgtgcggtacattgtaaggtttacccatgcgagacgctagcgtaactacgccattggctttcttagccatgcaacgcaggccgtctagtttaggagagccatacccctctttgtatttagcgggatcaagcggttttgcgagcatagccataacagggagatcgttgagttcttccttggttgcacgataacccttgtccaactgcttgctcaccttggactgagcctcagacacggcctgctcctctacagagcgtttctgcttaccaactcggatgttggtaacctgagaggtcatggctccatgttctttgccgtatttcacgacgatattgaagctaccgtcttcctctccgaccacctctacagtccactccttgaacccgcctttcttgtcgagtccatacagtcgttgaaaataactcattgatcctcctcgtatttgatgacaagaacatcattctcccgtaggtgcctaagaccttcgtcgagccgatattcgtgcttatagtacactactttgatcccagcttcaaccaccgagatagcacaatttttacagcaagagtgagtgacgaacagggtagccccttgggcactctcagggctgcgtataagggccctcagtgcgttttcttcggcatgcctcacctctgccttggttactcccgtttcgtcctccagcggcccgtttaagtgctctggaagggcattatacccgcaactgatgatacggttacgttttactagaactgcaccaaccttggaacgagtcgagtcgctgcacttagcgaaggcctcagcggcctccatgtaagctttaatatgcttaaccttcacacctagcctccgccgacgaggacagcaatctcctcgtactcttcagtggatgcgaactccatgtaatagtcgtccgtatctgacaggtaaacaacgataggcggataataactccatacagggtctccgtgttcgatttcagctaccctcacattgccatacactgtgcgaagagtctgtagagcttcgatcacatcgtcaatacgcattacagttggttcagtcatacctgcctcctcagttttctactttacaaacggcatcgccgcgtcgaaggaacacttgcactgacggctttccgctccacttgtcccacgcttcagctttaacactgacagtcttaggattgatggcaaccacctcgcctaccagcataaccattccagttccgcctaggcagaatgctactgcgtcgccgatctcgatatcccttcctgctacgtccttcatttgtactctccatctacacccttgattaaaataacgaagtccgaggggtcatcactgccgtaggcctttgcccgaaactcctgctcgtatttattcaccgcctccggatcacttttaacctcaagctcttggtagaggtcttccataaaccaacccaagtccgtggtcgcagccgaagccgagaggtgaccaagaagtcctaccagcatattgatctcgtcgctctccaactccaacttgtgaccgttacgttttactactttcatatttcctcctatcgcttctgtccgcgacgagtggctacgccgtaagctggcttgctcccctcgcccgtgttgtgtttcttctgcactcggctggcattgacggtgtaacgccctttgccatactcttcatctatccacgcttgggccttagctcgctgagacgtgtggacaaagatgtagtagccagatgcatccttgataaaccaagtggccgggggctggaagtccagacgtgaaaactcttcatagtcgatcacagtcaccttctgcttagccactgtatactgccccactaccgactcttttgcaatgattttatcaatcatctgagttgaaagatcagagttcttcgaggtcaatttctacctcctttcctagtccagtatctgcaaagaagctatcgagactcagagcgtggtattgagacactttgtaaccaccactcttcagaaggctgtgagcggcctcctctactttgtcctctgtcagtctccagtccgcacctaggagtacttcagctaactgctctacactcggagggttcccaatccacagacccattctactgtcaggctcgtaatcttcttcccatacaagttcccacactaggttactcattggtacacctccttcttacgaatagaatacataacccactcgtcttttcctgtcttcccgcacggaatgtctacttcacactctgcgtttacaatcaggcccgctacgatgaaatcaagaagctcctcgtctggctctggtaagcccgggtaggacgatacaaccctgcggatagtctccgatttggtattgcccagtaccccaagcatgtggaggtcaaactctccactgtagtcgtcccagagttgtccaaatatcacccatacactattcatacctagtaatcctcctttagcttgttggtgtccattaggcagcctccttcttcttgtccagcaacttcaggcatcgtttgcaggtgatatgattgcggtagcgggagaagttcttctcctcgaagtcgccatcggtgccacagaagacgtcatatggttcttcactgtccgcttctgtgccgccgtcccactcgtcgtagtgaactgctcgcgtcgccattcacttcacctcgattccggcttgctggagggcttcgacgcactcatctcgataagcttgaaggtcttcgtcgaatatgactctcggcaggtccaccctcagagccgcgcggctggctttccatgcctgccacatcagcgagtagcggtgtgctgcttctataagagccacgtatacgtggacgttatcggtcttcacaggaaagtagtcggtgttacgccactcgacaccgccgggaatcgggaaacagttttcgaactcctctctcatactccgcaatcctcctgaatttctttaagaagctcagagggcataaccgacagagccagttcctccagagcatggatgtaatcctcgacatatttccattcctttctgatcttctgaaggtacacgccttctttgctgttgtcgatagcctgaccttccagctcctgcatcagttcgaacattttgtatatcctcctatggccgcaaaaatggccggcgactactgtcccggcctgatgatactactctgaaatttcttccattgcaagtcgtttcttttcaaagaaatcgctgagcttgtcttctagctcttcgccaccgatgtaaagctcttcccctgcctttacacgctctagctccttctcagtcaagaagtcactgtagacgtgatctacccatttatcgcaccacgctgagctaaacgctgcattcctcaggctattcctgaaatcagcagatacaacgccaaaagaaggcgcgtggatcatgaaatatgtgaactggtcgatctcaacggagtcgcaggctagcgcgatggcagtcatggcagacgcacactcaccttcgagacgagcatgcactggagcttgacactccttgatcgctcggattatagcgttggcggtctctacctgtccaccgcatccgttaatggtgatgtacacttcatcattctgacctgcattttcaagggtccaaagctcctctgtgagttcttcgaggctctttattacgtatggcagaaggatggagtaacgattgctaacactttgtgtacatgaaacaggcataatacctcctttacaaaaatgggcccgaaagggcccttattactgaatcactcctcgctttctttctggccagagcccagcattgcaaagaatggaaggaggattgtgctcagctctccgctgacagcttcaccaacttctgcaccagcctgagctacactcaggaactcttcagtgcgtacaaacttgtcaaccttaacgagggttttaaagtctactcgttccaagaacgcagcgccggctgcttccgccagaggttcgaggtttacgacttccatagcgcgatccagagcttcctgattgatctctaggccgttctgtgcggcaacctgcatcagggtagacttcacagtctggattgcgtagtctttgaaaaactcacgttgtgctttgttaaacttcattcacttttctcctttgtagtacgacgacggcgggtttttggtttatcttccgattcagtctcttggacttcctctacaggaacttccttagctacttctgtagccttttcctcagtctgcttctctgcaccttctcggaccatcttgacagacttgagagcgaaattcatgttagcgaagtgcgggtcttccacatcaattcggaagccttggtcaaaggcgttctgcatgcccatcagaagactgaaaacgtcccattcttgcacaatgacttcattgccgtcaagctctttttcgatttcctcagaaacgccttcctgacggaacatctggacttgacagagggtgccatacacaggatagccttcgatggagcggacgactcggaaaccttccttcatgtgggcgtgaatcgagcgaagccagacgatagggttgtattctacgatattgataacttgcatattcttttactccttgcgggttagtgttttacaataataccacgtttctcaggaatgtcaacccattttgttctggtagaggcttgacatagaggaaatctgtggtattatcaatattcagcgtgggagagatatgtctgaaagcactcaccggcccacgcctagcgcctatgaagaggaatccacaagggcaacctgaactcgaatgctgttaaagggtggagacgacgcgaaagcggaatgacagcaatccgatgcagcctacatgctgcccctcaccgaactcatctgcatgagtaagaggaattggatagagccaaggcacgtcttaggcagattaaattctgtatggcgagccttgggacgactctatccttccctagccgaatctatctgcatggggtgttctcctgatacacatacacaaatacccaccacagataatccatcaatcaacccataaggaatttctatgagatgtaagtgctgtgatagcgaactctcgtttgagactccagtcatcaataaacatactggtaaggaggacgatctctgctcctcttgccgtaggtttgctctcaatcctacactggatcatgagtattttggtggttggtatccaagcgaaggggttaccgctcctctccctaccggggactgacattgtatatagagtgcgcgtactctgacaatatgtataaatagtagattacggtgcgaataattctttaagggcttgacaacaggagatttcgtgctataatcggagtatatggggcttacaaagcttcagaggatttaatatgactcaagaaagaaacaagggcggtcgccctacgaatgccgagctagaagcccggggtatcattcagacagacctgaaagcagggcttagacttctaaagaagagctttgcagagaacatcagattcctccaagagcaatctgacaacccagaggtctctctacagatgagaatcaagctcaagaaagagctttctgacatgttcgtcgcttactacaaagctgacattgcactcaaaaaagagcttgcaaaaggaacagaatcaggagataatgagaactctgaagaggacaagactcccggagtcgttctcgcgttttgattaattgccgcttcgttcaatggtaggacgccagactttgaatctggagatgatggttcgatcccatcagcggctgccaaatgtagtaaaagaacattcacccgacaaggaatgtgtctcgctcagaggacagcgagtaataagtgtcctccagaattaagggtcggtgagcgtaattggcaacctactggattccaaatcctcgtattctctgttcgaatcggagtcggcccgccaaattagtgttgacaggagcaaagacctcttgtatagttacaccaactgctcgtatagtgtaatggacagcacaacggtcttctaagccgtaaggtctaggttcgaatcctagtatgagcgccaaattagatggacggaagctaaagtggataggcatcgggcttttaaggaggagatatgaagctgtgccctcgctgcacaatcgagaagccagttgaagacttctccagaaacaaaagaaagaaggatggtttacagacatactgtaaggaatgttattctgccatcaatgcagacacgtataagcgtctacctaaacgtaggtccaagatactacaatcgaacaaggatactattgcacgcaacagaaagttcttgggaaggttgagaagaatgtttggttgtaggttttgtggagagaatgagcctgttgctttagactttcaccacatcgaccaaacacaaaaagataccgaggtcgtgaagcttgtttcgtacagcagactcaggctgaaagaagagattagaaagtgtgccatcctgtgttcaaactgccacaggaagctgcatgctggtattgaaggatatgagattgtagtttagcgtctgcacacatgtctttttaagtcggattgcggtgagttcgagtctcacccgttcaaccaaatttagtgagtaaatcagataggttctgaggctccctgctaaggagtacgtctgctaacgcggatgtggatcgagaccactgctcactgccaaaataagtgattttaagtgttgacaaactgaatttttcatgttttaatacacttatcagatgaagaaacaattagcgagtagccctgagtaggtcgggaactagtctagaaaactaggccactgcgatgagcggtgagggttcaactcctttactcgctgccaaattaaggccctgtggtggaattggtatacacatcagtcttagaaactgacgccgagaggattgagggttcaagtccctccggggccaccaaattaagaatctcttttgctatttggttagggttcgagtccctacccggcgactatggccggtctatggcggccaaatagtgagagagctaggggacatgacgaaggtagcgctgctttccgatctccccggcgctataaaagttatcatgaaggggttgacaaacaagaaattcatgataatataggtacatagagtaacaaacaatgtagccgggtagctcaattggtagagcacccgaccgataatcgggtggttgaaggttcaagtccttctctggctaccagaatttaaaggcccattagctcagtctggactagagcaagcccctgtctagggcaaggtcgtcggttcgaatccgacatgggtcgccaacaaggtcgttgtagagatagatggctactatcatccggctgtaacccggacgccataggctagaggttcaattccttccttcgaccaccaaatagcgagagcgttaagactggctggcgctgtcactcggctcataaccgaacacaagtggttcgattccacctctcgctaccaaattgcactccgaggaaccctaagtggtgggttcagtgtcgctacctatctcggtaaggggaagcgcctaagctggcacgggtaattgagtagctgtgataagctactggcagccagtataaatcgtccggctcgggcccgttatagctcctagatttgaattagatgctgtaagccataggaggtgatccagtatctcccggaggggcccgggttaacaacctcatgaatttagcccgcgttggccgagaggtttaggcggcggattgcaaatccgtctcacatcggttcaaatccgatacgcggctccaaagtttattgggatgtagctcagtggtagagcagggagctgttaactctcaggtcgcaggttcgagccctgccgtcccagccaatttccaaaagagactcttcgctttagaagcagagtcgaacgcccgatacgggccttattatctcctcgtagctcagtctggttagagtgtcggatttggaatccgaaggtcgaaggttcaaatccttccggggtgaccaatttaaagcgggtttcgtatagtctggttattattcttggcttccacccaagagactagggttcgaatccctaagcccgcaccaaaagtcgtagacctcagtaacccggagtaacgcccgggagaagatgtgagttctacgtatacgcgtctgaagctaactaggtagaagcaccgggttgaaattccggaggacttggatcgttaccaagcgggcgcaccaaacaatgcagttatagattaaatggataaatcgccagactttcaatctggtgttccgggttcgatccccggtaactgctccaatcaagtccaagccggaacattcctccgtatgtgctttcagccggcttggcattatcagtgtggagattgtgcagcccggatgctgccttccggttgtgacccggttgttggggttcgagtccccgcctccaaccaatgttgtggaattgaatcacaggacgacgactgggtgagattgagcgtcctctagcccgaaagggtgttcgcgcaaggcgaaccgaagccgaaaggctgaagtggtgcccggacccacaaccaatgttgtgtaatggaactattacgttgacgctgtgtgctctccggatcgtaagccggtaaagcgggaatagcgggctcccgtagcagagtagtagtgtggttcgattccacagcacgacacctttcctcctcgcctgtgctgaacggtttcctcctcctttcccgtctcacaggctctattccctgccctttaagcatttatggtgatgcaccggctttgtaacccggcgaattctgttcaagtcaggaatggggcaccaattcactatcaaagaacccgcaagctcccgatagggttcacactctataaggttgtagcatggaaaacactaaggttcctgataaaaaactcggaccaatcgcgctagcgcttaaagaggccagagagaatttcgatctcagccctcatgttattggtccaaaatctttcaaacagaaggagttcacagacagcgatgcaaagatcactgtattcggtggtgctgctggtgctggtaagtcttatctcggtgtaatggacttcatgaaatatatccatgatcctaacttccgaggtgtaatgactcgtcgtactactcctcagattaaaggcccgggcggtctgcttgaaaaagcaacagacctattcaagctcgttgaccctaaagtcaagtggaaagacaaagacggcaagtttgtgttctcttctggtgcagttattttccttcgacacttcgaacaagaatctgacaaagactccttccaaggttgggaggttagtaagttcctagtcgacgaaggtcagcagttcacagaaggcatggtgacataccttatctctcgtatgcgtaacccgaaatgctcggttgttccgcacatgaagattacatgtaaccctgattacaattcgttccttcgtaaatggattgaatggtggctagaccctgacacaggaatcccgatccctgagcgctccggcgtaactcgctggtttgtacgcaaaggcggtaagatgttctggggagacaccaaggaagagtgcattgcccttcatggtaatcccagtctagcgcctgacgatgaagatcaggtgaagcctatcagcttcaaattcatcgcggctaactgtttcgataacccaatcttgatgctcaacgaccctgagtatgtagctaaccttgaagcccttcctagggtagaacgtgaaaagctcctagacggtagctggcacgctagagaagagggagctggatacttcacaagggactggtgccaaatcgttccccatccgcctctacgggtgcttaaaagggtacgtgcatgggacatcagcggtagcattgaatccgaaaccaacagaaaccccgactggacagccggcgtgctgatgagccgtacaaaagaaggcttgttcactgtcgaggatgttgtcagagagcgtaggttgttcggaggtgttttcgacctcattctagaaacagccaagcaagacggtcaagacgttgaaattcaaatcccatgtgacccgggggctgctggtaaagcttatgctgcacagctaattagagacctagcggatcatggattccacgccagaccgaagacaactaacaaatcgaaagttactcgattcgccccgttcgtatctgtagctgaaactaaatcagtgcaagtcgttgcgggagattggaacgaagattacttcgatgaacttgagcgattcgacggaagtaaggctatcaaagatgaccaagttgacgctacatcagatgcatttaatgctctatcccttggcagcttgattatccctgatttcctaccgcctgatatgactcaatccaacaaattcaaactaaattaataggaggcggcgatggccgagactgaaaagacagcaccgggtatcccgcgacttcgcctaggcgagattggtagtacaggccttaaacaagtcaatggtactattctggaagaacgccgaccagaacttcggttccctagggcatgcagaacattccaaatgatggcggaagaccctaccatcaaatcagcactcgatctcttcgaaatgatgatgagcagggttgactgggaagttgatctaggagttgaccccgacgaggctatgaaggcccggggtaaattcctgaaagagtgcatgcatgacatggaacacagttggtactccttcatcaaagaggtcactagcttctacacctacggattctccgtacatgaaatggtgtttaagcgacgtgaaggataccctgtatcgaagtacaatgacaacaaattcggtattaaaaagttgccaatccgctctcagtctactatcaccaaatggttgtactctgaagacggtagaaacttcctagggtgtgagcaaagtcttgccaatgttgtcaatggcgaccgttacgtcaacctaggtaataaggacggaactgtagagattccagctaagaagatgcttcttttccgggtcgatgctaaacgtgacagtcctgaaggtaacagccctctccgtgcgtgctataacgcttggagatatcgagtagagattgaagagcaagagtccgttggcgtaacacgcgatatgaacggtatgcctacgctctatctgcctcctcgatatatgtccgaagatgctacagaagctgagagggcagtctacgaatactacaagcgagtaattcgtaacattcaaatgaatgaacaatctggacttatccttcctcaagcgtttgacccagaaagccgacaacctctgttcaaattcgaactgacctcttcgcagggcagtaagatgtatgatacagatgccatcattcgtcgctgggacaacaaaattctgcaagccttgtttgccgatatgctgaagatgggtcaggaccaagttggctcttactctctagctggtgccaagactaacatcatggctatggcgattgaatcgcggctccgcgaaatcaaagacgtactagataataaactcattcctacgctgttcgcactgaacggtgattatagtccagacttgccgaagctgcaatacggcgagctagatgaaatcgatcttgaagagttctcgaaagggattcagagaatcggttctgtcggtggtcttgaacgtgaccgtgaggtttacaacaagattcgcaaagctctcaagattaagcctcgaccagacgacgagcctgttgatgtggataatatcatgggtggtcagtctcaagcaggtaaagctggagtaggtaatggtgcatcaacatccgcagccggtagagacaacgccgctgcaaataacgcataaggagacagaatgctgactcttgaaagtgttattgaagctctcagcaatgctttcggggctcccgccaaggcggaagaagccccggctgtagaggtcacaaagtccctagacaatgaaaagaggatggctttgtttgtcgttcttgagccccaagaaggcgactccacgactgacctacacgcagacacctactccgaagaggaagtagagaaagcttgcatcaacttcaatactcattgcaacgtagctaatatcttccacaagattgaaacacaggaagctgagattgtccagtccttcatcgctccatccgcattcacaactgacgacggaagagagatcaagaaaggtacatggctccagtggtggcacttccctgaaggctctgaagtagccgatgcactatgggaaggcgttaaatctggtgaattcacaggcgtctctatcggtgccagagctacagtcgaggatatcgaatgaccgtaaaagcaaaacgtaaactgaccgatatcaagtttgaacacgaaggtgctcatgtcgctctggtcagtaagctccaaggtggtgcagccaacgggcacactactctaatcacaaaagctaccaatggcgtaactgaagagcttatcgataaagctgctgaagttacagtcacaatgcagttccctgagttccttcgtaagttcttcgggatgtattatgaagatgccgaagttctctctgttgccatgggatatggcagaacggagtatccagaactagatcacaaagactggatcgaccagcgggtcgagtctatgtccattcttaagtcggtttataaatcggctgacctgaatcaagctctctccgagcttacccctgagcagaccctttcccttaaacaggatcaggaactgcttgaaaaggctctggaggtagtctccgagcaatccaatgaaaatccatccaaggagattaccaacatggaaactatcctgaaatcggcccacctagaagctctagctgacgctattgcagttgaaaaagctgctggtgtcgctgctgttgcagaagttcagaagcaactagacgccgctaatgtagagcttacagctcttcgtgaaattgtcaaggctgctgaggcagagaaaaccgctgctatcgctaaagcccgtaaagagcaactggctgaagtcctcccggctgaccaagtagaagatactttcaagtctctggaagttctggacgatcaagcttttgcacaaacagtaggaacgctccgcattcttaaagctgctgctgaccaaaatgacatgcttgtcgagaaaggtgtatcgggcgctggggaagaagacgactctgttgtcgccggtgttgccgctatcctgaaagctcgccacggctccaagtaatatctagccaatctagaggaattccaaatggctcaaaacattatcgcaaaagatcatcagcgtcttagcaactggctgaaagaagaacaaatgggccaccgtggcctgttctacactcgcgaaactctgcctgtcgctgacattgatgttaaaacaactggttctgtcctagacagcactggcaagctggtaactaaggctactatcgccgacgctacctacatcctaattaccgacctgcacgactatgccaacgctcagatgagccacgctgtcgtccttgctcgcggttttgccaagatcggctccaaggctgttatcttcggtgctgacgttgacgacgctgataaagctaccgtctttgaagctttcaaagccaagaacatcttcgccgttgaccagatcgaaggcgcattcgagaacgtcaccttcgcgtaagcgagggtcgttccagtaaataaacactaggagtaactttaaaatggctaacacccgttcctacctaaacgatggtcagttctacattgccgaccagactgaaaacctgcttatcatcccgaacacttggaccctcgtcgagaacatgggcgtcttcacaagtgaaggtgtgactcagaacactgtccagttcgaagagatcgaaactcgctacggtctggttaaggatgccatccgtggaactcgtcaccaagttgctagcgaccaacgtcgtcaactgcgtgccttcgcgattccgcacttcaaccaagacgactacatcactccagaagacattcaaggcaagcgcgctttcggtgctgaccgcgaagaaactctgaacgaggttcgtgctcgtaagctggaaaccatccgtcgcaactgggctaacaccgctgaagttgcttccgttagcgctatcgtaacaggtaagagctacgccccagccggaaccatcgagtacgactggtacgacctgatgggtaaaactcgtaaggttgtcggcttcgacctgaccaaccctaccgctgacgttatgggcaagaccgaagaaatcttcgtccatatgcaagacaacagccaagacggtctgatccgtggtgacttcgttgccctgtgctctcctgagttcttcactgccctgattaaccatccgagcatcaaagagttctacaaagcttaccaagctagtcctcaatactggcgtgaacgtctaaccgctcgcggtctggaccttcgcttccgtgagttctacttcggaaacattcacttcatcgaataccgtggcgttgacccgtacggcaaccgtctgatcccggctggcgatgcttacttcatcccaaccgacagcggtgacctgttcgctcgttacttcggcccgggcagcactttcgatgacctaggaactctgggtaaagaactgtacgctaccgagcgtatggctgaagaccgtcgttcgatcctgatcgaaaccgagtccaacttcatccacgttctacgtcgtccacagatgatcgttcgcggcactgtgaatgcgtaaagacttcagggaggcttcggcctccctttcgtcgtaggagggtaccaaaatggcttacactggtgatccagcaaacaaccctatcgaccgtctacgagagattgtaggggacgtgtgggagcctccgatgctttccgacgaaacctatcaatgggtgttggacaagaacgaaggcaacgaaagacgagccgcacttgaacttatgcgtatgatgctcttccgcctgacaaggggaatgagagaacgcacaggtgatatcgaagtatatggtgctgagtatttcaacaactacttgaaagctcttcagctcattctcaaagacccgaatattgcaatttctttggccgtgccatatgctggcggtatctccaaatcggatatgctggctaatgacctagaccccgacaacgtaacacgggaattctacatcggttttgcaagacgggagaagctttacaaccagtgcaaccccggtcctcaagaccttagcatggggtgtgattatcttggcaagcttcagttttaaaacagatcgccgtcgcctcacatccttgattaagagggtggaggctctagacggaacaacggtagaagttggtttcttccccgaggaccgatatggttctgaaaatggaaacctaccagttgcacaagttgcagcttacaacgaattcggtactactcgcaacccaacccggccattcatggctccaacctttgaagaattcacatctcaattccactacgcaagactaatgaagtccacgttcgagaacgtcctacgcgatggaaggcagacgaatactcttctgaagaaattgggtaaaatggttgcagagcagatgcaagttaacattgacgactatccgggctctaacagtccggcatgggcagcttacaaaggatttaacgatcctctattccatactggaaagatgcttgagtctgtcaagttccaaatccatcggaggcaataatgctctatcctaccttctccatgaccaacttcgtaaagctagatttgattagaagagggcagcccggagacgacggttttggaagacctacccctccagttgagacagtagtaacaatcacagctaacgttcaacctatcgaaaaatcgacagacactcgtatccttccagaggccgacagaagcaaggcttgcttcaaggtgtactccagaggcgaagagattcgacagttaaaggaaggcccgggagggtggagtgccgatagattcatgtgggaaggagagttgtatgaagttatgaaagtcatcaactattcgatgggaatcctaaaccattacaaagcaatttgtatgagagtagagaggaatagcacagcatgatccacacagagctagaaaactccctctatcttatggtcaaagagttgttccccgactggcgtgtaattcaagcttacacgaataatcaggaaccgcaaaccccttatctggctatcgacattaagaggctggatgaactgggaagggaaaatgtctccaatatgagcgatcccattagtccttcgcatggaactattcaagttcaacaggacttcgcagccaaagtcgtattcgaactgattggcaagtatggagagacagcaagtgtctctgacatggcaatggcgattactcgggcaatgcgtactccagcaggacacgccgcccaaagaaagtttaatctatcccttttcaaactccctagcacaagacgagttcctatgctaagagaaacagatatgtacatgttctatcaagttacatgtgaatttggattctctgttatagaaaccacaactcaagagtttgctgctggggctgatattcacggcgtttattacgacgctggtcgcccgggtcacattattgagtcccacatcgacataaacttcgaacactaataggagacaggaatgactgttcttactgatgtaattgacattcagatcagccgtgagactgctgctgtcgcacagacaaacttcaacgttcctctgttcatcgcttctcacacaaacttctcggaacgtgccagagtctacaacagcctgaaaggtgtcgctgaagacttcggagaatccgatccaacatatcttgccgctgttcgctacttcggtcaagctctcaagcctcgcagtctagttatcggacgcagacaagttccttctgctaccgtctctgtcagtgttgttcaggaaggacaaagctacgtccttaccgttaacggactacctgtcagctatgttagccagcaagacgacactgctactctgattgccacaggcctaaaggcagcttatgacgtaactccggtagccggcgtaaccgtcacagacaacgaagacggaactctaaccgtcgcttctaacgaagactggagcctgaaggtttcttctaacctgactatggctgctgctccctctactgaaggttggccggctgctatcacagcagttcaaggagaaaacgacgaatggtatgctctgagcattgacagccacgccgatgatgatatcatggcagtagctactcatatcgagggcaccaagaaagtgtttatcggagccactgctcaggctaacaccaagacttccgcagagaatgacattgcttctcgtctggttgctgccgggttccaacgtacggctctaatttaccatccaaacgctgacgctcaattccctgagtgtgcttgggtaggataccaactgcaagagcaaccgggtagcaacacatggacccataaagctctagctgccgtagatgcttaccgtctaaccccaaccgaatctaccaacctgaagaacaagaacgttaccacgttcgagcgcgttggtggtgtcaaccgtacattcggtggcgctatggccggtggtgaatggatcgacgtaatgattttcgtggactggctggaagcccgcatgaccgagcgtctgtggttccgtatggctaactccaagaaaatcccttacgacgccgttggtgcaacaattctggaatcggaaatcagagcccagcttaacgaaggaattcgtgttggtggtctggctgaagctccggctcctaaagtcttcgtacctgatgttctatccatgtctccgaacatgagagcacagcgtatctttgaaggcattgaatttgaagcccgtctggccggtgccattcacttcgttcacattcgtggaactgtgaccgtctaaggacggtccttcccataaggagattactaaatggctgttcaacgtctagcgacattctctccggctgatgttaccattgttattactcaccctgcaactggtgagagcatggttctcggcggattcagcgaagacagtatcgttaacattgaaagaaacgctgacacttacgtgatgtataccggagccgacaacacatcgactcgcgtctacaacgcctctaagtctgctaccctcactgttagccttcaacaaacttcgccttcgaacgacttcctgactgctctttacaactacgacgacgcccgtcgttcgtctgagggattgttcacaatccacgttaaagacaactctggtcgttccgactacttcagtgatgacgcctatgtcggtgttgttccgggttctaacttctcgaacagcatgcagacacgcgattgggttattcatgcacacaacctgcaaactctaatcggcggtaacgccaagctgagcccgggtgatgcggatactcttcgtaacctaggtgtcacactagaccagcgctggctgtaatatagcgcttatgccacatcgacggggagctgccttaacgggtggctccctttgttgtttctggaggatagaaattgattaccacctactcgccgcgtgacgtggttgtaactctcgctggtatccattccgtgacagggtacgcagagggagagtttatcagaattgtaaaagatattaagcctttcatcaagcacggttcgatggatggtgaaatcgcaagggtctacaacaaagaccaaggctggcgagtagagttgacaatcatgcagtcctcgccgaccaatgatatcctttcgatgctttacaacgtggacattgcaacccgaatgggaaaattcccactgatgattaaggacacgaagggttctacaagcttcctagctctgacagcatgggtggaagacctacctagggtatctttctctggacaactggagacccgcacttggattctagggtgctctgaggtcgccatgaacattggcggaaacgtcgatcaaagtttggtcgagcaagctatcctgctgggaagctctcttctgccagcccttacgcaattcggaggcttctaatggctaacacggtattgacatatagcccatctgatgttaaaattgtcctttgtgggtatgctctcactggtgtagtttctttcgaaatgtcttggctttcgagaccctacacaatggttcgaggaatcagagggcaccacacccgggtcttcaatagagacctttctgcgcagattagaatcgaggttcttcagacttcggtgtctaatgatgcattcttctcgctagtagagcaagaccgaagaacacaatccgcccgaatcaccttgtctgtcaaggatacccacggtagcaccatgatgagcacagacaacgcttatgtcaatggctaccctagcataacattcaccgatggaatcgagaacagggtctggactattgatgttctggactggaccgatggcacggtaggcggaaaccagcaagtcggcttcgacgtgtttggaactgttcaaggcgctcttagctacctcagataaataaggagtatttatgttcggaaaccaacgtactgtcatccacaatgggacagaatacactatcaaccttctgccagcaactcgcggtatcagcgtactgaagcagctaaccagcttgctgggtccatcccttgccaagtatcaagctgaccacgacttctctggagccatgaaagaactgttcgataacatcgacaaggttcctgttgagaatttgatccagaatctgatgctgacagttttcaaaggttcgatggcaatcaatttcgacaccgaattcgctggcaagtatgacctgctgtacgcactcacaaaagacgtgatcgagttcaacttcggctcggttttttctctaatcggtttcgcagaggcaccgacggtataaagaccggggatgggcagtccgagacttcagtcactactgatcgagttcagagtgatcggagggttagggaggcccaccagaagttctcgcagcattgggagatttatgtggctatcactcaccctctcaagctaacgacgtatggggaactgagtacagtcctcactacagaagatttgtacaacatccttgaggttatagacgttcacgatactatcactcaagtggcaaaagaacacgcagaggctgataagaaatgattacagaaaggattgcccagctaactggggaacttaaatttacagtcgattcccggcctctcactgcttttgacaagaagctcgctggggtcgaagcccggctaagagaattctccaagctgacgaacaagcggtttggagttaagctaactctagatacaaaaactctgagagaggagcttgccaaggcagccactcaaagggtagtcttgaagaacatcgcggtagatgctgccgctgttcgtcttatctctgagaagcttcaagaaagactgaatgcaacgccgatcaggttgaagtctgttaggctagaccttagcggtatccgagatcagaaaaacttcgtaaagacggctctcggccagaccaaggtcgatctaccggttgaactgggcttggctcaggctagccgtacgctgtatgaatggaagaagcgcacagagagtcgttttaaaattcatctgaatgcagacattagccgctctaaattgctccagaatgcacgaaacacactaagggatgtgcagggtaggctaaacggtcttgctgtcgctacgcctcaaattaggctgtctgtagaccgtgcccatcttcgtagagagattcaagatgttcttgagcaaatcagacgcgaagtgagaatccgcattgacctagagtcttccatccgaggaggtggtgcaggtggatcgagaggtactgccggccatatccgtcaaggtatgggaatggggattggtagcgagctagccgggtggggacgcgggtttattcccggccttggtggtgcgttcgctattatgcagcttaaccgtgctaaccaagaactgcaaggtcaacgtctggccatgcaagctgtcggtggtggagtacagggtggtcaagagctacaagccaccctccgcgatatctctcagcgtctcggtcttgacgatagagcaataggtagctcctatgttaagatgatggctgccggacaagcatccaacttcgacaaaacacaggttgatggcatcttccaatccatggctgaatatggacgagtgatgggtctggacggggaggctatgaaaggctccttccgtgccgtagagcagatgatgggtaaaggacagatcatgtccgaagaattgaaaggtcagttggccgaaagattccccgctgctgtagctctgatggctaagtctcaagacatgactatcgcagagctaatgaaaaccatggagaaaggggagcttaagagtgatgctctgatcccattcgccagaactctagcggaagaagctcgtaaaggtggcgctctggacgcggctatgcaaggtacagccgctcagcagggccgattccagttcggatggaaccgcactatcgaggccttcgcggctggaggattcgaccgaggaatgagcgacttcttcaagattgctgcccaaggcatgaaagaagcgcttcctctggtaactgcacttggtggcgggttcgaagctcttatgaggcctgtcaacgctctggtcggtattggaggggagcttggttcccagtgggagaacattgccaagcagttcaacatgaccggcacagggctgactcttaccacggctcaaaccctagccttgctgacccctatgggcaggttgatctctgctattagctggggtgcgttggcactggaagacttcattgtcttcttggaaggcggtgattcggtgttcggggacttcttgaacaacaacgtacaagctgccgagacattcgaaaagctagccagtgaatccagtgaactgaagaacaatctcgacggtatcttctctgttgtcccggggctagctgaagcgctcaaaggtctagagttcaatgaaatgctggtcagcacgatgagagaacttgctgccatcatggagttcttcaacagtgttgtagagagattcgcaatagccggcaagtacagggacgctaagattgctgaagccggaggagacagaagtactataatgtcgaacatcgacacgatgtacgctatgttcaatccggaagatgcaaaagacaaggccaccttcatcggtgacaggctagtagctcagaacattgacgcgatccagacagagactcatacccgtgcaacccagtccttgactccagaccagtttgggtatatgatgcaacgtggtcaagttagaaacgaaatggagggtgccctcaagaagagtgccattgacattagtttcaacctcaatgtttctggtatcgatgctcagggtaacgtcatgacaactgaagcgcaagagcgagtacgagagatcgttagtaacgttcttgaggaagaaatctccagagcttcggcaagttataaggaatcccaatgacaattgctatcaaaagagagaacggagacctaatctggttcgacgctgttacagagttcggaagacagtaccgtggctctgtgagttccaacccaatcgaaacgggaggaaaaatcacagaccacattactacagaaaacccagtcttcactcttacagccgtcgtatcagacgcagacttcaacttgaacaggcccgttatcaacgacaacgaggcccagacatacaagatcaacaacaaagagttcgtgaatacgcagccggtaaccatcccggctgttatctcaacctctagactagaccctagcagaatctttccagaagttatcactcagtttattcctcctgagattccttctgcaactgtcctccctcaaaagggtgataaagtcgcttatgatattgagcgccaactgatcgacatgcagcgtaatgctgaggtcttcagtttgctggacttccgagacggtatcatctgggatcaaatcgaaagatgcatcttcaccgacttgtctttcactgaaaacgccgagacaggtagcagccttcaacctcgtatgacaatcgaggctgtgacattcacagatactcgttatgtcgaggtgagggttaacaagggtagaaagaccgctaagaaagaaaagagagacaccaaagaaggtgataccggggctagcaatgctaccagccaagactctcctacattcaagcgtagtcaaatgaaagaggctcagattagaactcaggttgcgaggtagactaaatgagcacgacttatatcgacacacttcctctctaccaagaccggaagtacagatacgcagtagctatcgagggaatctcaagagtccttcaattctactggaatagccgctctcggcagtggcacatggatatattcgacgaggaacttaaccctatcctgacaggactggcggttgttcctcagtatccgatcatggcagactacgccatgcaacatataggtttcaatggctacttcctactgatgcctgtcaacctagaacaggtacagtataagcacgatgcaagtgacattgtaccacagtttttcgaactgctatacgtgaacgttgacttggaggatgacgtagagtgaaacaatatgacagagtgtataaactaacgctcggtaacactgaatccgggcaaggtgtagagattacaaacctccaccctgacggaagtttgaacagagagggacttcagttccggtttgatatctctaaaagttcagataacaagaagagcggaaactcggcgactgttgagatatacaatctgtctattgccactctgaacattcttgaaactgagtatctgacgtgccgactagaagttggttataaggaaatgggaacttctgttgtgcttgatggcaacgtggttgaaacttcgactagaaagagtggtaacgattatgtcactcagcttattctaggtgaaggatatacagcactaacagagaccaagctgaagggcacagtatctccgggcaaaactgtaaaggatgttatcgaagaaattcgtcttcaaatgccgggagtggacagaggagcttatacaggcctcaattgcaacaacccgatcatgtatggataccaactacgtggactggctaaagacgcactaaacagtgtgtgtgaagccaacaatattgaatggaacatcagtggaaacgttctaaacgtcacagacgttaacggcccaacaacgaagagtgttcaaatggctcctctcgtaaacagagagaccggcctgattgatatcccattctacgccagtgccagcggaacagcacagaagaaagaccagcggagacggaggggcgttcaattcaaatgccttctcaaccctgagctaactcccggggttcttgtccgggtagagtcggacagattgtcaggcactttcagaatcaacaacgtccgaatctcgggcggatacagagacaacgaatggtacactgaatgctggtgttccgatcttaaccaagaggatattgaccaatgaggagaacaggcctacaagagcttctgaacctgcactcgtccacagagggttcgaagcagtacactgccataccttgtgtggtattgcgcgttctggacgattttagacgcctatctgtcgatgttagaccagtggtcaacgacctgtacaaagacggcacatcggaagagcaaccagagattctatctgtccctgtcattatgccgggaacagctaacacacttatcagcttcccattgaatgttggggatacggtgttgtgtgtattctctcaaagaactatggacgtgtttaaaggctctgccactggacagccacacactccaaacgatcttcgtaagttcaacatggcggatgccattgccattcccgggctgttcaccttccctaggtcgatgaacgaccctgcaagacatagttggccacatgataccaaagaccttactattgcccacaacctgatgacgggacaagaggcggaagttaggatcaaagccaatggagatattctaatcaacagccgcaagactataagcattaatgctcaaaatgtcaacgtcaagtgtgcttcactcactgtcgatgcagcccatacaacatggaacgggaacattgcacatacaggtaactacgtgcagactggtggaacttctacattcaacggtattccattccacactcacaaacacggtggtgttatgccgggcggcggtgttactgctgtcccacaagcttaaaggagatcatatggacttgtttgtcaaccccgacacacatgacttggtttttataaatggtgaagctccagtcactcaacgaatggttgatattgttgctcagcgactaaagatcaaactgtacacattcctaggtgagtggttcttggatgataggatcggcatcccctacttcgagaggattcttggtaagtctaggagccttcccgctgttgacgcgatattccaatctgagattatgagagaccccggcgtccttgagattacatcttggcagtcggggatcgaccctcacacacgtgaatactccatggagttcacagtcagaaccacagacaatacagaatcccttcccatcactttcagaatgataggagtttaatatggctggaattacagcagaaggtctaacgattaaagacttggaccaaatcctgacagactacagaaacgtagcctctcaggtcttcgccgacctagtttcaactggagacgaagttgacacgtctggtaactctgctctaggccgtctgatcggcgtagttgctccatcggacgaagctatctgggaagttatccagatggtgtataactccttcaacccggcagccgcaactggcgtggctctggataacctagtatccttctcggcaattagccggcatgctgcacgtccgacccgggctcaggttgttctagagggcaacatcaacaccgttattaactcgcctcccgcgaagatgatttccagcagtacaggccgagtgttccacctactacaaggcgtgatcctcactcctaaagcttgctctggtgttggaatcttccctcagacagtaggcaacgacctgacgtacgagcttaagatgtacgttgatgacattaacacaacgtctatcaagtacacaagtcctgccactggcacagtaacatccgagtccatcctagcaggactggccgccgacgtagctacaaatcacggaaataccttgacaagctacgaacagaatggtatacttttcatagtacctattgacccatttaacaccaagactttcgaagaagcctccaacctgagtattcagaaggttagaaagcttggtatcgctgttgacgacgttattggccctgtgcctcagcaagctctagctatcgatacgatctccattcctattgccggatgggacagcgttatcaaccctgttccagctatcactggccgtctgcgtgagaccgacgatgagcttcgcgagagattccgaaactctaaattcgtacaagccaccaacattctggagtccctaatcgacgggctgatgaacgtagaaggagtcgaggatgttaggattatcgaaaacgatacagacaacccagacccagttcatggagtcccgggtcactcgttccttccaatcgttcttggcggtattcctacagaggttgcacagtctatttggctgaacaagccattcgggattggctctgttggagatacagaggttcaggtggtagacagtcggggatatacccatagagtcaactaccagcgccctgtcgaggttccaatcgagatcaagatcagtgtaacaaacacaggatcgatgccagagaacattgaagatatcctacggccaaggattgtagcgtacgggaccgagaattacaagatcggagacgatgtaatttattctcgattctatgctccaatcatggaaatcccgggcttccaagttaacagcctgacgattgccaagaaaggacaaactcaaggcatggcgaacattgaaatcgggttcaaagaagtggctacattcgccgcagcagatatcaccgtaactacggtgtaatgatagaaggagaattccatggctgtcaaccaatttgacagagaagattatctggaggtggcccgggaacgggtcactgaacagtttaaagagaagccgatctttgatcgcttcctgcaagtgctattgtctggcaagtttgatatccagaatgcactggaagacctccagactctccggtctctggacacagccaccgggaagcaactggacattatcggagacattgtagggcgaccacgcggtctagtgtaccaagatattttcaactattttggattcgctggaacggagcgtgcaggttctttcggaagcctgtcggaccctacggtcggtgctccatggtactcggtcggtgctccaactggtaacgccagagagccgagcgacgaagagtatcggatgatcctgaaagcaaagatcatcaagaacagaacaaactcaaccccagagcaagttatcgaagcttataaatttgtattcggggttcctgaagtattcctagaggagtacgctcccgctgctgtccgtatcggcatcggtaagattctaacgaacgtagagcgtagtcttctattcgacctaggtggtgcaggtgcattgcttcctaagactatcggggttaactacacatacactgagttccaagctggccgggtatttgctacagaaggcttccccggaggacaaggcgttggagacctaaacgatcccactgttggtggaattctgaccaacctagtgacataaggagttataaatggctgattacagtcaactacctattgaaaatatttggtccacaggcggggatatggtagccccgacccctgcgcagcagcaaggcggatggggtattcagtcggttcctcgccaatggtggaactggaagtggaaccttcacgatactaacctagcgtatttgctacagaagggcatcccagagtggactagtacacaagagtacattgctaacaaatcgttctgcactagaggtggatttgtttacaaggctgttcgtacgcatacaggaagcgaccctgcacaagttagtgccaactgggttcgagcttttgcagattacaccacatctagctctgcacttggaagcctgacaccaagagagggtggaatcccattcttcattagcgctacaggagctagcgtgtttgactctacggcctatggtcgcggaatgttgaatgtagctaatgcctccgcagctagaagctacatttcggctcaagaaagctctgttgtactgtccaacctgtccactgtgactagggctgccaacacggttccgtacttcaacacggatacctccatggctaccttcaacatcacagcgttcggaagaggacttgtcaacgcggctaatgatgaaaacgcaagaaatttcctaggactagctaactctgctatcattacggcagacccagctaacagggcacatactctggtctatagagatgctgctggcaacttcaacgctggcgtaatcactgctaccctgtctggaaacgcaactacagctaacaagcttagaaccccagttacaatcaacggtgtggcgtttgacggaagccaaaacattgttcttccgggcctagatacaagttatgcgggaacggttgcacgtcttcacatcaacggagcgaacctttcgagtgcagataagactactcagctagcactgaggaacaaatctgacaacgactggattagccttgctgtagtggatgacaacattctccagtttgtattcagaagcgctacaaacccagttgtacagattggcaacgaagttatccttcacacaggaaaccagttctctctgggcccgactcttacagacgctaggtctcgtctgggtctcgacagactaactcaaggtagctctgatactcaagtcttccccagcaccttgaacaatggcccctacttgaccgtacaacctacggctatcggaggattcaacggtagcactaacggatggctgttccgattcgacgctaatggtaacatgactcatggtacagttcctgccgctagaatcactggtctgtccaactcggctcagattccagccacaactacggcgcaggctaactctcttgttcagagagacgcagacggaggattcagcgctattgcgattaatgcgtatggcactatcgtcgggtacggctctaacatcttcagtagagcatcgggcactggcaacgcccacatcgggttccagagagcgaacggaacagaactcggtcttatctggggagcccaatctaacaactcgatgaacttccgagttgctggcggagccaccgcagtgtcgattaccggtctggacatgactgttactggaagagtcaatgctaccacactaaacgcctctggaaacgtgaatgcgacaggcaacgttaacgccgggagcgctacgctcaatacagcagggaatatcacaggagccgcttacggagcctatggttctctgaccaactgggttgattcggtatatgccaagaagggagaaattcctaacgatatcgcaagagccggagccgcttgggacgctgtaggtcagtatattctggcgggagatcaatctggagggtctggtggaccggggacaactagagctggaagccagttgaagccttattcgactattagctacacagcaggggcactaccagcagcaggcacttacagatgtatgggagcgtttgcaggtggtggtaaccagattaccctgtggcagagaatttcttaatagagggcttcggccctccttttagaggagattatagtggaattcagaaatgttgtaaaatacaaaatggggttcgaatgcgaggtaaatcatcctcagtggggatggattccgttctacgcttgtgattacgacgatagagccaaactggtatatgacgccatcgcccgtgctgtcgataacggagaaatccccgaaccaaaggacgttacagatagagacctcgttgtagatgcacgtctgtggagagataatgagctaacccgggctgatcgtcaagtagaaattgctatcgacgatgaagacgaagtaaaagagaaggcttggcgtaagtaccgctctgcactacgtaagtggcctgagcataaaaacttcccagccgagaagagtaaacccaaagctccgaaggagtgaggtaagataatatgccaaacattatgaagcctacgggaatcaacgctatctggtctgaaaatggccagaaggttgacccgggtgctgtgaaagtagggctaggctgggttacggaacttcctccgtaccagactgcaaacttcattgaatataaacaagacctgtttaacgctcacgtcaaccaacatggtatccctgaatgggatagcgtgacagagtatcagggtaacctgagctacactcaaggcgctaacgggatcatctataagtgccttagaacccattccgacaagattccaactgaccctctgaacattacagccggatattggcgagtggcgtttgaggatgcgggagaggcagctaaggttcaagccaaccttgatcggcatgtaacaaactacaacaccctctctgggattggcaacgtagttattgcaagacaaaacctaagtgtgtatagtaaagctgaaggcgacgcccggtacgctatgaagcacgggaacggctctaatgttttcagcgtcgccactgccacacagccaactcacgcgatcccgctgagccagctatcgactctcgttcctcctgcgaccgagactgtagccggggttatggcagttgctacgactatcgagacagaagctggagccaatgataccaaggctgtgagtccgctcaaggccgcacaggtgtatctgaagaagaaagacaacctttccggtctgtctaacgtcactgccgcaagagctaatctaggactgtcggatacagcgactatgccttcttctacattcctgaaggcaggtagcaatctggcagatgtgcctaacaaggcgctggcaagatcgaatcttggaattacaagtagtgctacccagccggaaacctatttcttgaggagcgctcagaacctagcagatgtacctaacaaggcacaagctagagtcaacctaggcctcactgggatggctacaacagaccctgcggcggttatgatgaaggcagacaaccttgctggattggctaacactgctaccgctcggtccaacctagggctaggcacagcttctactagaaatacaggagacttcctgtcgtctggggataacctgtccgacctcacgaatgtccaagcagctagaaacaacctagggttgaagggagcggctacgctcgatgtatggggtcttcctgcgaatacaactgccatggacttccagtctaatcagtcggatatttccagaggatgggctcgactaccaaacggccttctgctacaatggggaactggtcccggtctatctgatgacacaaggacgaatatccaactccctgttccagcacgaatcttgaacgttcaagtgaccgtaatggggacgtttaacaactccatcggcccgggcgctttcatgacggatatgtggagcaacaccgggtttagagttagctgcaactggggcaactggtcttacccgttcaactggtttgctatcacttccaccctgtaattcaggagtatcaaaaatggctctaactgagcaagacttccaatcggctgccgatgatctcggagtcgatgttgccagtgtaaaggccgtcactaaagtagagagtcgtgggagcggctttctactttctggcgtccctaagattctattcgaaaggcactggatgttcaagcttctcaaaaggaagctaggtcgtgaccctgaaataaacgacgtttgcaaccctaaagctggaggatacctcggcggacaagcggagcacgaacgtctagataaagcagtcaaaatggatagagactgcgcacttcaaagtgcctcttggggcctattccagattatgggattccattgggaggcactaggttatgcgagtgttcaggcatttgtcaatgcccagtacgctagcgagggatcgcaactaaacacttttgtgcgcttcatcaagaccaacccggcaattcacaaagctttaaagtctaaggactgggcagaattcgcaagaaggtataacgggccggattacaagaaaaacaactacgatgttaagctagcagaagcctatcaatccttcaagtaaatctaggaaggttcctaatgaagaagctattcaaaagctggaagttctgggctgctgtaggctctgcaacttttatggctctggaagccatggttcatctttgggagcctatccttcctcccggcgtgttcgccgcagtagccacactggtagctgttggtgtgagaatttcggcagtgtttgtaactgctggtaaagtggaggaagcgatttcggaaaccatggaacatgacaccatagaagatggctcaatagaaaatgatactaactaaactcaaaaactacgccctcgtagtagctgccgcaatggcagcagggtttggatatctgtcgttctctttgtacggcgacttagctgttgcgaagaatgatatccaatctcttcaagctgcgtctcgacagatggaagagcagttccagaaagagcgagcagggtgtgagatcaccactgggagactagaggcgcatatagtccaaatgaagagccgacaggagcttctacaaggccacctgtgcgagcttgagtctctacctaacccaaccccaagggagacccaagaaaatgccacagagacgatctctgagccttctactggggatagtctggaccctgctcttacaagcttgctcgacagggccttctgttccgcagtaccaaacgatccttattgtgcccccggcaagcctgaccgaggaggttaaggtataccgagtggagcaagatacagtcaaggggctcgctagagcttacattctaaatactaacagtgctgccatgtgcaatagtcaactacagacaataaagctatgggcagaagagcagagggctctatatggaaagtaaagacggcaaagaaggcctaatcaaggtagctacacagggagttatctctctgctaattgctatcctaatggcttggtctggattcctaagttccagtctttctaagcaggaagaacgtatctttgcgatgcaaagagatatggtatccgaggcaaaacttaacgcactagagtcgagattcaatagccgacttgaaagtgaaattagtaacgtaagaagagaacaacaagaaaccaaccggtatttgattttgattatgaatgccgtcaagggtcgggatacagaaactcaataactataacccgttaacccacactgggagacaatataatgacaaggaaacaagactggccgctagtttcagcagtcggggctttgtttatctccctccttgtctgtatggctattctggctttcacagcgatgactcccgaggctcggtttgactctgtacgccagacctacgagattcgaattagcgaatctgagcggcggtatgaactcaaactgaacagactacaggatcagataaactcggcctcgtacacacaggatcggcaatcccgtttgcaatatgaagaactcgactcgcttaaaaggaagattagcgaacttgagcggagaataaaagaaaaacaagaataattaagccccgggagcgaaagcttaccggggctctttgtcatgggttttcagcgaacaacttgataaacttcatcgaacaggtcatcaagcttctggataaccttcttagccagcttcttgcgaactttgttagcctctgggctggaatggagtagcttaatatcggacgcgttgccccagtccatcgccccgttgtcgaacagcactttaacattcagatgcatcgagccctcgtcaatatcgacaactacgccggtcatccgagcgttggtcttttcgaaggtcggcctcggaatgtctatgtccagactgccaaccataacaacctgccctttcttaacgtcaaataattccatttaaaacctccttaatctaacttcattagtgtgttgaactgatgcctcagagacttaaaagcctgtggcccatcgtcttccgctccttcatgaatatgatgagcgattaagtgtatcaatcctcggtctcctagtaacaaagaactaggaatttcttttatccaagccacaaagcaacagaagtgtagaacctccggcatggaagccttgaagctggaatcatccagcttcgataggcgttcatacgtagctttaagatcgggatagcttaactgatatgtagcatcttcgtcaatatgctggtcccctctaactacatactgcaagctcatattacaccttctttccgccttctgcaagacgtgcctctcgcttatggtcggaacgggtcatattgtactcgatcttctcgatgatcgcacctgcaacatctagacctcgaacattcgcgtagtccatgatacgaatgatagcgtcagccagttccacctcttccatcttccgctctggcaagtgatcgtccatcaaatccttacggactccttcagccgcttcggcgatttcagtggtaacgagcatcagcatgtgcagagcatcacgtttaatcggctcgcctgtgaccagatcggtgttccacttgcggttaacaacctcaaggccagtcatcattttgttaaaaccgctaacaaactcgaagacggactctcgttcgaatagttcaccgaacgttggctcttgatcttcgacaattgcagtgtggaaaggccactccatccaagcgtcatagcactttttgataagctcttgttcgtcaatgtatgagaagaaatcttcatatccatcaatcgcattaacaacttcagttcccctttcccaattgcgcttatcaataagtctctggtcgattcgcagggaagtgctgccaacttcttcccatgatctccagcctactatgccatcgccgaagtacaacagaatgggcagattgaatccgcgttcttcctgatccttagtctccatagctataacaaacgccggtactttttctccacttacgccattggccaagacgaaagaacccaagtgggtggtctctcggctagctgggcgatgagcttcctcgatatgatctttaactctactcattaacttcaccctcctcgcagaacatttcaaaataacaatcgacacaagttagcatgccgtcgtcgcttacaacctcctcgggagggaagttgttcccgcaacattcgcacacaactcgatcaacctccctgcatccccagtaagccatatttactcctccttcagaagatactcattgctaataactttgaagctgaagtctcggctcatgcttttgaaaaccaagccttcccggtacttaccgttcaacgcagactcgccactagccattttaattacgagttgcatgtcttttggaacgcctacgtcccacatgtacaccggcacatgtttgaccgtctcaccacccaactggttcagcgtattcagaatggcaagacgctccgctggaagacagtaacgactgtccgaaatgttgtagatatcgtacacatagtattccggtttgtcaactccctcgaagttgccttgaatatttggtgcaaccagttcgccttgaagggcaatattcagaccgaaataccggagacgttcaccaagattaagctcttctgccatcgcagtgaagtgattggagtctttcttaatcacacgcttccagccccgacccttgaagaagttcttgatagcagtgaagaacccgatcttctcgtcttctagacggaaaccgacatttcgagacgccacgcctacttctccgtccttgtgccagatagtgagagacgaaccgtccaatttgaatgtcacttcaaacttctcgcccttctgatgagcctgatcgtaagccatctgaatattttgtacgcgagcctgatccgtcttcgggatgaagttggggaaccctagcttggaagtgccagtccggctgcccttgttgcctccattgatagctgcctgctcggaaggctttacatacttcaggatgcccattcgatcggtaacatcttcgtctactttcggctctgggctgcccgctgcatgaacaggtacgatcaggccttgactaagctctttacgaagcttcatggtcttgattcgagaatactcttttccaccttgttcgaccatattacggcctcgcaggaattcaaagatagggttatctacaggcaccatggaatccacttcaatgtagattgccagatcaccagcctgatattcccctcgtttgattacgcactgccaaccaccaacaagcgccagatcgaggctgtcagcgttaggatgggtcttcacatcgtcgatacgcaccactcgggctagtacgcggtcttgggaattactcatatattatcctccttgtttgaaaattggtatattacttgttaaaccagccgagatcaatagcccgctctagggccagtagcagattctcagcatctagaaggtcacggatcgcgatccaactaccactgtctcccggtagaccgtctgtgatatacacaggtatgtcactgtattcgctctttttaagcccgcaggcacaggctacattgtccccgaagacaatctcgctgacttcccttgcctcgtctcgaatatcgatcttcacacctaccctcctgttgtgttgaaagttgttgtattctgcccggatatcttcgcagtgtcaatagccttgacaagaaaataatccgtgatagagtgaggtctctgctggagagaaatgtccacgtcactcaccggccagcagtatagcgtatgaagaggaaagctgcaagcgcaacctgagtcgaatctgagaacagggcagcgacgacccgaaaggggaaagctcagagcctataaggaacccatgttccccgctcaccgactcatctgcatatatgtatatctgcatgagagcgagaggtagaccaaaggcatgtcttaggcggagattccgtatggcaagccttgggacaggtctgcctccactaccgatctatctgcataaagggggtacaatgtattcagcaactgttgtgaacagacactacgagaaatttgatgtgtatataggaagggggagcaagtggggtaaccccttctcccacaaggaaggcaccagagccctctacaaagtagatacagtggaacaagcaattgagtgcttccgaagtcatctttggcgtaacataatggaaggattaatcacagttgatgaccttctggagcttgacgggaagagattggggtgttattgtaagccccgtccttgccacggcgatgttctggtgagggcaatcgaatgggccaaacaacacagaggagtgtataaatgaaacatgttatttaccgagaagacctaatcgacctgttacgcgaccgtatgaagctccaagcgctggaggctggtggcgttgacaactgggactggtatgaggcctcgcttatcgactgcggattcttcgatgatgacgggcgtgagcttgaggtcgaagcacttgcagattgcttcccaaccgtaggtgcgtaaccgtggaggagtcgaaagctaccttcaaagacccttaccctaggttcttcgacgcttctcgtaggtatggcgaaaccaacgactgcatggtggtgagctttgcagtcgtatggaacaccacctatgaaaaggcacaccagcacctgaaagtgaagtgcaagcgcggttaccggcaaggggctactcagaagcgcttcagctacgcagacacttggtgccctaagacccggatgctctaccgggaggatgctaaggataagactcttaggcagtttgctgaggaaaaccctgaaggtcggttctggatcgcggtaaagggtcacgctattgcaatcatcgacggagtgttgtacgatcacactaatgacaaaagacgcaccatctggcactgctggcaagtgtggcccggggaggcacctgagaaaatcgagaggaagcctgatccaatctcacctcctgtgagaaaggccccagattggtatgtctgaagattacaactgaggaggaattatggaaattatttcgagagggacgctccctcaagaggttttgtttacggctaagtgccaccactgcttgagcattctccgggctaagaggtcggaacttaagtatgtttcgttctcattcggacgccccggggagactgggtattatttcgcagagtgccctgtgtgtaacgaagaggtgtctgcttgggttgtggttcctaccagccctgtagcacctcctcccactgtagagtatatcacaaaggagcgtaaataatatggaccagttagcaggattcatgggcgaacctttcgtaattgcgttcgactacgacgagacgatcagtctctaccctcttgccttccgaatcgtcatggataccttcaggggctttggaggcgctttcaatgtgatcgtagtcactgcacgccaccctgacaacagcggagagttagagtggctacgggactacgggttcccgatctatttcacggcacagaaggcaaagcgaccattcatggaaaatcttggaataaaagtctctgtatgggttgacgacaacccgttcagcgtggataatgaccttcctccgtggacagcggagcaatacgacgcctaccttgaggcaaagaagcaacgagctatcaacagagggagtaaagcatgagcgagattattaaggttgaagtgggagatcgggtggtccttaaggcctattgcgatacatacactggatgtgcaaagcgatgggcgcaggcgcatggtcgtttgcatgaactgctagctacggggtttgtagaagacagttgggtccacaccgacgaactggccggaggcttgaaaggcaccgttgtgatgactgaactgggactgaaggaagagtgctgtgcagtacgtctagacgcctacactgaccacagggctgttgtagttgttgacgcttctgatctttacatcgcatgtaaggcagcaaaagctcccgtaagcaccctagacgaggccttcggttgcgaccacgactaccttatggaatctccggctaacgctcagcgactgaatgagtccgtcgagcagctacgaactggccaagtcgtagaagtggacgtgcctatgagtgtaaagcaagacgaaactccacctgtcgtagtgcatgtagtagagaagatttacgataggaaaggtaacgtacacctcattctacagtatgaggtagcaggggcgctaatcaggacggtggttgaacagggagaactcatttacttcttggatgaaatgcaaggtatgtacttgaccaagattcaattggaggtgaacaatggagttgtatgaccagtggcgtaagtatatgagcgtcgtaatcttagaagaagaagataatgagcgtcagtgcatgcggcttattgaggcagttggcgaactcgatccctatatccaagatttcctagattctttctctattaaaactgaaggaggtgtgtaagcatgagtcagagtaagcgcgatgagattgtagttgaagcacgtgggctagagagctacttcatttcccactggaacggctgggatgtgatggacactgcttgtctcggattttatatcaaacctgagtatgttcttgacccggatattcgagagcttgagcctagcttcttggagcttgatttcgagcgttgccgtttccgattctggggaaatgaagacgaaggcgtggacggcaaactcatggagggcaagttgcagattatgaccaactccttcgagtacgtcttcttcaaggaggtttgagtggctagacagacttacgagtctgcatcagatagggcggtcgaggaggccgtccgttctgagcttgaagggcggtggaagtgttctcttcataagctacctagagcccactatatggattgggcagcctgccggaatggaaaggttgttagctttgtggagcttaaggctcggaataatgaaatgcagaaatatcccgacttctttgtgtcccagatgaagtggctccatgggatcgaaatgcaaagggtgtttgacattcccgcattccttgtggtaaagtggacggactatacaggatatgtcaaaatgacagccaacggcgtcaactacatgagcatgggtggcaggattgaccgtggagactggcaagaccaagaagttatggtccatatcccgctgaaagacttcacacgtttataggaggacacatgaagagactctgctaccgttgcatgcatcttggagagcctgtcatgctccgtcataagacgggtatctggtacaagggttgtagtaaatgtggatcaggagtattctatggctaagaagaaccctgtattcaagtttctgaatacagtaaacaagccctcagtggagagggataaaaccaaatacaggcggaagcctaagcataaacagaaggagcgattaaatgaagaagggtgataaagtgaggatcaatgatgatgctgataccatcttccggggccgtgttgccactatcatcgcagtagacgaagagggttgcgttatcgacgttgggagttacgaggatgagagcggagagctgatcgagtaccttcacctattctttgagcgttctgagttgtccaagcaggcgtaggagtgtataatgaacggacccgagtgtagatggtgcggagagaaaactgaagctgagttcgtagacgttgggcttggatggacgcagcaagtcactggaggcatgtgtcaccagtgtggagggtacgagaacggttactaccagaacgacggaaggctcacagaggtcgagtttgccacctactggagtggtccgttcgaagattatgcggatttctcgccattcaatcatatgagagaaggcgactcgccatgaaggctacactgagaaaccacaatctgctatacatctacttccacacgttctcggaaatgaatgagtggttgacagagaacgctgtagatcagtggacagtcactactctgggctccggctatcaggtggctgttcctatggaccgtgcaatgcgggaccaatacgtctcggaggggggttgacacgaacacaaggtgatgctaaactccgtggttgtctgaagtaaggaggttttatgtccaaaatgaccgtggcccaaattgcggctatgcacggtatcgatctgtattctgaccacaagaccgcttgtccccaatgccggaagaaaggcgctgacaacagcggagacaacctaaaggtctatggtactgatcgtaataccggggaacacaaaggtgcctattgttgggcgtgtgggtacaccttgctctctgaagagcaggaaagagacgcccggggagaagacgaagaggagtggaatttcgtgggaactgaatttaacgcagagatcaacgctcaaattaaagagcaatgctcgtatgatccgcgtggttatcgtggcctgtccaaggaaacttgccagtatttcggagtgctacatggtttcgacccggagactggcgagattgcaactcagctatatcctactactactaattatgaactcactggctacaaacagcggatcatgccgaagaacttctcagagcctatcggcgagaccgggaaggattgcgagctttttggtcagttcaggttcaagaatagcaacagcaagaaggtgcttattgtaggcggtgaggttgaccagctatcagcattccagatgctcaaggagtatgatgaccggcgagcaggcggtaagagtgattatgaaccgactccagtggtcagccctactatcggtgagagtggggcgtggaaacagctacaggctcagtacgagtggctagaccgattcgaacaaatcatcctctgtttcgacagtgatgatgcaggacgagaggcagcagacaaggcagccgataagcttccgaagggcaaggtgttcatgatggaaatgaaccgtaaagaccctaacgagtatttgaaagctggccgtcagtcggagtttgtcagtgcattctatcgagcccgtacatggacccctagcggtattgtagggtctgatgcactcgacgctcgaatgtatgaagctgtgcaggttgagaagattcctctgccaccgttcgctaagaagctccagaaggctatggcaggaggcatcccgttgggccggattgtgaatatcggcgctgcatcgggcatgggtaaatctactgtagtggatgagttcactctgttttggatttataactcgcctcatatgccgggtactgtgactctggaatcggactgcggggagtacgcaatcaagctgctgagccgtaaggtaggcgagaaggcagacttgtacgagaccgttgaagagaaagtggcgttccttgatcggcaccgtgacgctcggtacgacttgtggcacaaggaagacggaagcccacgcttctatctgatcgatgaccgagacggaagcctagcagccctcaaggctcaaatcgaacaactgattattcagtttgagtgccgtgttattattctggacccgcttcaggatattctggacggattgagcaacgaagagcagtcggtattcatgcgctggcaaaagggtatgaccaagagccaccgagtgacgttcatcaacatcaaccacgtccgtaagagtggtggtggtcagaaggctaactcggcaggtgctgaactgtacgaagaagatttccaagggtcttcgtccatcttcaaatctggtgcagctaacattctgatgtggcggaacaaggacgcggagaacgagttcgaaaagaacctgattaacgtgaagctctctaagtgccgatggactggccgcactggaatgatgggcaattggtactacgacgttgagactcatacaatctgggacttggacgactatctggaccgataccctgacaagcgccgtgaacacgaggcttggatggctcagaaggaagaggaaggccgggacacggaatactaaggttgacagaggggtgatgcttatgtatcatccctttcgtcgtttacaggaggaaaggaaatgcaacaacgatttgaaacaatcgagcaatacctcgaatggatgggaaataacaatttcaccaacatgacttgggatatcgaggccacaggcctgttggatgaaacgtctatcgattacactgccagcccctacaagattaagcctagctacaaacaccactgcattgtagtggaggagcacggtggcaatattctggcattctacgatgggccgacctacgtctttgacgggcgagagtacactgagagactgccgaaagcgtcttccatgctccacactgaagaagttgtgactctcaaggactacactccggtagagtatattcacctgccgctgaaagagttcaagaactatgtgctcaagcgcaagatcaagcgcgtagtggctcacaacatgattaacttcgaccttatgtcgatgaagcttgtggaagatatggacttcactatcggcgtagagcacagggatggcggtctgactacgtggtctgctgacacttggatgggcaagcaagtggtattcgacgataccctcgttatctccaagacttgtaaccctgacctgttcggcggtcacagtctggataagctgtctcgtcgtgcaggtggtgacaccaagattgacttccgtaagcatttggcaccggatgttcgattcctcgacttcgcagccgatatgctctactactgtatctatgacgtaaaggcgaacaccgctgtatggcattggttgcaggaccacgaagattaccaactgtccgaccgtgacaactacatcaagaattggctgtccccgattcagttggagaagaaggttgcagagatcatcacctatcaggagcaccgagggtttgttctgaatgttgatctctgtgaaaaagctgtgaaagacttggacgccaagatggaagagcgtcgggcccgggtagagcctgtgcttcctcctcgaccagctaccaagaaattcatggcagactacacaccgcctaagcggcagttcaagcagaacggggagatcaccagctacttgcagaagtttattgagcggattggggctcagttgaaagagggtgacgaccggacgatgatcttcgaaggcaaggagtacaagcttccgcttcccgctgacgtaccgctgaagacggaaatgcctgctaagatcggggacacaactcacatcaagcaatggcttatgggtgagtttggttggattccatcagagtggaaagagactgatctgactgtggatcagaagaagatcaagcttccgatggaaaacatcgttgctaagatcgatcgctggctggatgtaacgtatagcacagcgtacaaggaagagcggctggacgggttcggggattacatgaagatcacccctcgtagcacccgcgcgtatgtacgtcagaggttgattgatcgtgcaagcaaggggagctgtaaggttctcactaaccctagcttcacaaagggccaagagaaagaaatgtgtccagacctcgaacgcattgcagaacagtttccgttcgcgaaggatgtgattgagtacctgacctttaagcaccggcgaagcgcaatcctcggtggcggcatggactgggacgaaatggaggatggagaggagccggaaaaaggttaccttgcaagcattcgtcaggacggcaggattcccacgcctgctgacacttgcggggctgctactagccggatgaagcaccggaaggttgctaacgttcctcggatcacctcgttgtacggggctgagcttcgagagttgtttggggttggagatgggttcttccaaattggatacgacttcgattccttggaagcacgtaaagagtcggcctactgcgatcagtacgatccgacaaaggaatattgcaaatctcttatgatggagaagccatttgacgttcacacaatgatggctaagcgtatttctgagatcattggtcgtcaatttaaccgatctcctgcgaaaaacgtaaaatacgggtgtacgtacggtgcccaagctggtaaagtggcaaaaaccattggtgccgatttgcaaacgggtcaactggtattcgatgcgttctgggatgcagcattcccattgaaagctctgaaggacgacctcaccaagcaatgggaagccaatggcaagaagtatatcattggagtggacggtcgccgagtccctactcgttcggctcacgctatcctgaacagcttgttccagagtggcggtgttatctgtgctaagcgggctatggtgattcatgatgtactactggagaaagaaggtctgaaggttgactttttcaaagaagactggaagaacaagccggaattctgccaacaaatgatcgcgtaccacgacgaagcgcagttggaagttacagctaagtcggtcagcttcaagatgttcccttggtctcttgtaggcggtaagccagaaggagaaaaggaacaggaggaggcggagaagaagctgaaagctctagctcaggcttacaaggacgaacaattggctagtactggcaaggtgtggagtgatatcgcacactacagcaaaggtgaaggcggggtgtttgtagcttactgccgcgctggagaacttgccacgaaggccgtgagagctgcgggagagttctactctactcctctggtgcctatcgagctgaccgctggctacatcgttggtcgatcttggaaggattgccactaaaactggcattaagcgaggaaaggggcttgacaggcccctccgcctcctatacaatggccacatattcacaacatacaaggagaaacacaatgactctggctttcattatctatctggtaatgaccgtattcccagccttgtcgtcggctggtagctttgccctgatcgtcaccatcatcgcatgggttgcaggagggttcgtttacttggcatccattggtggccgagagaattcggcagttaaagccacactcaaaaatcacctacggcccttgacgttcaagctgtttctgcctatcattgtaatcggccatctggtgccttcgtctgagacggcatggtggatggtcggcgggtacgctgcacagagcctctatcaagcagacgctactcagcaggttctcagcgaatctactgaactgctcgaagctctggttaagcgggctaagaaagaaactctgaaggctgttgaaggcagcagcgagtgatacggtaatcacagaataggaggtatggtatgaacacggctcgactctacgtctacggcaaatcgtccatggtaggaatcactgttgacaacaaggccaatcgggagtactatacctctaaaggcttcgaggtatcggagacaccgttagcccacaaaagcgtggctaacaaatacaaacagaaaggaggtaaataatatgtctggtgttattcccgggactatcgtcaaactcactcaagtgggatgtgacgtcaccgttggctggccaaaggaagcccgatatgtaggcgcatacgcagtcgcagtagatggacgcgatatcggtctcccggaaggggaaatccggttctgctcccttcattggtccattgaccgagacgtcaatgatggacttggagactaccaatcgatgctcgctgacaacgaccgcttcgaaattgtagcagttccgggcaagaagtattacgttaagaacgttgccaagcacagcgcacagatcggccattacttggttccttcggagccagccttgtacgtaggtttcgagccgtgctggctgaagagcatgcacgaaggggagagcccgttctgcatgacttttaaaggacgcgttgacattggcggtgaaacctctgacaagccgcagttccagaccctctaccctgagctggtactggaagagtttaaagaagaggcggagggcaaggttgaagctccggttgacgaagagaagaaagaaaaggttgcaaagcctgctgtaatgggttatgctgttctcgatgcagacgggagtcctcttaaattctgcctcactcgcgaagaagcccgagccaccaagcgctggtggggtggcaaggctgagggagtctcgattgtaaaagtaatcaaaggagaggaggtgcgttaacgcgcttctcctcttgcagaatccgggaatgtccggtatgatcgtcagtcaagtggctgacacactcgcccagtctagggtacttaaataggagaaatgaaatggcttttaaactgaacgtaaccaccaacactcaatccggcaacggcggcgtccgaaaggaagtcgattgggatgctctgaacaaccacgtagttgaagctgctggcactgccgctaaagcgcgttcgatcccgggttatatctccggtatcatcgatctcggcgagcaagagcagaacgatgcagaggttgtgttcactggcactgccgaagatgaaatccaaatcatcaaggaatatccgaacacttacttcaaggatggactggacaagcagactcgcaagcctgtacgtctgaagtgctggccgcagcgcgatatgcaacaaatcgcgatcactgtggacttccctcagatcgaggtagacaagagcctgtacctgaccggtaacagcaacaagtctccgcttcgtgtcctgtacaacggcgactttactctgccgggtcagaagactaagattgttggccgtccgtttaccatcaaggaagtgaagcacccgaatggcaaatgggcgttcgccaagaactccatgttgcacaaacttgctgtggctactggcgtcatcaacgaagacgaactcttcaccaaggaccgcgtaggcgagcttctgggcaaggtggctcagttccaagtgcgagtgtggatgaagccgggcaagaacgatatgaaattcctcactgaggatatcagtctggtcggtatggttcctgaaggtgttccggttcccgagctggacgagaagtacatctacggtgtcaacctgtatggcgagaacgacgaagaagcagtcaagcaactgcgtgctaacgtcatcaacaccatcaagcgagccaagaactacgaaggttcggatatcaaggcgatgatcgaagccgttgaagctgcacgcggtggtaaccgctccagtggcgacagcgaagagcaagctgaagataagccgcagacccaagctgcacctaaagtggagccggttcaaaccaacgtagatgatgacattccgttctaaagggcggtggtaagacaaggggcttcggccccttcctttcaaaatttcaaaggaggcaacacatgcaaatcaattttggtcccatcttccttctcgcagcaatcgtcctgtgcgttctgaaatctgccggagttctcgctatctcttggactgtggcactcatgcccatctggattcctcttgtaattgtattgtcgattctcgtactgtttcttgtaattgtaggtctgatttacgcattcggcgatcgtactaaactgaactttagctttaaaaagcacttccggaataagtgaggactaatgatgagtagtttggttattgttcgagtacctgagtacattctaaaaggccccacagtaaacaaccagttcagcggtgacctgtgggagcgaaatctcttcaaagatttgaagaacgctgcggagtgtatcattaaaggagagccggcttatgttgctcttcctaacaaggtaaaccctgacactctacaaacagagtgggacattcaggttgtacagttctaacccaaggggagcttcggctccctttttcattggagataaaaatgagtgaaaaggaagaggatatcgtcctcatcgacggcgaccttatcgcctttaagtgtgcaagtgtcaacgagacccgctccatcattgtcagaaacaaattgacaggagaagaggaaacttggaagaatcggacgacttggcgggagaataacaaagacgaagagggattcaacgaagacaacttcgaaattgaggaccatcaagaccccaagcacgtgtcctacggtatctctgttgttaagaccatgatcgaccgaatctgccgccaagctgggtgcaagcagttcaagattctcctatcaggccctgataacttccgtgacgccatcccactcccgaaagaatacgagattaccaagggtaaaaagaccttcactcgtggtggcaggtacaagggtaagcgtacagggcagattaagcctcttcagctaggtcagctaaggcagtatatgatcgaagcgtatgacaccatcatccatcccggagaagcggacgacttgatggccgaaatgatgtacaagaacggtgtaagctactccagaggggagactactcagcgcgtgatcggggctaccatcgataaagacgcagacggcactctaggatggctttgtaactacgaacgtgagcctgttcaagtcaagttcatttcaggcctaggatcgctctacagggactctaagggcaaggtgagaggcgagggacgtaagttcttctacttccagcttctattcggagaccctgttgactgctaccgacctgctgacctgtgcatcgggaaggacttcggagaagtggcagcgtttaacatcattaatccctgcacaacggacaaggagtgctggcaagcaatctacgacacctacaaatcgtggtaccctgagcctgtcacttacacagcatgggacgacacagagcacactaaagatgcaatcgatatcatgcaaatgtattgtgactgcgcccacatgcaacgttgggcgggggatcgggtagactgtagggctgttttggctaaactcggggtagacttaggaggtgcagaatgagtgtaaggcctcgcccttgggaagacttcccgggcatctggaagaccgaagccgcgttcttgagttgggtcagaggtggcattcgccgctatctctggtctaagaacccggtcaagcttgagtttgctaaatcccgaaggatcaagatagccaacaccaatgaaaagagcaagctcaggaaccccactgtatggggctatgtgtgcgagcagtgcgggaaggagactcctcaagctaacgttgagattgaccacaagacgggggagttctccctgaagcgagtagaggatatccaagcgttcgtggaaggtgtggtgtttgtccgcataggagatttggctgtcttgtgcaaaccgtgccatgagatcaagacctatgcagagcgttacggactcacccttgaagaggcgggtatcgtaaagcaagctattgcaatccagaagcagaaagggtatgataaggccttcttgcaggaggtgggaatcaaacccgcatccaacgcagagcttagaaaagaacagatcattgaataccttaagtctaagaaggagggtggatgaacgaggatcgggtttacattgtagtaagagacgaggcaccagagtacatggtgccgactctggttgcacatagcatcctaggggcagacatggcaatggttctcctcggacaggaccgggccgttccatcgacggaccttccgtcccgtccgtatatgcatgcagcggcaaaaaccgccattaagtgggtggagtggaaacagtggagcttccgtaagatcgttgtacgagtttctgacaaagagtacgataagatcaagcaaatccctttcgtatatgaggggtatgagagaaccatctgcaatggcgaaggctcctgcctagtagtacctcctctgagcaaagaggagaccccgaatgttcttaaatttgcaaaattatggaggcctctgtgagagagaagtttttgagaattatgcggaagctgcccatccgggtaagggcttcccttgttatggcttggattgctctgttcttctggctcccggttgcaactgcgctaatcgttggaattctagagttcttcgataatgcaaaagaagagttaagaaacggatactctgttttgatcgaagctgccaagggagcttaccagtgcattaaaacgggagaggagttggagtcatgaccaatttagctacgtatgttatacgccacaaaaagaccaaagagctttggaccactcctaaaggaaagcggcaatggaccacgaaaggaggggcagcccgagcttggagaaacgcatatgagagtactacactaggagcgtactatgctaaaagagatatggaacggtggcctgacctgaacattcctttgatagtaggggccgctcccgcacgtctggccggctgggaagcagcatcttttaaaaaccaatcagctttcgagattgttgatattgctgaatccctgaagcacgaaagccagttggtgctcgatctactgaaagatgttattgggttcgaagtgccagaccacatcggagacggatatgtccgactcaccattaaaacgtccacatacgacgatatcatcaaactactgaaggaggcaaaatgagcatgactgacccccgagcgtatttcatcaaacaggagctggaggaagcaacgaagcttctagaaagagccctcaaccttctagataacgtccattgctacgatacagatgtatacgaggacattgcagcattcctctacggtcaagagtgcgaggaggaataaggtgcagcgcgatattagtaaaactatagcagaacttcgggacttgatcgaagctgtctctatgctcgacgaggccttggttatgatgcagaaaaacggactatatgatacggacttgtacaaacgtattgatgcgtttttgtattatcaaccgggcgagggcgagtgggaggaagtagaatgagcagcaagaaacactttgtaatctctgatacacaatgcaagccgggtatcagtctggactacatggaagctatcggtaagtatatcgtagccaaacgtccagatgttgtgattcacatcggggatcactttgacctcgccagcttgtcgtcttatgataagggtaaacgctcctctgagggccggagatacgccgaagacgttcaagtcggacgtgagggtctggacaggctgttcaagcctctgtgggagctacaggagcgtcaacgggctaatcggaaaaaggtgtaccaacctcggttgattttcacactgggtaaccacgaagagcgagcagaccgagcggccaacgacaaccccgaattgtacggcacggtcggaagtgaggaactgggtattcaggattatggttttgaggttgttccgttcctgaagcctatcgaggtggatggcatctattacgtccactacctacaaaaccacttcactgggaagcctctgggtggcacagcgaacaacatgcttaaggctgccggtcattcgtttgtcatgggccaccgtcagcttctggactgggcgatccatcctacaattgacggaaaacaaaggctaggcattgtgactggagcgtgctatcctcacgacgaggcttacaaaggctatcagggtaacaatcacttccggggttgtgttatgattcacgaagtgaaggatggttttggtctgccaatgccggtaagcctagacttcatgatggagaaaggaggtttcaaatgacggtttataagttctggtgtgaatgggatatcggtatcaatgagtgcctgtggcgagactactaccagatggaagaagatgtagctaaagccttgtcagattgcgggattgatgatactattgaggaactggaggacgcaggcctgctcggcttcgactctgttaaagttatcggctaattaggtaataggagggcatatggctgagtttttccttggggcggcccttgcaggcttgttctttatgtttagtatcactgcgagctttaccgccgaagatattgagaaagtgacttcaacatgcgagaataacgaaggcgtcaagtatttcggagttgacttcttcggagacggtgctgtacactgcaacagcggcgctattttcaaaatcgaccgcaaatctaaataatcgaaaaggagatataaaatgactgatttcaacatcacccctgagcaaatggaagaagcaatggcaggtatgaaccctgagcagcgggctctggtagagaaagccttgaccgaccgtaaatctctggaagattccatcgtgaccgaggacggtgaactggactatggcatgcttgcacgacacatccgcaccagcttgggtgatctgcctctggtaatgggtggccctgacttcctgaagctgatgatcttggttgctgcgatgccggagaccaaagacgatctcctgactctgcacatgaacctgtccttcattctggactgcattcgtgaatcgattagcgacgaggagtaacaagtggccgaagagattgtaaaagaagacctatctgtcgacgatctcatggttgactcagcagggctagatgccctgctggccttcctagagagtcagtttaaaggtccgaagggtgtactgaagggatatgtcactatgagagtgatgtgcgctaagatcgagagtcttgacgggtttcaagagttgaaagatatggaggtgaactttgagtaacgatatcatcaacgttcatgctgggcaaccgatttctctggtgcaacggtcaaagaatcctatcaatattcaatattgggacgccgataccatcccttacggaacagtcttggttgttaccgagaaaaggggtgatatacgaaagggagaattggtcgtaaggctggctagtagtgcagatgatgagcactctgttaaggtatgtagattctctgatttcttcctcctaatggagaggggttatgacgcagccagtctcggcgacgttaaacaagcgtatgatgttctgttcgaagatcacccagtgactacctttgttaactgggatcgggctcagcctttgacaaacagtgagcgctactacggagactttctgattggcggcgaccctaaagggatgccactattcaacatggctgttcttaaaaatgttctgtcgccttacactgccgacgatgaggaactttcagctatgtctgggaatcccgagacagtagagcacaaagaagttgacgaactaagtgagagggacgaggctttagccgaggtcgacagactcaatgaagagcttgttgcactgggtaagaaggttgtgttcgccaacctagaagattacctaggcaaagaaaactatgccacattggaagctatggctaaccacaaggaggctgtaggtagcggaggctcctctagttactacactgtcaaggtgaacaaccccactacgaaggctaacatgccgtattttgcagagtgcaacgatatcatcgaagcgctggatatgcgattcggtcaaggcaacatgttcaaagcgttgtggcgggctgcggcagcacagaacctaggcaagctgaaggccggtaacgatgttatccgggactacgagaaagtcatcttcttcgctcagttggagatcgataagattctcagagaaaggggttgacattctccccgaggcttgcgataataggctccaagttgaaacgaaggaggtgtgtagatatgatccagaaactaaaacagaagctcatgatggtgcatcctatcctcgctagcgagatcgtctggtgcctcaccttcgcaatgcttcagtaaaacaagggagcttcggctccctttattgtatcaaagatttaataaggagagtttatgcaaatttctgcaaaagtgattcaacacagttcccggatcggcctaggtacgaagaatcacagattcatcactacattcgaactggagtatcctcggtttattcacagtgaacttatgactcaccgactttttagtcgaaatgctgcaagtagtcgtgccattcccgttgcccatatgatccgacaggtggaagagaatcctgcgatgcctgttcactggggaatgaatcaaccgggtatgcaagctgagttcgaactgagtgagtgtttgcaacgtagctctcagtacctgtggaagaaggctgcaaagagtgcggctcggatcgctagcgcactaaataaaatgggactccacaagcaggtggttaaccgtctccttgagccgttccagatgatgaagaccgttgttacagccacggaactagataacttcttctacctgcgttgccataaagacgcacaaccggagatcaaggttctcgctgagaaaatgtatgaggctcttattaaagcgggcccggcagaggctctatatgacggagagtggcatgttccttatgtgactcggttccgcataggggatggtaagctgcgttacgcagattgtaacgggcaagaactgagcgtagaggatgctattaaggtatctgctagctgctgtgctcaggttagctataggaagaacgacgagactctggagaaagctcttgtaatctacaaccgattggtagatactaagcccgttcacgctagcccgttcgaacaccaagcaacaccgatgctccgcatctcggacaatcaaactggatgggaggacggtgtgacgcacttggaccaatatggtgacctctggtctggtaacttccgaggtttcatccaacatcgtcaactaattaaagggcacgtatgtaatgagtactacggccaagaagaggaaggagtttaaaaatggcagaatataacctgagtctggaagacctcatgctggtcgatggcttcaaagaggcgttccagagtaacaatgagaaggtagtaagggagcatctgtggactaacggcatggatgttaaaaactactcgtatgaaatggttttctgtcagcatcgcaccctgattggccgagtcgtagagggtctacgattctctggctttgagcgtacagacaaggagtggctgagcctcggttgcgcctctctggaagctcatattgcagcgtgtgatgatagtaatctacggttcactcttcgtaagatgcgaccagagggatcgacagaggcaacgttccacaattaatgcagtaggagtagatatggaagttacaaaggctctcgtagatgaggccgatattttcaataagatcacacaaatcaggactccaacggagtcctatgcccggaaatatccggtcattgtcgaactagcaaaccagcaactagaagagaagttgtggttctctagcgaaatgaaggtagagctggataagttgaacctgaagtttaagttggaacctcatcagcttcacgctgtaaagactgtccttcaactgttcctcaaatacgaactgatcgtaggcgaggagttttggatgggtaaagtagtccgaacgttccctcgcccagaggttaaactagcggcttcgatcctgtgcatgatggaattggcagtccacgctgaattctacaaccagatcaacgtagtgctggggatggatacagatgccgactacgtggcgtacaaggatgacccggagcttatgggacgtatggagtggcttgagtctgtgctaggcgacgaagacgatgttctttcggtaattatcttcagcctaacagagaccgcccttctgttcagttccttcgctatcttgaagagtttccagtgcaacgggtacaacgatatccctgtgatcgcacgcggggctaaccagagtgctgtggatgaagacttgcacggtgtagtttcggctgagatcatcaaccaatactacgcagagattggtcgaccattgtctgaagatactcggcgtgtcgagaagattcgacaagctatcgaccatgtatatgctcatgaatgtcgtattgtcgatatggcgatcccgggcggagaacttaacggcgagtcggctgaaaactataaagcgtttgttcgttatcgtttgaacgtatggtgccgtcgtctgggtctggaagatcatttcgagaacgatgacactccgatcaaagattggttcgaaatgaacacgtacgcttacaaaatgattgacttctttactccgggaatgggcatggagtacgaactggggtgggatgaagaggaactagcaaaggcttgggaagaggagctgaaatatgagtaagagagacacattcaactattccgaagctaggaaaaacagtcaagcagcaggagagactcctctgtggtatacgacggctggctaccagttgttcatgaagaaatattcaaatgagggagagtctgttcgctctcgttttgagactgtagccagagctatggctcagcacgcccctacggtgtatcctgagtggtgggaggaggacgaatacactagaggcaaggactgggaacaggtattcttcgacgttatgtgggacggttttgtaagcccatccactccgcttctgtcgaacggtgggctccgcaagaagggcactacggtatcctgtgcaggcgggttgatggacaacaacctctatgaccgttacaatgtaatgacggagattgcagtgctaacgaagcatagtcacggcacaagcttcagcctgaccaactggccatccgaaggcgatgccattcgtggcggagagtcacagggtgttatgcctgtcattcgtgacgttatcaacgtcatggaagaggtcgcacagggttctcgtcgtggtagctgtgcctacagcattaacccccgccacggggacttctggaacgttatcgatcacctgtacaagcgtacagaatcgaacaacgtcggatggttgctggacgacaattggtgcaaggctatggccgagaaagaccctgaaacgctgaaacgatggaagcggatgatgttcgttaagctggcaagaggcaagggctacttcacgttcattgacaagatgaaccggcacctcgcagagccgttcaagcgagcaggtctgaaggtagaggcatctaatctttgccaagaaactgtgcttccagctaatgacttctacacattcagttgcgtgatcctaaactataacctcgaactctaccgttcttggcctgagcatctagtgttcatcgggcaggttatgtcggattgcaacatcagcgagtacctcgcaaccatggacgaagttagcattcaggaccgaagggctctggagaagatttaccggttcaccaaggacttccgagcacttggtagtggggttctaggattccatactctgctccagcgggaacgattcccggtcggcagtatggacgctatgttcctgaacaacgccatcttcaaagggatgaaggagcaagcggaagcttgtaacagttggctagctgaggttctaggggagccagagggctgccgtggactagggaagcgtaatgccactacaatgatgatgccgccaactaaatcgacggcagaactcatggctggggcttctgagggcatcggactggacgttgctatgtgcttcaccaagcagagcgctggaggtgaattcttccgtgtcaacaaggtgttgctggagattatccaagagcgaggccttgattgggaagagtgtgcaaggcagatcaacgaacgcaagggaagtgttcagcacgtagactggctaaccgatcatgaaaaggctgtattccgtactgcctttgaggtgagaatggaagactacctacgactgtgttcccagcggcagaagtacatcgaccaagggcagagcatcaacctttatttcacgtcgaatgactcgccggcttacatttcgtacatccatcgtctcgccatggaagacccgaacatcctatctctgtactacatctacagtatgagaggagcgggagatatctccagaacagaagaatgtgaaatgtgcatgtaaaatcattggcccggggcttgacagcttccgggcctttgtgtattctgagcacatcaaaacaaggagggactaaaatgaacaaattctctgaagtgtactacacttggagcgcagcgtgctctcgtacaaatatcttgatagatatgggatggactgctacaatccgtcgagacttcactggcgggatcaaccctgtatgggttgtggagttcacgcgatgaacagcaaactccgcaaagagttcgataaatggtggggacaggacgagcaagaagaacttcgtaaatcctgtgccaaaggatgggcggaatatatctggatggctagtcgaagaaaagtgagtgttgagcttcccgcgccagaaggcggatttatcgacatccaaaagtacacaatcaatcgctgcaaagaagctatccgcgaaacaggactggaggtgttttaatgaaagaatattttaaaaagcgactaatgcagaccagtgaaccgttcgattcagcgacgcaagctatggacgtagcgattgcgtggggaggggctaagtactgcgaattcacttgcgtaactgcggataatcgcgtcatcagcatctgggagtacaatgacgtagagcctgataaaccggtattcaatggacagcaacgaatcttagttccaacttttgaggaggtagtataatggaacaaactattgataaatctcggtatattgtgcttgataacgaaggtcggcacgttctgaccttgtgcgagaaggccgcctataacctgcttaaaggcgttcagtggacaaaggacaagcatggtcaaatccatgtaaatggtgtcacaggcgttgaactcggagttcgtcaagggattatcgctgaagtattcctgtatccgggctacatcatcctagaagaggtagactaatggatatgttcgataaatacatgcaagttatgtatgaccgggacgctttctcaaggcgagtcggtgagttagaaaaagaggtagccgaactcaaggctaaggtggctatcgctaagtgtgatatgcgtgtcgtgaaaaccctactggaagatatccaatgggtgtatcaagacgaagctatctatactctaccgggctacgtttgcccttgttgcggggaatctgcaaactatgggcatttccaaggcagcttcgataagagcccctgcctactagcttgtgtactgagccggagtgaagcatatgaagcctaatgttgtagactcgctaggcattaacatgtgctacgcctgcggaggtaaactgtacgtccgaggagtatgcactatctactgccctgactgcgagaaggcagagaaagataaaccgttcgtcaggatgcagcttctacaggatatcgcagacagtaagaggcttgacacagaataatattctttgtaagataagcccatcacagacaaggaggagccgagaatggccactacagagaaaattattgagtacgtcgaggtgtgcatatatcgcttgcaggaggacgtgatggcctattctaagggcttcagggacagagccttgtctaatcggacaggctacattcacggcctgattaccatggctgaaatgaatgagcaagtgagtatcgaagactgcgacaagctccgagctaatctgcgggacgcttctgaagcagtgatgaacacattggacttttaaagtcaactaggaggaagttatgataaaagattttgtaaaactcgttggcttgtctgccgtagcctgccttctgcttgtatgtattataggcatgtttgttacagttctgcacagtggggcagagattgttcaatctcagatggaacagaaagacattatcgtgtctaccgatgacggcaccatcaatctcggtcgctccgtgaagagcgagaagctgctgtacagcatgtgcatcaaggtggaagaccgtaagccagcttgcgaattcaccaccaaggataaggtagtacatgaagtgcggcaggtgatgcgcccgggcgaggctactgcacgtgacattaagattgcagttaacgcagcagtgacgtatactggagagaatggtcagaaggctacctccctgatccctccgaaaggtgaattcctgccggcaggtactccgtcagaggtgcatatcgaaacgattgaccgcttgttcgacagcgtgtataatgactacaagcaaaacttcagcaagatgtgaggaggactcatgaaagcacagcctaaagaagtagagaccctatctttcgacaagcgacccaaggccggggatatcgttcgactgcggtccgatggcaaggcttacgaagtgtgtgctgtgtatccgacagcggtaggctgggaggcggcgcttcgaagcgtgtacgacaaaaccaagactgtcactgtcggcatggagtggtgaaatgtccgcgactaacaagtgcgtcaacttcctccctgtcactccggacgggcgagtgatcgtccggttcggtaaaaagaggttaggatggctcggtaaagagggtaaaaagtggtattattacccttatggatgcgaaggcaggatcaaatccgaaggcttcaaaactctgatcgatattaaggcgtggattaaaaaccccgactcggtttggcccgggcccctagcttgagattgactaataagccgacgaatggtacaatgggatgtaggaaattccctactcagtataaggaaactagcaatgactagccgctggaaagaggccgtgtatcgcaagtactcggtacgtcgtctgcggcaggaactcgaagagttcaaagaagctagacgctttgcaccaaatcaacgcatccgtgcatggtttgatgctcatatcgaatttctagaacgccacttggctattcgagagtccggccaagcctacccagacgaccttctgtaattaagtgttgtaggtagagattcaaatcatggttagtggcaaggacgccacactttcagcccgcccacaaggcgggcttctttttgcctgcaattcagggttgacttggagtaccagagcatgtagacttaccccgtccaacacaaggaggaataaatatgaaattcaatatctcaagacagttatgggtggctaaaagccaacggaagggcgattacaagggaacgcccttggcgtacatggctcaagtagacttcaacaaggacggaagcttggcttctagcttcaagaagaagcagcagacaggtgagggctgggcaggaaagagcgctgagacgtgcttcgtagataatgtcccggtaacggggcacttcatcggcgacagcgtggagcgctgggtgaccgagaacaagtacttccgtgtaacggacccgcgaggtttcgttctggaagtcccgaccgggaacatctctaccctgctattcaactgcactgtagtcaagggagtcattcaagagccttgtgtgtgggttcggatgggttctcagcacgttctactgccggaaggttcctctctctacaaagaggctgtaagcttcgtggagcggaaagagtcagccaagaccgttaaagatatggttgcaggggatcgatgcaccctccttagtaacggtacagaggcgaaggcggaggccatctacctcggacgggtgaaactcacttggcaccttctggctcaaaagggccggtactctaaccgtggacgtggcgggtgggcttatcgctggggttaccaccatctggagcgggagttagatagaaaagaattcaccgagaaagattccaagtgggttagtgtgtttgctaagaaactgagtctcggtggacgatggaccctcgacttcgttctatcgccgaaggccactgatattcagtctgggacagttccagaggaacttgagaatctggacttggtagatggtgtaatgtgggagtatgacggagaggatacccgcccaatggcctactactattctgtacctgatagggtagtcaagtgtatcaacgtagacgaccccgcatgggacgctcgatcctacgatgaggtaaggtggactaaagagtggactgtagtgggtgccgagtggcgaaaataagccaccattattttagaattgcccggcgagagccgggctttttcatggcaggggttattttcaaattatttttagatttctgggagtttcggccaatatgggcaatatgaaatttctcaggaaaaggctcagaatgctcgtataagagccgttcgagtgtaggtatggtgagctactacttagccgtagaaggacagtgtaacgcttaataggagggttagaatgaagattgacaacggtggcgaatatgcgtattggctggcggatatcaaagagtttgtttctcagatggatgccacagagatcgagaagagggcttgtatagcatacttaattagctggtatcagcgaagagtactgcacagaattaaacgggaggaatacgaggagatctaagctagggaccggatggatttttagggactggatagattttcacagactgcaaaattgagaactgggcagatttttaggaactggacagtttttcacagaaggggatttttctacagaggaatttcccctgaaatttagccggatttctcagaagggcggatcgttagcaggctatctaattggttagcaagctacctttaatcgttagcacactaactaaaaattcctaggacggacctcagttggcacgaacgttgcaagcccgcaccagtttcccgggcaggcgtaggcctcgactatccgtcgtgaaggcgatatgtagttggggactcgcaccccgcgtttaagatgtgcccattctactatgacagacagctttgtcaacattctttttatggcataggctttgcaattgcaattaacatgccaacacaaatatcaggctcctccggtgtttatctccggtgctcggcttccagcctgcgttgcccgcatgcctactattatacacaagctatcaagagaagcaagaaaaattatagagaaaaatctacacaaaggaggttgacaggcctcctttatatatgcacaatgatctcacattcaacggaacgtcaggtaagcatcatgctacatagtgaagcccgggagatggccctacaagagatgggcaagtggagtctcctcgaacaaggttggaaattcagtttcaatctcaggatgaaacggacgctgggacgctgtaatcatactaagaagctcatagaacttagctacgggtatgtagctgctaatgggctcccggcaatattggatactatccggcatgaaatagcccacgctaaggcgggaccggatcagggccacggatttgtatggaaagagtggtgcggcttgattggcgctaaacctcagcagtacgccagcacaaaagaaaaagtagtcaatttcccgtggcaactggcgattcagcacgactccgggcacttagagcggctcaatcactacggtttcagacggaccaacatggcgaaaaagcaggtacgcgggcgtcctgagacaaagggcagactagtttgggtgaagagtgaaaataagggttgacagcttaggccattcgcgtagaatggccctcaagcaaagggaaacaccctgagcaatcacgaaggataagtagatatgaaagcgctttgtaatcatcgggcactctacgcagcttacagccgtagcgagattgatcgcgttgcggtagacctgaaccgttactttcctatcgagaaagatgatgaatgggaagatggaccgtacatgtaccgccgccggacctatctggtgaagcattcgaagggcatagcaaggtggcacagtctctattgcaatgggaccgtccaaggcgttggcgtaatcttcgacgtaaagtcgggcgaacctttccgcacagcataaggagattcagaaaatgcaagcttgggatgtgtatcagaacggccaattgatcgatactgttttcttcgatatcatgtgtgatgccgaagaggtgcggaaatcgctggtcaatcacgacggatactcgtctgatactactgtagaggaggttgagtaatggatagtctatctgttaaaatcgttctgtcggaactgagctacaaggctctgattcaagccttcgccttgcttggccgaacgctcgacctagacgaggggttggacgatatacttaatcttattgcggatgagatcgctttccgcgacggcctgccgcctttcgcagacgactgcgataaaacagaatggatgctccgtcgatgggaatcgctcccggtggtatcgtacaatatcgggcaggacggaccgattgtcgctcggtctatcgaagtaaaaacggcatgaggggagaactgatgaccgtcagagtaggagatatcgtggctatccggggcgacattcggaaaaagctcgacggaacatgccaatacacgcccgaacaattggtaggtggtaaattcctcaagcatgccggcacgggagaaatatggactggccgagtgagtaagatacaaggtgatatggccaaggtgggaggggcttggcgcgggatcgaattctatgtgctcattagtgaaataaacgcttgacaacctgacccactagctgcaaaatagcactcacagacaacgaagacgccgataggcgaggagaaagcagatgcaaatgtttttcaaaacccgcacccaagcccgtgcaatggccaccaacggtcgcaaagtggtagacaacggggctcaagctgaaaagcgctgggctgtcaagctgaacaaaaaggaggcgaaataatggctaagtctgtcagtgtagatcgcaagcgttccatcctcgacgaggcgaaagacggtagctttttcagtgtggaattcgtcaaggcagacggcaccgttcgaaagatgacgtgcaagcgccagattaaatcggcgtatgctaacggacagtatgccactcgcaaaccgaccagcgctggcaagccgcacctgtataccgctgctgaggtgctgaacatggaagagggtaaatccgctttccgtacgatcaatctcgaaacccttatccgtgcgaaggtgaacggaatcgagtataaattcgattaaaagcttgacagcctaggccattcctgtagaatggccctcaagcaagacaaacttaaacagaaaggagattaaaatggcacgttctatcaaggcttccgacttcgattccgcttaccagttcgaggccgccaaacgttccgaacgtaaagagtcccgcaaatcgcgtgacaatcgcaaagctagccgaggccgagctttcgacttcagtagcgatatgtaaggtttgtgccctgccggcaggcttaaatgccggcaatcctaagcccattcgtcgagtggttttaggattctcaaccccagcggagataccaaaaatggttcgtcaatgcgtaccctgtcccgatgctcgccatgctttttgccttgcatggttgttcgccatgccggagttcgccggtctgcccgctcaaaaggacataaaactctttaagacttcgggacaatgggcggtatgttatggctagacgacagcggctcccgtcgtgggttcaagaccagaccgaggatgaaacgccgctgagggacaggatagacccctaccttagcaagcttggcgaagtcgataagctagagggacaattgcgacgggtcagggatgcaacggacccggacgaatacaacgaaatggctaaggtactaaaagcccgacgccggaagataatgaagcaacgtgcccgggcctacggtctgccagaggatgagcctaccaatgtccaagggtacagcgtaccggaagaggttcaccgtagagccatcctgttaagcagtgtaaaaccttggatgttctggaccatcctgtctttctcgatttttgtgtggtttgttttgaaaaacagttgacaaggttcccgcctcctgtagaatggtcagcaagaaaggcggacaggccgcctagctagataaaggataaccgtcatgcacttcgttcttaacctcgtttccaaaaacagcaaaaccggtcccatgcctgttagcacgtctcataacggcacctgcccggatgcctgccctctcaaggctaaaggctgctatgccgcttatgggcctactgctattcactggaaaaagctaagcaagggtgaacgtggcgtagagtggaaagagttccttaagcaagtgcggtctatctcccgtggggatttgtggcgtcataatcaagctggcgatctcgtgggtcaggatgacgttatcgatgggatcgccctgatggaactggtgaaggctaacaaaggtcgtcgcggcttcacctacacacattacccgatgaacaatttcatgaaccgccagcacgtattgtcggccaatcgtagcgggtttactatcaacctgtcgggcaacaatgtagcgcacgccgatgaactggccgacctgaacatcgcccctgtagtgactattctcccgatggacgcggagaatgtaagctttacgccgaaaggacgtaaagtggtagcttgtccggctgagaaaagcgacaaggtgaattgtaagtcgtgcggcttgtgccaagtggccgaccgggagtatattatcggcttccgtgcccacggcacagcaaagaaaactgtcgatctcattgctaagggttaacacaatggacgaatctgtttacgcaccattcaatcagtgtaagatgatgggcctagaacgaaccgtgcggagcctagcggctcctaacgggtgcaaggtagtcttgtatcaggaccataagaacaagcatagaatcgtcatatacgatgccttagggcatggaatgtctggggtcatggtgcaagcggatggggaaattcactacaaggaaactcgcaaggctagccaagggcagaatctgacaaggcagctacaagctcagctaaccgcatggggagtgaagtggttcccctctcagtatcagacagcggcgggcgcggcctgctacaaaggaggcgagtgatgcggcagcttaacaaatcccagcttaaggccttggggcctaagatcgacctagccttagagctagcttctactggccgtggtggtctaatgaatggccacggctctacctgctacattgcaaacaaagccgggcataacattctgcgggttagctaccataactcccgattcgttgcatatggtgctgagagtgtccgggtgactgggaatgtcattgcagcatgggtggaatggaagggcattaaccgggctgcaatcaacgctctgagtgagtacgggtatcatcctaacctgagcatagggcacaacgatgctcttaagactctgcgtgatatcgagcgttaccagtgacggcctcttactcgacagagaaacggggccagaggtgggccatcatccgtactgagcccggttacagaggtgaccgggtgaccgtgctaggattctgtatcaatcaaacgcacgctcttaaaacggtagccaaattccgggcttggcaagcgctaggctggccctacacactgaaagatgacagaaaataaatgcttgacagcctaggccattccagtagaatggccctcaagcaaagggaatcaccctaagcaatcactaaaggcaggaacaatgaaaaccacagagcaacggcaagcaatactccccggggccgccggcagtcaagcgacgggcgcctactacccgatttactgggatgaccggggctacttcataggcccgatgcgtcactggaaaatttacaatcgctgcgtctgaagcatcaagccatgcttctaataaccaaccatctggagactcaaaatgaaagctgtagcccagttcaaaagtgaagactacgaaagcggtgatagccgtactgctaccgtctatgaggatgtttatggatgctacgtcgtgagcgttttcggaactagcttgagcgaacctgtcagctaccattggggtccgttcgagtataaagaatctgcaatcgatgccgctaagtctgctatctaactgaaaaggggccacagaatgaaaatctccgctattctgaaaaataacctgaagttttacaagaataattcgttcatgtgcgctctggcgttcgataatgtgtccagaaataaagctaccgaggtgcaagaatttatccatcagctactagggcccttcgttaccttgcacgctaagctcaagaaagagataccgggttacgaaagagccgtatatgatgatgagccagaggatgaaatgactttctttgtatcggatagggcctatcaaatgcgttgcttgtggtgggaaactgtaatcgaacaactagaggaacaagggcaatgactcaagctaactggagcaaaggcgtccgggttgtcggcggaaagcgggatggtgagattaccctgttcacaagcgcacacttcagtgaatcgctaggcttatgcgagggtgatccttatctggtagaggctttgccgatgcccgccgcgctccggctgctagtcaaatggaacaagctgtgcagccgaatgaagcttgactatcggtatgaactgctgtagtctgcaatctcaatcaaaacaggaatgctccaatgtcgattctagccttaaccctgaccctttgctctgccgttcaatgtgatgattacattatcgatcactcactcccgggacaagccgcagagtgtaatgctcggctggtggaggaggccgaggagtggggcgatgcttgggtatcaactaacgctgatgcccgactgacccgctaccttagccggttcaatattcaagttgaccctcgctttgttttcgactacgattttacctgccaactcatcgcagaggatgaactaccatgaacgcgccccatctttccctcaagcagtaccgtcaacgtgccgctgtcatcgtccgccgagtgaaatactatgaaaggcgctggctccggaccgtagagtttttctcaggtgctgccgctcagaacatcgcagaacgctttgcctacgctgggcatgctgaagagcaaatgaccaagctcaaggctgagtttgcagccttcccggtggaggtgaggctagatgctctaggttggatcaattggaatactcacaatgacggcctgctagaggagtggattcatcaggaaaccgaccgagccatcatgctcgaatatgacgaaaccacgtggcgtcctgtagcttgctgggaaaccactgtcgatgctcttcccaagctggcaatgctgtaaaatatcgcccgttaggctgaaataatgcttgacgggcgtttttgtacctgtagaataggcctcaagaaaggaaaacagccgaaaggctcaatctgaaacccggagatcgataaaatgctgctagttcatggaaccactgcaaaaggcctgaaagctatcatgaaccgtcgaggcaaggagggattggccgcaccttgggacgtttcggaccatgacggaatgtcctacttttacaacgtaggcaagatggagtggcacgacgaagaggagtatgctaaggcagaatgcatcgttcgttgcctagaacaggcccaattgcagcaggctatgatggccgaaggaggtaaaatctatgctctggtggttgacattcccgaagagtttcaggattgcgtagaggatgattattcgtgccctaacgctagccaccaagctagctgttttccagaggataattttgatccggcatggattgtagaagtgtatgaggcagatgtgagtgtatgggccatccctttcatcgtagccggagtctcaggtaattctatgttccaatcccaccaactacctgacaaactggtggcgatagcggagtcggtggcgcggtccagtgacatagacacatacgaagctttcgagatcgaccattcacaggtggagctatctattctcgaaaatttcaaagataacgcttgacagtctagccaactagcgtagaatgcctagccaaggggtgcataagcgccccacctcgaaaggatacagaaaatggccatcgttgatcgaaccgcaggtaatgaaagcccgaatcactgctacatcgttactggcagcattggaccagagtttgagccgaccctgttcactacccatgcgctggcaaagaagtatgcccagcagatagtgaaatacggtaaagcaaacgacgttttcccgccttttacgcctgttatcgagacccggcacaaggcagatatgaatcggttcactgttcacaacaaaatccccgaataggagacgtatctatgaaactttctgaaattttccaaaaaggcctgaactatgcaattgagtacggaatgccgtggtatatgtgcatccgtctccgggagattcatttgttcccctcgcccgttgaaatggcagttaactcggtcatgatgtctgccggtatctcatcaaccccagagggatgcgaattcgccggcgttgatgactatttcgaggaaagcggcctagcagccgcatacaaaatgaacaatcaggaaatgtccgaatacgggcgctcatcctacgcaatgtgggtgcaattttggttcttcgtaatctttgacttagcccgaaaagggcagtagaatgcattacaagcgtagaacagccagcaaataatgtgatctagagggacggtcatgggtgacaaaactgtagtttatcgggtggagtgcaggaacggcgagggaccgtatgttaactatggtatggagattgatacgtcctccactcccgagcggcccgtaccggagcatgacgggatacctgatgttcgccattttgagtatttcgccttcacgtctcctaaacaactagatgactggttcggggactactacagcaatctgaccgagcactccagcgcctcaatcaaaatgtatgaggtggacaggcagcatgtaaggactggtctccggcagtgtgtattccgcagagatgcggcggtttgcgtcaaggaaatgactattgaccaatgggtaggcctgcttaaggctggcatgatctctgcggtagtcgtacaagctctggccccgatcccagccgaacaactatccctagacctaggggacgatccggcctgtgaggctcagaaagaaattttgaaaatgttcagtttatagggttgacagcttgggccattcgcgtagaatggccctcaagcaagacaaaccacaaacccggagactcaccatgaacaagccaatgaatactttcgcatacgcccactacgtcgcccgcatggacaaggcctctggcactagcctgccctacgccaccctgttccgcatcgccctgcgtaacgcctaccgcaagccgggtgtccgccagtacgattgtgcagcactcgtcgaggatatcaaagcgcgtgaactggtccaaaagcgcattcgggctgaaaaagcagtagtgatggcggcagtaatgcgtgcaattcgtaccggcttcaccgttagcgtgaaagatggcagcgatggcgagtgggtagtgaaaaagtctaccgatatcaaggaaatctctgatagcctgcaatctaccgacgaggatatcatccgcttccgcaagggcgacggcccggacaacatcgtcggctctatgtgggcaatctacggtaacagcgccggcgaagtgatcgccgactggactgataatgccaccatggccatgattatggctccggctgagcggaagatggaaaaatacgctgaattaggtatctaatgcttgacggggcccgaaaagggccccataatgcacccataccagcaaacaacatcaggaccgccccgatgagccagatcaaaatccaagagtatatcgtagccgagatcaaggttaaccattgcgctcacctgcgcaagggccagaccatccaagcccgcgatgctcgtagcagtgaaaagtggattgcattcatggtggaacgcgggtatagtgcctctgaagccgctatcctgttcaaagatgcacatgatgtggcaatgctcgaactggcagcctgaaaaaatcctactaggagtactgacaaatgaaacgccaatatactgattcctaccagtgcaaagcaatcgacggcctgatgtctatctgcggtggtaagaaagctatcgtacaagtgtggccgtccttgaaagcctctcgaaaccgccggctgaaaaagatggtaaaatacattgcccggtcaggatggaaaccgtaaccaactgattatcacagccccggcttgccggggctcacaataggagataaaagcatgaataccctgattatccgtttggattccgcctacagcgttcaaactgtccgtagtttccttatggaagctgtagagagtattcgaaagcatatccgggactacgcggttcatgacgaatacgattcgggattgagcccggtagcacccaatcatcgacttgcaatcgtcaccttagacgaagattgccgagtgtttcacattcaatgcgagtcacctgatctttatctggcgaaccctcggatcgtgtttactgatgttgaaagcccggcatataccactcccgtgaacgagatcgaagagtatagttacatgaccgcatggcagcatatacgtcaaaaagatatgacagcaaaagactacctgtcggattggtctatccttttcgcctcaaaggagaatgccattgatatcgacctgcgccccaatctgaaaacgcaaatcttgcattaactgagggagctaggatgaagcttcgaaccatattcgaaacctacgattgccgagttaggtttgtcaccataaccggcgtgtttgtggaatctcaaattgtgcggagtttcggtcaagctcaggagattgtatcactcctctgcaatcccgcagatactggtatccgtctatccttcttcgacgaagaggagggctgcgagtcgatcctctgccgattcaactacaaaggagaaatcatcaaatgaataacaagtataaggataacatcattgcggaatactgccatttcgacggcagacggccagtcctttccttggcggcacgatgggtccaccacgacagtcgagttgtgaagctggcagcgctctttgcctgtgctggctatggccgtccttacaaagattgtattaaggcctacaaggacgccaagcagcgggaaaaggatatgcgaaaccctgccaaatggaagctgagccgagcgactaagcgggctctacgggctcgactagtggctatagaaaaactagaataatccggaaaatacctgttgacgtgaggctagagggttccctatactgtgcctatcgagacgcacaaggcgtctcctaagctagaaggactagcaaaatggcaaaggcaaatctgaagttctcccgcattggcaatgacggctacgactacgcccgcagggaagacggggtttggtttgtcagagaagggtactacgggcggtacggctgggctaaaaccaaatggactcaagttcaacccggggatggcatgactatagtcgatgcctgcctgaaggctcacgaagctggaagctccagcacatacatcggattcgggaatctggtggtattttccgacgggaaggggctccgtttaccctgaacaggaactcaaataaagttgttgacagcttaggccattcctgtagaatggccctcaagcaaagggaatcaccctgagcacctgaataggtaaaagacgatgcaagcaacctaccaagccctgaaaactctgcgcgatgcttgtgaagctgtcaaggatgaaaaaggcaccatcaacggaaacaaattgaatgcactgcgtaacaaggctgtcaaggaaatgcaagctggtggtgaaacctactctgacgccattagcatggctcacgacttgattaagaagtatcgcaagtaatcaatccgtaacaagccccgggtgaccggggcctctcataggagagaccatgaaaaacgttcaaatctgttgttcgaagtgtggagccatcaacggcggtaacagcaaacacaattgggttatcgcattaggcaagaagtggtgcggtcattgtgggtccaatctcacaacccttcgtcgctaaccattcactgagacctaatcgaggagagatcatgaacgccactctggcacgcctacagaacgaacgctgtgcaaccctccgcctgatgctgctgccggaacatcgtgggtatcagttctctggccatccttgggccgagcgcatccgcaatctccacgatgaagccaagtgcatccgcagccatcactaaaccgcactaatccattaaaactctaacagcccgccttgtgcgggctttgttctatctgcgaaagcgacagctttcaagtgtaattaacatgtaatgttgtaacactctgtagaggtaacaccagcatgacaagatagaccacttgtaacgttgacgttacatgtataacagcatgacagcgaaagctgtacagatagcattctgtccagttcacccctatcaaataaccccacaataacccacctaaaacctatcggttttaagcggcctgtaaggccgtatatgaagcgatagcttcgctatgttagtctgcaccatcaaggcgagagccttacagcatgaggcttgtaggaggttttaaggccatatgcgattagcataggatgttggttgttttaggtagatttttggtataacccctttcagcgctaccattgtcccggtgatgttaagcgacagcttacatccgctcccattttgcaatggaaattgcatacagttcatcatgcgcttcaaaagtgacttcactttgcatgcggatgcatgctatagtataccctgtgatagctccgctatcccgttttgcatggcacacgaattgcataagcatgacaagggtaaccctcgaaagcggagctttcaaagtgtaggctgagtgtgggctctacctctattatatttgcgaccggaagtagtgacactgaaaacgttgactctagcccagtaaatacgttaaactaaaaggttgatagctgccgctatcgagtaaccaacattcacacaaggaggcacaatgacaagcaacaatcatgccaagattcacatccattacgctaagcaaatctactacgccatgcgtaaacgtgccatcgcaagcgatgagatatgcaaggaatgggccaagcccaagacaggctttgaagcgttctatgattgggtggtgaatgtgtcagggtacgccgtaggctaccgcctagacaggaatatcctcttcccgggaaacaagctctatgctccgcatacatgtgagttcacacctacatacatgcatactctattcaccaactgcgacaagacaagcaataaccgtgccaacaatgatctacctctaggcgtccgcctagcccgtcatgacaagtacggaatgccagtatacgtctcacagtgcaggacactaggcaagcagtctacccttggatcgttcgacgatccgatgcaagcccatgcggcatggcaacatgccaaggtagcagccatcctcgaatgtattgatctctatcagatggaggatgttcacagtgtaaacgttgttcaagcgttgcttgaaagagtggacaaacttggcaaggatattgcacagggaaaagagacaacccttttgcaatgatttgatggggtcgatggtcaaccctctgagagtgcgagaactccgccagagtaatccgatagcgaagctatcaaacgtatatgcatattccatgccaacatgtggaaagatttcacccggcagggcgggagcccgttggcattagttttgcatagcttagctgtcgctaagaaggaaagaccacggccacccattattttggatttactaaggg

SEQ ID NO: 5 - DNA, 45703 bp, Bruynoghevirus
  source 1..45703: mol_type = genomic DNA
ccccaggagtcccccagataaagtgggggtggcctatccacaggggtatagcccctagcccctccctaggataccatgggattagtccgggggtcaacccttagacccttgggctaagccccctagagctaccgttcatcgggtggacactagggtattcataagaaaaatcttagggtattcaggaggtggatcggggggaatatcccttgataaccccttgaccccctattgacttccctcgataccatatgttaatcaaagactgtctatatccgggggtttgctgaagactgatagtccatagactgtataaaaaaccagtagacaaccccgtaaggaatatggcctaatggctccgccttgaaggaaaccgacaggcaacgggggaaacccctaggggcttgacaaaccccgcggaacctggcctaatggccaccacgttccacctaggccaccatcctccaagtctacggacattaacgggggctgccaaccaaaggggaatgcccaagtcacccaagtataagaccggcaggcatcgggggttgacaagggataggggaagcggtaagatggctcccaagtcaacggcataacgtgcatgactccctcgggattagcgtagccttgacaagcaagactgatggccactcagaaaaagagcctatgccggagaaccggacgaactaacccccgtcagagggttgacaagccaagcccgaggctctaacatgggcacccattaggtgacggccaccttgggaaagtgtaccttcgacggtccttggactgaacaagggagaaacccgaaagctgggggaataacgcacactccggaagagcgtaggttctggccttgtaccatagaaggtccgactggttgcctgctccagcgtaaacaattagcagagttcccggtagaatcgtggggaacagtatgatgggttagtatcgtcggcttagcaacgagggcgaagcgtggtagatactggcgaaggtaggggcgagggattcgaagacccccgaggatagccagaggacagaccacaacgaggatactaacgcggaaaggggccggctacgccaatgccaaggtttgccgactaacccctttatcgtatcgtagtgtgtgctacggctgatgattccaaaaggatgaaacgatgaacgctgctctggataagaagctgcgccgcaaggctagccgcaaggctcgtgctcaaggtctgaacattgggcatcttggcaaagctcagcagcgtgcagaacagaagttcgggatcatttccaattgtaacaagatcctggatagtaagtttgcttccctacaggaaaaggccggggcacgcaagcgcaaggctctgatgaataccgattggcgtaaccgtgaggatactaaactgcgcaattggtacaagcctagcaagtgcaagaactcccccgtcacccacatcaaacccgaggtataagttatgagcgactacaagcgcatcaacggcatcatcaagaccatcgcccagcgtggtgcgtccctggataagctgatccaaaccaccggcctggatatcctcaagcatatcgaagagcacggcgaggtttcgctggcatgcaagctgttcaaggccatgccccaggggtcccgtcgcaacgccctggccgcgtggttcatcgaccacggcaagatcgaggccaatatcgacaaggaaaagtccaaggaattcccgttcgtcatcgccaaggataaggccactcgactggagcgtgcagccgaaaagccctggttcaagtacaagaaagagcgtgacgtggccgacgagttctccctcgatcaagccatcgccgccttcaaggccaaaatccaacgtgccatcgacaagggccagctccaggcagctgacgagcgtatcgccgtgatccaacgtctggaagtgaaggacgaagcgaaggcagcctaacggccagggccaggggtgtgtactatgacgcgccccttggttcctccctagagtacatggtaggtccgtgtattgtatggatgaactaaccgaggataaaaccgtgtggaccccttttggtagctttctggtagctgttacaaacgattacgtgcaaggacgttgtaactcccgttcgtataacagcgatgggtctgagcaggtagtgtaccgttgggctttcgtcgatggtaagttcgcctgcggtgtatatgtagatggccgtcccatgggcttctgtgggtggaccaaatgaagtccacctacgaagctgcccacgaacgtgccctcatggttaatcggctacagaagctaaccagaatgcttcgtgtccaccacgaccctaagtggaaacaggaacaacaggaacttatcaagaggttaaggcgatgattatctctatcgtggtgtcttgcgtaggcatcgggtacttcttcttccgtgactggaaggaggagatgggtatcaactgacccaactgatgaggccatggtgattcctggccgaaacccccaccggacctatggttgcaggatggggagtcttgggaaatcagcaaaggaaaccatcccgtgaaacgcaacgactatcgtaaggtcagccgcaacatgcaagccatcgaggctatcgaccgcaagattgccaaggtaactcgtgagttgaccaactccagcggcaatcaccttggtaaaaccctggagttgaacaaactccgtgccaagcgtgcatcgctggctaagaacagggcgcggtaatgtcatggaagtatattgcatgtgccgccatacgctcacgttccaatgggttgttgctggtagcgtgggtggttctcttcgtcctgtcctcgaccttggacagcatcccttttgcatcgtgaggtaatccgatgaagattaatgtggtagaaaagcccaagaaggttccggcgcataccctcaaggctacagatgttttccgtgttgagaacatccatgggatggtacttcgggatgaccacaaccactacctccccaatgacggcgatgtgtacttcgtttgcctggaggctggtatcatttgcagcatccatagcgactgcgaggtcatcccggtggacgctcaaatgaccgtgagggtctagtgtactatgacgcccgccctgtatctgctcctctggttggaatccttggtcagtatccgcaggttccagcctaaccacaaggcgtaccctggttggtacgtcacccatatccgtgtgtctatcttcggcaaacgtgtaggtatcgtctatgaaatccactaaaccgcaagtcttctggttggtaagcaaggatggtgagcgtcacgtaaaggtcatcaatttcggccagttcatcaccgaaaccctttacgaactcggcattccggtggaccacatcgttcatcgggttcagtaaggtgacgccatgaccaatacctctttcaccgtagcagtggcaaagccaaggtttgagttccacatcagcaagatggcggacggtgcctacgtccattcgggtgattccgggtctgtcgacttggtttacctcaagaaaggcgaactcgtgaccattattcacaaggatggtttcaacatcctcaagtgcaaggaaatcggtactcaccctgatctattcccggccaagtggttgtcggtgaatgcctgcatgtgggggccgtatgaagaataaacccatgataggccagataatggcccaggagcgccgcatgaagcgtcgggtagaaaagcgggggttcaacatgagcctccaggaaggcacccaggagccccgtggtgagcttggtttcaccttggctgccgtaggtatggagtcgagccgatcggcttaccttcggcacgccagggaggccatgatccaatctggtgagccttgccctcattgtatgccaatcttcggtcccaaagagggccgttgctgcaactgcgcgagggactggtgatgggccggtcgaaacacctcacgttcctcccgtcgaggatcactgtccttgacgatgatacggtctatgtgccttggcgataccagttggaatccctctacaacatggcttccgctggtggtgctactgaccccgaggcagtcaagggtgaattccttgattgggtacgagcggagtatgggcgatatgtgtccatcgagcttgaaggaatacccgaggacagggaagatgccttcgatgagtatgtattgaaggggtctcagcaagggtaagcaaaatgatgacatacctcctgataatcccagcgatcctgatctacatggccttctccttgctcgtggctggcatcgccgggctggcggcaaactgcgatgagtacgggaggatgagccagaaggaccaggacgtttcaatcatcctcggtatcctgtggccagtgtcactgccctggatgtgcttcatgtgtgttatctggaaccctttggctaccaccatccgtgcggccaaacgactaatcaaaggagattactaatgcgccgtatagacttcccttcctgctgcaccgccaagatttacattggcatgggcccctcgggtaccgctgaccaccgagccggggaagcgtccaatgggttcagcccccgtggtttcgccaaggaattgatcggggtcatccgtcgcgagtacaacgaaggtcatggcaccgccgtgttctccgtgaacaacgagcaggtggtagccgataccatcctccgcagaatgggcagccactacaacccctgggcctccagctacaaccactcgacgaaggttcgggttcacgtcatcaacgtgcaagctgcggcagaaatcctcatcaaccacggtgtcctcatccgacgactcggtggtttgcaggactaccccggtactgtcgagcactcggaatacctcgacaagctctgcaaaggtctgtaacatctaggccttgacattctgctgaaagtgtggtataataaccttaaggtgtccggggttgctttatatccctaggataccttaaggttctaaccttctatcttcttcatcttaagaaagaggtaagaacaatggtcctcaagctctacactcgggtaatgctcctggctatccccgcatggataagcatcctctgggtagtaccacagatgctgtccccggctgacaccatggtaaacgccattggtgctgccctcctggtaatctccatcctgtactccctctgggctgtcagtcacctgtactcctacgcaagtaagctctctggaaagaaggaggtgcatcgtggccacggtaacgagaagcagtaaggtcccaaccagccccctttacttcgaacgtaagtgtgattcccagatttaccttcgttcggaatcccggaaggacctcaccatcccgatggtaaacatctgcaatgggagtgtcctgtacctacaccctcgggaactccccgtgtatttcgtggcgatacccgagggtgaaactctcaaggtgaaggtgtgatgtactatgacggaacagcagcgagaccgcctccgtaaggcaatccacatggatctagaaggtatcggcgaagatacccccgacctctacgacaacatacataagatagaaggcctgcttggccacccaggtaagcccccgcatgattggggcttctatgtactgatgttcgtcatgttcatttccttgtgcatggtctacatcactccccttctctacaagtaaggaatccctatgaagaaaatcctcggcctcctggccattgctgccatcgctatcaccgcaggttgctccaaggttcccgctggctataccggtgtcgtcgtcaacatgatgggcgactctaagggcgtcgatctgaaggaaaccccggtcggctggaagttcctgacccccaacgaggagttgttcaagttccccaccttcaaccagaacttcgatctggcggtggttactgcccaggacaaggacggcctgaagttggacttccccatcggcgtcaccctccgggctgctcctggtagcgcacccctgctgttccagacctaccgcaagggtatgaacgagatcgtaagcgtgaacgtgccgcaggtggtccgtaacgccgtgaacaacgccagcagcaagaagtccgccgaggccatctatggtcctggcaaggaagcctttgtcaaggaagtcgaagctgccgtccgtgagcacttctccacccgtggcataatcgtcgaaagcctgtacctcaacggtatgatcggtctgccggcgcaggtggtcgaggcgatcaatgccaagatcaaggccactcagacggcgatgcagcgtgagaacgaactgcgtcagacccaggccgaggcagccaaggctatcgcggcagccgagggtgaaaagcaagcggctatcctggtggcacaaggtaaggccgaaagcctccgcatccagggtgaagccctccgccagaaccccggcgtggtagaactgaatgccatcgagaagtgggacggcaagctgcctacctacgtcaccggcggccaagccatgcccttcatcaacgttcgctaaggaggtggacaatgggtaagcgtaaggttttctatgagcgtatctgctccaacggtgaattgaccctgaacggcaacctcaaggccaccaaggtgtcggcacccaccaaaggcaagcagcagcgtcgcggccccttctaagagggcgttagtaatgcccctaggaactccctgggggtattgctggctaactcaatcaaggagaaaacaaatggcccgtatcaagtacgccttcggtatgaaatccaagaagggcggggttaaggccctcaaggtaatgacctctgcctcctgcttcggagccatggagggggtggtaacccatggttataagctcgacggttggaccttcgtctgctcccgtcgaagcaagaagttcatcgatgcacttaataagtgtacccaaggtgaactcaagaccatcaccatcggcggcaaggcctacaagatcccgaaggttcacttctggtcttacgaaagcaaggccaagacttccccgttcgtgaagtacgttagcgggtcggagttgatctctcccactcaacacgggaaggaaggggtttgcggtatctacttcaacccgaaggaacataccctagattcctggtatcccatcatgaagttcctcttcaagctggtatccagtggtctagaccctcaaggtcgagaggagaagattcacatggagcttgctgaaaagtatggcttctggaagtcctacctcgcaatgtctttccacggattggtagccaatggatacaccgggtaccccctcaccaattacatgttcagtaatgattgggaggatatcaagaaaggcgatatccacatccagtccgcagaagagtgcaaccgattcggccgttgggtgcccaaccgtaatgccccaggtggacgtgagtgggtaaggtccaagccctacaagtcagaatacctggggattaagctgaacaaggtggaggtggtaactatttacccccagccaaccatcttcggcaagaaaaccccctacgacatcgtggatacggaactgggaggattcctccggcttactccttctgactgtgaaaaacacggagtggtcatgctggggaccatgggtgaaattcactggggtcgcggctcaagggatatccccctggccctggaaggattcatagagaaaaacttctgacaaccaaggagaaatcaaatgggaatgtatgcagcccataacgtgtactacgatgccgagggtgctgaggttggtcactgctgcgttaaatacgtggctgaatacaccaactgcttcggtgcattctgcgactcaacggggccccacccggatatagtgtgggagaccggggttggacacctcctggtgtctacccacgagaacactgctggtaaactggtagaattcttgaatagtgatctggtcaacaggatcaccgacggtggaatcctctcggcttcccaggactggcccaccgagtggtggacgggatctggccgtaaacaaaacctctccaatcctgaccacttcagcccacctggccgccgacaggctgtgtacgttcgggtggacctcaagaagaacgcatcggcaatcatctgcgcactccgtatgggtgatcgtctctggggtatcggggatcagatgcgtcgtattccgaaggaagctcaggataaaatcctgggattcaacgcagaacttcttaccctcgcggcttgtgcccaggtcggtagcactgcccactgcgacagctatccggcgatgttccctgtgactgctggggagtataaggagcagtgtgaagccaatggggatgatgtagaggatagctacatcagcgaaatcatggaccacttgacgggtgggttgaaggatatcacctacttcgatatcaagagcatccatggacgaactcgcgaagagttcaaggacaagctcaagcaccacaatgacccactctggctgggttataccaaggatgattacctgatcgagtgtgatgggttggatggggtacacgatgatcgaatcctttccatcatggcgcccatcaccatcgacgtaggggaccccggacgggataattcccccacggtacccaccggttattacgaccttcccgaaatcctcgaaaaactggagagcatgcaatgaacaacgcaatccccctgatcggtgcagatcccgaagttttcgtcggctacgaccgtaacccccagagcgtcatcggcttcatcggtggaaccaaggaagcgcccttggctgtagccggtggtgccgtccaagaagataacgttcttctggagtacaacatcgacccggccagcaccaaggaagatttcgtcaagcggatcatttccgtccgactccttggtgcccagatgctccaccccttcggcatgaacatcatcgagaacctgtcgtctcacctgtacgacgaggaactcctccgcagcttcggcccccaggcttatgtcttcggttgcgagccggactacaactgctggacccgtcgccagaacgtgatgccgaacgatgcacctccgaccctgcgcactgctggcggccacgtccatatcggcttcggccacatcgagcgagtcaccaaggctaccacccgcgaggtcatgcagatgtgtgactacctcctgggcctggcctctgtccttctcgacggcgacacccagcgtaagaagctgtacggtaaggccggtgcgatgcgctacaagccctacggcggcgagtaccgtagcctgtccaacttctggatcttctccgtcaacctgaccgagtgggtctatgaaatggcggtacaagcctacacctcgaagcacctgctggaagagtacaagtccatcgtgtctggcgatgaagtccagcggatcatcaacgagaacgacggtgttgcggcggtcgctgctcttcaggccttgggggtgaagtatgaatgacctcaacaacaggcatcgtctggccggcgacttcaacatgtactacagttccaccttcgccttcttccgggtggacggggagcctcgggtagtctacgtggatgacactgaatccatcggggatgaccgccagttcgatggcttccgtctcctgggtaatatcttccgtcccgacggcggacaatactacggcggcgtagtgtacagcgaggtcgaaggtgtgcggcccccgagtgggtactatgacgtcttcggtggcggcgagcgagatacctacgtgtcgttcctcgtgaacaatcgtacccagcgcaagggtgttgacccccggaatgtcctcatcaaccacggccagcaggcagtaaccggtcagatgatgatccgtatcttcctccaagcggaagagatgatctccgacccggcacaccgtgacttcttcatcaaggacggggtagtcaactggaaaggtgtaaaggtagggcagatggtagacaaccggctgtccgtagatgaacaattcaagaaccaggaggacttgctatgtcggttattggcacgcagataggtttccgtaagaaccagatcaagaccccggagcaccacgaggaacttcctgcggttgcatccttcgggttcgaggttgaactggagggtctggaccagtggcccgaggttgatggctgggatatcaagaacgatggatctctccggaatggtatggagtacgtcttctctggtccggcttctggtgaacaggcgatcaatcgtgtggaagccttcgcgaatgccatggaacagaatcccccggcacccaccttccgctgctctacccacctgcacatggatatgcgggatgtgaactggaaggtttacgagcggactgtcctggcctacatggtattcgaggatgtattcttcgatcactgccaaccgtaccgccgggatagcaacttctgtatccccttcttcagcaacgactggttgtcccagaccttcggtcgccgcatcctggcacccgagggtgatcgagagaaggtcttgggccttacctcctggccgaaatactcggccttgaacctccaggtcacccacaacttcggctccatcgagttccgtggtgcccacgcgatgaccactcgctcggaaatggtcgggctgatgcagcggatgatgtgcctcaaggcgttcgcgattgcccacgaggaaacccccttgggtgagttcgttaaggtcctgtcggatgtgaaccttcgtgatatctttttcctcggcgtagcccctgactatgaaatgtctccgggtggccgggaaatgggtatcgcaagcgcatccctggccattgcaactatgggctttgttcgctccggggtagaccccctggaggatgaacagaaccgtcagcgtcgtctccgtgagcaggctcgtgaacaacagcgggcactggatcgtcggttgatggctgcccgaagcgtcctgggtagaatccgagagggtgcccctgagcgttacaacctggcgatcatcgaagggagtaacatgcggatggatcaggtgcttaccactgtccagtccctgaggatgatcgggcaccaagtaagcgtccgagacctcgtagaggataacgagattcttcgtgattccttcgtacttctgctggacaacccggaccatatgcagcgtcaagctggattccgactcgaagaaaacatgtactaaggagataaacaatgtgtggattggtaggcttctgtgccacaactaacgcgagtgataacgaaatcgctcttctcaaatccctcctggccgtggatattatccgtggtgcccacgccactggtctggccaagatcgacccggttaagaacgaggtaggaattcacaagcgggcagtagatgcctacgacttcctggctgatcctgaaaccaaggagttcctggacaagggtcgggctcgcatctacatgggacataaccgttacgccaccatgggtgacaagacggaccatgcgaatgcccaccccttccaggtcgaccacatcaccatggtacataacgggactgtggattcctggggtctccatctgctggacggcaatgacaagtacaacgtggactccaacatgctgtgcgctaccattgccaaccacggagccaagaagaccttcgaagagaagttctccggtgctgctgcggtaatctggtgggactccaaggaacgtaccctgaacttcatccgcaacgatgagcgtccgttgttcatggcggtgaccaccactggtaccatcgtgtgggcatccgagcctggtatgctcaaggttttcctggagcgtcccaacgctaagatccgccttcgttctcccatcgctgaactgaaggctgaagtcctggtaactatcccgttcacggaggccggagtgcgaaagggtgtagaaccccagaccactccggttacatttctcgaccttcccatccccgaaagcgaaaggcaagcagcggcatggtggagtcgctacgtcggtgtctccgactacgaggactatagccgaagccaaggcagccaagcgggaacgaaaggcagcaaagcgggctcgtcgtatggaacgtctggcgatgcgtacgcaaggaacaccctccggatcaacaacaacctcgatgcagcaggcagcaccttcaagcaccgccaactcgtcaccttcgatgttgtcaaagtcgaggcctacgcaaacggcagcgaatacggaactgtcactggaatcgagcgtgaagaaaaccttctcatcgaagctcatggcatcaatgtcgccaaagtccacggctacaccgtcctccgaggaagtatctccaacgcctacttcatcggccaagaccgtgatctcaaggttactgtcgaggatctggcggtaagctgcctggacccaaagcatcggccgactcctggggagactaccccggttttgaggattggaacgatctcatcggagacgaaatcccattctaaacccagggttcaagtcggcggcaccttggggaatacccctccggccaacatcagctaccccttgaaggttcagggacacacgttcaacaacgttcatgtctttcgggacttcgtatcccaggggtgtgcatcctgcggtaagatccctaccgcgtatgaccagcgtaatcgtcatctgacggtgtacgagggtgccaagttcacaggtagcctggatgagtgtgagttcatctgcggcgaatgcgtaatcgaaaataaataggaggtcaaaatgacccaagtaactctcaagcgtcaagtagtgatccagatggaaaccgacgcaactcgtaagtatcctttctcccgcgacaccctggacaagatccagtcgatccgtcgagtcaaggagcaggaactcaatgatgccaacccggacgaggaattcctggtaccggccccggtagtcattgccgaggccatcgatcgactcttcgaagattacttcgagtaaagtagtgcgttagtaatagcccctggccgacccatgccggttcctaagctgcgtacatggggttcaacttaggatcacaggggctattgctggcttcactactaccctcaacagaaacaggagatatgccatgttctacatctacaaaggttcccgagcgtcttccggtgccgtaaatcttcgcaatgccctgggtgcccgaatccttcggtccgaggggtctacctaccgtggccgtgcgggtactgcggtaatcaactggggtaccgtaggtgcagaggcacgacgcctccagggtatcgccccggtattcctaaatgatccggccatggttgctcgctgcaccaacaagctggacttcttccgccacttcgaggccaatgcccctcacttgattccccgttggaccgagcgctgggaagatgccttgggtgtactaaatatctctggtcgcatgtatgcacgtaccgatctgaacggccatagcggtcgtggtatccatctggtgtgtactgtcaatgatgcagaagttgctgcaatcgatgccctccgtagacagggacactacccggtacacatctacggtcacacccacatcccggatgttatcaccagggcacaactgttcacccagggaatcgtcggtaagcgtaccgagtttcgagcccatgtgatccgtggggaggtagccctgctccaggtcaagctccgccgtactgccaacgatacggtgaccaacgaaggccaaagcatcgtccgtaacgtagccggtggctgggtctatggcgtcaacgatgcaatgggacgggatggcgctgagcaggctatgtcggcagcagcagaagctatccaagttgcaggcctggacttcggagctgtggatattatctaccagcacgctactagccgggcgtttgtcctggaaatcaacaccgcgccgggcctggatgcagaaggcagcgccctggaggcctacgtcaagggcttcaacaaaatcttcgaggagactatctaatggctgttcgtgttttcgtttatggtactctcctgtctggtttgtacaaccactaccttctggaaggggccgagtttgtcggcaatgctgtatcctgcgagcggggtctgatgtactccgctggcggattccccatcctctcctttgcctcccgcgctgacctcatcgtaggtgaaatctggcaactccccgagggcgaagcgggggatgaaatgctggagaacctggatgccctggagggttatccgggttggtatgatcgtaccctcaaggatttccgaatcaatggggaacgaatcaaagccctggtgtaccatcaggatagccatatggcgatggatatcgtcaaggatggcgactggaaggcacacctggcaaaacgacaaggagcagtataatgaacgaaatgaccgtagacaaagcagtagaagtctaccgcgataccccgaacaccttcggacaccaagagctacatgcccagaagatgctcctcaaggaaatcctgggacttgtagcttcccagcgacacctccaagactctatcgaggtctccaagattccggaggcctcggatagtcccgagaccagctacggtgggtactgtgacgaatccattggaattcgcttcatgtgggagcgactgaagaaaatcgaggatcgtcttcgggaactggaggaggtctacggtaccttcgtaacaactccctataaaaccctaccgggcaacgtgaatgctgtaccaagcctggttctcaagagtcaactggaggggtaagtgaagaaaatcatcggtgatacggcttgtccgggttgccgagctaaaggtggggataaaacaggaaatcacctcatcttgttcgttgatacagaaaagggtactcggttcggaagttgtaaccgttgtggtcactacgaagtcctcgaagagggtttcaaggttcctgaacgaagggagaaatccgaggaggatatcatccatgaagtcaacgaagtccttgagtatccaattaaagccctcgatactcgaaagatcagcaaatcaatcgctgaacggtacggggtacgtgttggtctatcacaagaaaatggtgaggacgttatcgagcattactatccacgcacccgcgatggggagtaccgagcgtttaacgtccgaatcctagaacctaaggctttctactatcgtggtagccccaagggtggtgttgaccccttcggttataacacccttcggcataaggatatgggccacctgcggttagtcatctgcgaagatgaactgtcggctatgtctgtggcccagatcatggagtcgaaactcccggagaagtggaagcatcttcgtcaggcatccattagttggtcctcgggtgttggttctgctgggcgggatatcgcattccttaaggagtctggtgtccttgagcggttcaacgaggtcatctattgccacgatgctgatgacgaggggcgtaagtcagtagaaaaggtacgtgccctgtaccctgagtgtaagtttgtcgagctcccgctgaaggatgctaacgacatgctcatgcgtaatcggggggatgaggtataccagatgatccgattcggcagcaaggtgaagtctcctgactgctccgtgactgtcgatgaggtatatgctgaggctctggaaccccctaagtggggcaagagttatccgtgggagggcctaaccaaccttacctatggtcagcgtgatggtgaaatcatcggggtaggtggaggtactggtatcggtaagaccctgttggcccacgagattgctgcctggaattgcattgagcacggggagaacgtagggactttcctgttggaagagcaggtagccatgacacttaagaatatcgcggggaaggttgccaacgtgcccttccaccgaccggatatcgagtgggatgagcaagcctttaaagatgctgcgggtaaactccggggcaagctcttcatgtggaagaataagggtcagaacgattgggatcatatcaaggagtgtattcgcttctgggcagtagccatggatgtgaagactatcctactggataacatgaccgccatgaccaaccaccttagtccttccgaaatgaacacggagatcgctcgtatctgtacagagctcgcagggatggccgacgagctaggactgcggatcttcatcttctcccaccttaacccacccaagggtaaccgtacccacgaggagggtgctgaagtaaaggaaagccagttcactggttcccgagctatgcagcggtggtgtcagcttatgatcggattcgagcggaacaagcaggctgacggtgaagagaagcacgagagtcgaatccgtgtaatcaaggacaggaactacggtaacactggcctagtgttcaccaagtataaccctgagacgggtcgcttggttgagcgcgagggcagttacgacgaggtacctgctgacgatgacaccccaatttgattacgtgatctatgaccttgagggggacggactcttcaatgaggtcacaaggctatggtgcgctgttgcagtagacattccgactggggtagtccggggattccggcccgaggaaatggacgtgttctaccgcatcatcgcccatgcaaagttcgtggtcgggcataacatcctagactacgacaaccgggtccttgagaaacttcatgggatcatcatccctccggatcgaagctacgacaccttggttgcatcgaggttgacttggccagaccgaccccagggtcattccctgggtgcctggggtagattcctgaagtgtcacaagggtgatttcaacgacttctccaagttctccgaagaaatgtttgagtattgccttcaggatggagtggtcagtcacgcactgttcaactacctcctccgggtactcggcatgacttggcaagagcttgttgaatggaggactgtagattggctaaaaagcgagtgaggaactacaagcgtgaaagggagctggctattcgacgcggcgaaacgggcgttggctctaagtctggagatgctcagcggcaccgagcccgccgaaaggtggaaaagcgtcttggaaggaaactcggagccgacgaggttgtcgatcatatcaaacgtgttaaagatggtggcggtaacggggattctaatctccgcgtccgtagtcattcttctaacgctgctgatggtggtcgtgtgggcaatcgtaaggccaaaggcattcgtaagaaaaagtaactaaggaggggccttcgggcccccgaggactctctatgttcaatcgaaagcttagcatcagtaacatcctcaattccttcgataaggttctggtgaacctgaagaccttcatccaagagtcttcggaggaatctgagcgcatctacaacgagatcagcctgctcaaagctgagcgtacccaggtcatgcaggacaacctgaaggcccagaaggtactggctaacctggaagaattgctgggaggtaagagtgaagaagtatcgagttaacgttgggttccaggacaccaaggtgttcaacgcagacttctaccgcatcgagttggatatcatccggttcttcgcgggtgattccgatgccaaccccatgaccgtccgagccaatgagatcggtgctgtccgtggatgggtttctgtggaggagattaacgatggcgagtaagaaggaaagcctggaggatcaggcacggaaggagattgccctggagaaggagttctctggtagctggggtggccccgagatcgatgctgatgacttccccttgggtagtgcctgtggcctagatcccgaggtatgcgagtcatgccaatagctctacaagtccttgtcatcttctggagtgcattcttccaggtattcctcctgggattgaactctaagctccttcgggatgacaagatcaaggctgggtttgtagtgtcttggtgtatcacgctggctcagtttgcttacatcaaggccgtggggtcttcccacttggatatcggatggtttatcttcgtatccgggtggggaggtgcccttgggattacctctgcccaatacttctacaagtggtacgacagagtattccacaagaaggcttgacaaatccagaaaagtgtggtataataaccttaaggtgtccggggttgctttacccctataggagatacaaatgagtgaccatgtaagctattccaaacatgtccgtggtaagtacctgtgtaatatggcctctgccctccataagagcatggaggtacaaaggactaacatccgtaagttcctcagcagtccccacattaccctacgggagaagcgtcgggtgttcctgagcctgccagagggattcctgggggtgagctatttcacggggtctcacctgaacctgagttcctactcggatcgtcgaaacacccggattcgtgacaaggatatgagtctctatgatgacttctatgtggacaggggcacccaactagatcctcgggatgctttgtttgccaataaagaggcgaaggagtacgagtttcagtttctgaggaagaagtgggggactgacttcgagttgtctggtgaggatcttgagaacgtcaagggttgccagcgcatgatcgatctgtcctggtatctggtagacctggcctgtgaacgtgggtgttcctacttcgttttcgactggtgattacatgagcaagatcaagagtatcctcatggagcgggtagatgacttcctgctcaagcaagttgctgtggccttcctggagcagcaatggaagctggaccgcagtggtaccgtggactacctctcctacctggggggtgtatctcacgaagctgtggagacagttgtagagaatctagcggagcgtcttaagggggattaagtggattggagaaagtcactgttcgttgagcacaaggtagctgatatcatcagccgccagagtaaacgtggagtctacttccagactcagcgggccaagtggctgatccatgtgcttagcgaacgaatcctcaagattgaccttgaggctgtcccccagatgcccatgatgatcgtaagggctggggccttcagcaagccattcctaaagagtggtaagccgaaccaaaggctccagtccctgtggcaacgtcttgggcatttcgaggtatctggacccttctctgcaatcgagtatgtacccttcgaccttggtaagactgccaagttcaaggactggatgctggatcaggggtggatacctgaccaatggaacatcaaggatattactgtcggcactgatggcaagaagctacgtggatctgaccttaatgaatccttgaataagtacattgaggatctccgacagagcaagtctggacgactccgaatgaagctccaggggatcatccctgggaaaactaccattggggaagtcaagagaaagctcgaaaagcaacgtaaggtcctaacgactccgaagatgactgaagagtcgatggataccgtccagggagacctgggcaagctggtgatgcagcgaatggtttgggcccaccgtcggtccctcttgcaggggctggtagatcaggtgaggcctgatggacgcctagaggggagtgctaacccctgtgcaacacctacgggccgtatgaggcaccgtgtagtagtcaatatccccgctgctcgttctcctttcggacctgaaatccgtgggttgttccaggggacacctgaggctggtgaatggaaatggactgtcctccgccgtgatcttggggagaacgaaagggttaggcccttcactaacatcgtggaggaactcaagaagggtaagtggaagactgtaggaaagtaccgggtatacgtcccagcgaaccaattagtattcgtgggctacgatggtgctggtctagagcttcggatgcttgcatcctacatcaacaacccagagtacaccaaagaggtggtcgagggtgatgtacacacggccaaccagatagccgcagggcttcccacacgggacgatgctaagacgttcatctacgccttcatctacggtgctggggatgccaagattgggactatcattggtggtacaagggcggacggggctaagctccgggcccaattccttgaagctaacccagaccttgctgcactgattgagagggttaagcaggaagccgagaggggttatctcgaagggctagacggacggaagctaaccatgcgacgttctgagtctggcgacgtgatgatccacaaggcattgaacaccctcctacaagcagcaggtgcaattgtcatgaagtgggccatggtgctcctagacgagcgagtccgtaggttaaacctgagggcttggaaagtcttggatatccacgacgaaggtcagtgggaatgccacccagaggatctcaaggcgctacgtgagcagatggaagtctgtgtccgggatgctggggagatcctaggtgttaactgtcctttggctagcgattctatcgctggtcgctcatggaaagacacacattgatacatctgggggttgactttcagcccccttttgtggtataataccttcttccctacgagaggtttaagatatgtctaagaaagtttcccaacgattcaccttcccggtagcgaagctgatcttcccctacatcgtaactccggataccgagtacggtgaggtctaccaagtaaccatctgcattccgaccaaggaagaggccgacaagctggtacagcagatggaatctaaggatgttcgtctgaaggacaccatcaaataccaagagcgagacggcgagtacctgttcaaggttaagcagaagaagcacgtggactggatgcaggatggcgaacgtaagtctgccgtgatgaagcctgtagtcctgacctcggataacaagccgtatgacggccccaacccgtggggcggttcgactggcgaggtaggtatcctgatcgaaacccagaagggtccgcgaggcaagggtactatgacggccttgcgactgcgcggtgtacgtctccacgagattgtatccggtggtgatggcgaggatgatcctctgttcggtggtggttttgctgaagaagaggacaagtccgaggacgtattcgacgaggtattcgatgacgaagacgctcctatctaagggtctagcggatcatgagtcgggggtatgccggtcaggctgcccctactgcttaattgaattcgagaaagtgtggggtgtacgggtggtgagttctacagctgcatctaataataaagtagaggtcgatcctaatggaatcaaacctggtgagccgggcgctaagctcgatagcggcaaggtggatgttggaatcatcttcgaagcgttcccgagggctctatatgcagtggcacaagttgctaacttcggagccagcaaatatagtcgcgggggttggaggcatgtcgagaacggtatccagcgatatgacgctgccttcggaagacacctccttgagcgtcacaagggaaaaactttggacccccaaagtaaactaccccaccggtatcacgaagtgtggaacgccctagcgtccctggaactcgtcattcagcaagaggaggaatccaatggaacttctgttggacccaagggctaagactgttcctagcaactactctgtgatgggaatcgatgtagacctggggcttcccccaggctacagcctaacggaggaagctatggacaaagccaagcgtcaagagagcgagtattacgactggaaggggtatgaagcactggccaatccagtgatagagcacccagagtaccgagccaagggtgaagcctttgccctccgtgtcttctgggaagagaagctcaaagaatcccaggtcgtagaagaggtatcgtgatgattgaggagcggttctggtccaaggttgataaaaccgagggttgctggaactggacactaggtttcccatacaatgctgttcagaacatcagatatggcagggcgtgggctcaatgctgggagtagtccagcgtaaggagggtaagtagtatgatcgcaggaattgatggcgacgtactttagcttcgctacgaattgggacatgtggctatgtcgaaggaacacatcttcgatatccaggtggagaagccatggcctgaggaagaggtccataagctcgtcgatgataaagtcgaacaaattatcaaaagggtaaatgcagatgagtgtgaaatctaccttactggccaaggaaattttaggctggagcttgcgaaaatcaagcaatataagggtactcgaatcggtcttgaaaagcctcatcactgggaaaccgtgtcggcccgacttaaggacaagtggggagcaatcactttccacggtatcgaggctgatgactggctcggaattcgagggactgaagagggagataactttacagcgtgttctagagacaaggatatccgccaagtcccaggatgctaccattacagttggccctgtggagattcccagccggagttgggaccatttcaagttgatggtcttggaacagtctccgcttcttggcgaatgtatggtgttaagaaaccgcagaagtcatggaagcttgagggcaacggtacggcattcctctacgggcaactccttgttggtgactccgtggataacataccaggcctcccagggacgggaccaaagacagcggcagatttgcttggggagctttctaatgagagggatctcttcgcagcttgcgcttacgcctaccaacagaagtacggagataattggaaggagtaccttgtggaaaactttcgtctcctctacctcattcgcgaccgctcttggcttgatattcagcagtccggtaacgagtatcactgctcactgaagaaacattgggagatcccctatgacgacgaagatttattctattgatgaggccctatctatctgtgagggtctcttcaaaatcctggagactactggcttcactgactacaaggtggctggtggtttcctccgggatgcagacaacggggtagcacccaaggatattgacctatatgtacgcaggcctcgtgtagaagccattggtagacgagtctcacgtgtctttgggccccagatggttccttgcagtgatgatgagcttgaggtagaagtcatccggttctacaacaaacttggtcacaagaaggttcgtacggggtccggggaattacgcaatgggtatcccgaggggttttctgtgtgggagtccattggtgttgatctcccggttaacctggtcgtatccactgacagtcacccagcagagttcgacatggggatctgtgaaatctcctgttggcctattggcacccttcgtcgtaaccgtagtggagaaatctaccggtccagggcatacgagtgggacaaggagaataagtgcatcacaatcaatcgtatggttgatccgttgctggagagtggcaatgagataaccgttggccagatcgagagactcgttaatcacgtatcgagggtaaaggctaagtacccagaccaccgagtgtgcattggggattggatttggatgcttcttcgttcacgttcagtctacgcagggagcgcaatggattttatagtaaggcttcaagaggagggtctaattggcaaagcaggggagattcttcagaaccaaactgaagtcattgattgggacgaagtacgacagcgaaaccgagaagatcgtccacgagacgatgccttggatgcagttcaagccgtccccggtaccatacgtcatcgagcacaagtacaagccggacttcaaggtatcgacattacaaccttgtggatcgacgaagaatctgttggtcgaggtcaaggggtacttccaagaggcgtctgaggcatccaagtatatctgggtgagggaggcccttcccccggatactgaacttgtgttcatctttgagcggcctaatacggcctgccattggcttagtaagcgtaaggatggcacaaagcaatccatggcggaatgggccgaacgtaacggcttccgctggtttactctagagactttcaaggagtccttccctaatgagtaagaagtacaatgaagacactctcgttatcgcggacactcaagttcgatccgaggttaacatcgaccacattggtaacctcggggagtggatcgcacgtaaccgccccaagcgaattgttcatattggggaccattgggacatgcccagcctgtctagctacgaccgtggtaccgctaagatcgaaggccgacgagtcctcgctgatatccaagctggtaatgatgcgatgcgagtcctgctcgatcctcttcgtcgcctacagcagcatcaggcgagttgtaagaaaagggtctaccgaccagaaatgcacttcttcatcggtaaccacgaggagcgtatcaagcggtatgaaaactctaaccctgctctccaaggttttattgggtacgatcattttgatctgtccgattggattgtccatgatttcctcgacgtgggtgttatcgaaggtgtcgccttcgcccactacttctacaatcccaacagtggtcggccatacggcgggagtgccgagcatcgcctcaataagatcaagcgcagcttcgtccaaggccatgagcagggattcaagtaccacatcgaggcagtaggaaagaagcgaatccacggattggtagtcggtagcttctatacccacgatgaatcctacaagggtcctcagggtaacgaccattggcgaggtgtagcccttctccggaaccacaaggacggggaatatgacctcaagctgatgagcgtggaggagttcctgtgagtaagttcttgccagacctgtactacattaagtctgagcatgacttcggtcaacgggggttggcgtttaagacgccgatctccgcagaactctggctggacatgaagtttgggaaagggggtgcagaggaggggcttaagcgagggatgtattccatcgaagtcctggagatcctctacatcccaagcgttcaccttccagatatcttggggtaatctatgaaagaccgagtgggacgtaagctagaggtaggggacagtgtagtcttcctggtccacaggaacacctcctcccatctagctattggtacagttgatgggtttactccgaagatgattcggatcaaatgtcctaccatgagttggactattgattctgaatatgtcctcaggagcagtgacaaggtggtgtactatgacaaaggctgaactggagaaagcacttgaagagacgcaaagcgctcttgcgaaggctgaggcgaaggccttttcctttgaagaactggctgaagaagctaaaagacagattgaattcctcgaagggatgctagacctagtagacctcagggcttctgtattctacggagattggaggggttatgcagaaagatcaaaagggtaagggtggattcccttggacctacattgcggtagcagccttgtttgccctgctggtttatgtagggtatagctgactgatgttactcctgaccctgggagaaatatctaggttactaatcgaagtgttatcttgggcaggttccttatgaagtatcgagtgcagcagctagggaagcgtctcttctacatacaaaagaggtttctctttatgtggaggactgttacggactcgggaggttgttttatggccttctactccttggaagatgctgaggagttcatccgggataacctaaagtatagggattctccagtctaccaccccgtcgagtaaccaaaaaaaaggccccaagggtatcatcccaaggggccttatctttagctccggagagcgttcagcagagtgttgaacttatccacgagggcctcgtgagtgtccgtataggaagccacggggatctcagatatcttatcctggatggaagccgcaatggcttcatataggccactcacttcgctagccttaggcttccagttacctggtttagcctcactagccttagcacccacctccagaagcttaggcttcccctcaatatcctcccacttcactggctcaaagtctttcgggccaatgacttgtcggagggtcccatcctcattacgaacagcaatagccttcgattgaataacgaatacactgttgccgtcgttgtcagcgatataacctgccataattaactcctaattaagctgctgatttgaaggtacccacggtaccaccgaagggatatacacggatagtgcattccccgaattgaccatcagtctccgtctggttacccttagcataccaagccttgtccggagatacagcaaacttgatcttagctgccgatccctggataaagtggaagtgacaacctggggttacatcggggcccagggtgacggtaatctccgtagtcccctgagacatgaagaaccatccagactgttgcttagtcagggtaatattctgagtaagctgctgggtattgacgacgttaccacccaggtgagtagtcacaaggcggggatcaaggtagttctgttggagagaaccaatgttctgcacaggaccacgcatgtcgtcaaactgctcgataatgtagtcaccaatggtaccaccattttggtcatctggaccaatcacgtgcttgatagccacataaacatccaggtgttcccgacgggggtctactcggaattcactaccgaaagcagtaccacaaggggcctcaatcatagtctcagagaacaggccaatcacgtggccagggtcacggttaccacccgaggtttcaccaggagcacccacaagggtgttgaccaggacagaggggataacggcctctgaggggttctccgggaaggaggctgtaacgttctctactaccagggctgcgttctccttaactgcataatagtcagggaggaactctgtagcggtaacgatgttagtatttacccgaccggcatccgaggtaatctcaatgagatcaccatcggcattacgtcggaagacttttggcacatcaaccacgtaggcacggccaccaggaccagcggcatcagtttctacataagttgccatattacttctccttaaagatccagagcatcttccatcgcttccataccggcaacgaaaggacgtgctggagtttgcttatacaagaacttccagatttcacctgcggaagggtcatccccgaacgaggcaatagttttaccaacagccatagcaccctcagttgcagcaccagctactggacccaatagtacctctgcgggggtagtccctcggcggtaacccgtaagcatgtcgtagatcatagaggcctggagtggcatctgttgcatcactacgtccatcatccgttgttctggactacgggtatcctctcggctagacccaccgaacttagccagttgacgaagctcatcctggagatacccaagactcatcatcagaccaagagtgaaggctacacctgcggcacccataccagcgttggtccaagaaccagcgaagtgtgggctcattcgtctacggaacatcggtaggatgatgttaccataggctgctggataacccttcaagagggagaacatctgaacgtttccattgctcatccacataggcttatcagcgaaggttgggtcgaggactacctgatccacaaatcgacgcatagccagagtcttgacgttgttagccatcaagacttcagatggtgtagctggggagaccaacttgagggcatcctgctggataccgatgttaacccccatttcccgaagctgagcaaccttcagagcaccattagcagaactgaaggggaggcctgcggctagatccatcaggttattctgatagacccgcttggcagtctctgttgcaaacacccggttaacatgggttagaatggacaagccgttgatgaggaactgaccacggattgccttttggacagtcgtgttaaatacctcagcaccaacccgatcggccatcaaagaggtagcagaggacagggtgtggttcatatcactcataaacctaccggtctcagattttggaaccccactgtagatcctacgggctgcctgtcttactacctcccccatagttggcaatacagccccaagggtaggcatcacccctgccttagcgaatggtaggctgaactcagttagggtagagaaccctgcgaggggtagtcgggagagcacgagggcacctgacgtaacagccgccagcttcttaaggttggggtctttgatacgaccgtgcataccattgtaggcatccactaggtcatacatccgatccacttcttccttagtgactctcttaccagcccgttgagcctcagctacagcagaagcaatcttagcgttagccttctccccattgataccaaacctctcggtaaaggcaatccggtgggaagccccctcgaagtaatctcgaatttcctggagacgcttcttaggagtatcgttgagagaatacttgttgaggatctcttgaggcacggagccaaaggcccgactctcttccagctgaccatacttaggtactgcatcactctgggcaaaccgtccacgtagagtatctggatcaccttggatacgatatcgagggtctacttcccaagccccggtctgctggttctgagtaaccagtcggttaacctcaggggcagtgttaccacgagtatcatccgagacttccgccagccagttggctacagcatcctcagcagcttgacggttctggaagtacggagtgatgtcgttcaggaactcgggggtctgaaccttctctggggatagaccgaatggcatatagttggggatagtaccaacggacattccaccacggttaacagcctcattccgtacgtcatccatcaaagcacggagacgggtagcttctggggtattgacacctgcggatgtatctgagataatcctgtcgatctctttcgaagacttaccctcgaagatgttatcgagttcagagttccacttacctgcctggagttcctgatcctcaaagatagtcttaccagaggctcgcttaccactcatgtctgccctgaaagtctcagagaactcgcgggcgataggggaggccttagcaagtggctctagaagggacgtagcttcgtttcctagggcatcccaggctttcttgaccgtacccctaggctcaaactcagaagccttaggaggggcctcaggggcgttaggatcaaccacagcagatccagcggagtcctgatgacgacccagggtgtccaaaccggaggatacagcaccaccagcagtaccaatagcggtaccagtgaaggcagccgtcaggaggttatccatgaactgctctggggtttgtacctgccctactgcatcataagcaatagtatcctggagagcctgttgagcaccagaggttacaccttcagccacaccagagactgctgcatgcttaccagcctgggtaacagcctcgatagcggtttgcttagggagtccagactgaaccagcatctggtatgccccgtccttaccgatgtgcttcaagagagggccagcgatgaccccagcaccagcggtatccagggcagacagtccagcacccccgataactgcggtccagggattgctttggtctgggtctagctccttcatctggttgctcagggcacccacgttgatacccatggagcttaggaaggaaccaatgagcgctccacccatacgacctggggccccaaatacagagccagccttagcccctgctgcaccaccagcaagtacaggggccatcgaagggagagcctctacaatgttattcttgaggaacgaaccgatggatgggatatcttggatatcagcgaaagaccgaacatcaggggttccgtactgtgacgcttcctgagcattctcctcggccatctgtgtgccgtagtctttcaggtagtcactgccagtcagttcaccaagggtagcaatggtaccaccgatgttagactgcatggtatcaaccccgcgaccaatcgcagagctaatagaattagggtcagccggagttactagggcactcaggtctggggcaggctcaggggtagcaggggctacttcctggggtgcctcttcgataacctctggctcattcaaggaagccaattcagcggctacgtcgaggcccttgacctcagccagttccgcatcaatagcggccttcagttctggagaaagagccataagtcaccttctagttgctggaaagagaataggctcttaagatgtatcttaggatactaaccttcttagtaagtaagtcaaaaggaagaaggaatcttaagagcctataggtctattatactacattttggatactttgtcaagtaccttttatcgggttggagcaggatagtccagatcaccaccaaagaaccagttacccgtaggttgaagcttagcagcctcccgctggataataccaatagggttagccccagggttagccctcatttcgttacgaagggtctgagctatagcctgttgggcagtcttaccaagcttcttaccacccagggcctgagatccactgacttcactgaggatgcccaaggcatctttggtagtaaccggctcacctcgggctgccttagctgctgcctgacgtgcctgagcgctaatcttagcagtcttcagacgtacagcagaactaagctgggcattctcttgagacatatcctggccacgacgggttgtttcagcctgtagctgagcccgttggttagccatatcctgtccacgctgggttagggcaaggttggctcgcccccgagcagcctcctcagcccaccgatccagaagaccagtgttcttacgagaggtttcctcaagggtgcccttcttgacctccaggttcccttccccaagacgtacatcagcagcatccttagctaccttacgttccagatccttttccttgatctgacgatcagcagctgcggcagccatcttctgctggttgatcccagcctgtaggttacgatccagttgacgctcataggaagcagcgaacatatccccggctttaccagtcttgtctatggccgaagccagaagaccagtaccaatgagagcataagatacataacgagacaggtcatcattatccatagtcctcatctgggtcaactcttcgttcacccgattcttaagctcttggggtttaagctctacaccctctctctgggcatcagcctcaactacagcctgggccatttcaggacgacttacagcaccagtacgaagaccctcagctgcaccctgttggataacctgacgattagcctcctcctcatctgctacagcagcaccagcctcggaagccacctctggggtgatctcaggctcgatagagggttggttaggggttaccccataggacaggagttcagccccagtagggcctcctgtggcgttctgggctgcacgttggcctacaccctgggcccattggtttgcctcttgagcaacctcaggccccatattctccacagcctgactagcctgagccatttcttcagcacgagtccgttctgcatccccgagttctcctggggttacagcagcttgtatacctacagatacaggaccaccgaggatacctgcgatacgacccagggcaccacgacccgttgcttcagccgcaggggctacctcttgagcagcccgagaccaacggtcagggttctcaagggcagcctgagcagcacgacggacacgatcagggagtccagagccttctacagccagcggcagtttgttccttgcgattcgcgccatatccagttcattctgagcagcccgaaggatgctagggcgaattggggacccttcataagccatgctggccataggattaacctccaaatagtttacttaggattccagacttgggttgctgtccgaaaccgagttcttctgcgctaggaagaatgcccattcccgctcccatacctgctgcaacttctgctgcgcctcgttcgcttgctcccctagccccttcgacagaaaagcttggtactgcttctgaagaaggctcacttccttgcccgaggagagccgcgagtgctgctccgcccattgcgccaaaagggtttgattgtccactagactctcccgattgcattgtcccaaggtgggtggggcggtaggaaccttgacggctcaactgtacccgctcctgcccaccacctatattctgtcctatagcgaacagcttctgaggaagggaggccattagaacagaaggcccccgaccctaccaccagtattcataccaacagaagcacccgctgggccaccgaagagagcgcccaaggaagcaccaccgagagcacccagggcagacccgaggccaccaccaccgccaccacccgaggaggtagtaacgttggttcctcccatgtcaccggagataagctccttgtaggcgagtaggtcgttaaggctgacgttattctcataggcccacttctgtagtgccccattgatctcctgctgctcctgattctgaagcatactaccagcatctacctgcatggcattaccagagccgaggcccttagcaatagccgacaggttacccagggtattcaacctattctggttgtaagcctgctggtcttggaaagccaactgggaggcgttattctgttgattctggagcaacctagcggtagcaataccttctgctacacccgctcgggaactcccatactgaccagcattagtggcccctgctcgcaggtctgggcgtaccgtagtgtcgaagtcccattgcatctgctcgttggctgcaccaatggcattcgccaagccagttttgttgggatcgtaaggaccaaggtaatcagccaaagagctaacacctgagctacccaggagagactgaagggcacccccgagaccacccaacccttcgatgccgccaagctggagagcattttggtcagccaccgggtcgaagttcggatcacccccatagttagggtcaaagcccccgttatgtagccaatcactggcacccgagagtagttcattatagttaccttgctgatagggtgtagagacagaggtggtcttttgcttcttactaccacccttgtaagcccgagaatctagggcatcctctacatcgaaccccatcagacgctttacgttaaattggaggaagttcatctggagttacctcacgatagaaggatacggagtcttcggtgtacccgagtttctctagggtaggcttccagccccgacgaccttcgcattggataaaccgacagttaactcgttgggcgaactgtccgaggaagtcgtctacctccgagtaatctaccggggtttcattcccaggcatcttaccactccagaagaagtgaaggatgttacccaggggtgcttgggacacttgaattacaccagcgtagccactctcttcctgatagaagacataggcttcgtagttaaccaaggagtggaccaagtgttcgaagtcccaaaacttaccgaggtccgtcctattgaaggctcgggccagagcagggactacggtaggaagcagatcgatattctcacgagtaatcaaatgaatcatggagtcaccaccagggggaatgtgaatgtacccccgaagactgctccttggggaattccttggattagaacacggccattagctgtgatcttaaacattgcttggttaaccaccccagtctgaatagtagccctgttgagaacatcaaagacttgatccaacggaggtgcgttagggtcagacggaggtggataagtaatagtgctctgcgctgggatgatgctggaataggccgggataaacaactcagcagggggccaatacgcctggggaagatccaggacagtagctccattagtgtagttaccaccagacatgagcatggttatccatacttcatccttagcagtgttcatcctataggcacaggtacccatcggttgatggttgttctgtggggtaaataggataaagtcccccggcaggtccttgggtttagtacctgcgagtctccattggttatccaagtcgtaatgatagatgccggatactggacctaccactccgggggcaaaatactttacagtccctggcttgagcttcttagggggctccatagagaccccccagtagccgtcagctaggtcattaagagtctgtccaaccctaacgaattcttcattaaggaagggcagcagttcctcctcttcctgtggtggaatcgaagggctgtacttttgactcatcgcatacctgccttcggggccatttcaatagtgtacccattgaagtaccaatccccctccgaagagaagtcgaacttcaaggctatataccggcccacatgtttagtgtcaatcttatagtcctgaccaatccggtatgggtaagggcctttccatcgaataccagaaccttgtacctgagcgttacccacccagatgttacaagtaccgttaccagtaatgtgtggaatgatggcactcactgtcttcatcattcgatcatccccgagatagatatcggatctctcaagggtactgacgaagttctgtccagagaatgtagagttattaccgaagaggaacaatttcttatcctggaaagatgagaagatcatactggactttgctgggttataagagccttcaccccagaccgaagtataggtatcccaggggttggggtcgtcatcccagaggttagacaccttaggatcgatgatcccgtaggctccactgagaacgttgggaaggtctcggatactccaagtgttttccttccagttccagatgatagccctatcgcagtgcttacctggctcagacctagtagaagagtagcatacccacatttcagtattcacgtggtctgcaattacgaaggtccgttgatagttgtcagggttaatatccgagaagaagaacttacggacctgagcatcaataacagactgcttctgcacaccgttgtggacatatacgtcaccgtggcctactacaaagtggttaccatcgaactctattgcacagttgggtccgaggatacctacgtcgttaaacagctgctggaattggaagatgaacaatccaccgatataccgcatggagtatacagagtcttccttgtagataatgaaggagtcacgaagcttaacaccatctacgatggcaccattggtatcagccaaggtgttctgaccagcatccttagtagggtccgttgggtcccaagatacaggaatacccccagcatcagccgaggtactccaccagaccatctgtggcatttctacagagttctgggttacgttcaaggcaatcataaagttcttgaacgacttcattcgtttagcgaacgtgttagccggccagttaggcatgggaatgaacccactattctgtggcatcaacacgtaaggatagttgcttgggttgttagcaaagatgacaccattgaatgaaccagaggaccatctactggttacacttgcagagtgtccacctggggatacatccacaacggtagtaccatccgccaagtacatacgctgttcgccacacaggagccaataggggatgttattccggatgaaagggaacatatccaagattggggcctgggctgtatcaaagataggcgtatggcccagagccttctgagccttgccgttcttaaaccggacgttgttcccgaaggaccatttctccagtggcaggtcagcgggggcgatatcggtcacaatccccgtagggttcttgacctcttgtctctctagggccattgtatacctcagttcttaatgatgaagaacacagaacagaacggtgggatattacccaacggcatgttgatctttactgcatggttgtgagtctgaccttgaccagcagggccagtctcaaggttggtattggctgcgttaccagagccacccgtcagagcacccgagtcacccgcagaaccggtgagggtagtagcccctcgggatctccaagtgtgggtatgtgctgggatttgggctagggtaagggcagtcccttcagtgaacccatcccatacaatgttagcgctaccgcctctagtacctacagcctgggaagatccgtcgataccccaggggaatgcaccaatgaggttggggacggggataccattagaggtagtccctacaccattacaaagcttccaacctgctgggatctgagccagtgacccagcccacatgataaccatcccaggtttaacatactgggttgtatcagcgactgcgtttagctgggctgccgttacagtgacagcctgagaaatattggggaaggtattcttaatagcactcttaatgagtcgcaggtggtcatccccaaaggacttcagatcagagccggtagggttcgtaggcaccaactggttaatataagttgcgacctcaagacccattcttggcctcctttatctcttctttcatttcttttcgggtgacataccgctccccaaagattgccatagaaatctggagatcgctcaccgctttggtgagcttctccgtggcctggatgtttctttcaagcagagcctgatgaacattctgaccgacaaccgaggaacctaccgtcactaccgaggatacgaccagggcactgacgatgctgcccaggttatcagttagaagttgcatcctccgtcttctccttaaggttgtcttccaggacttttacgaactcgtcgtcaaccttagagttagtcttctccgccagggccttagcaccagtcacgattgacttagcgattaccttggttgggaagagggtagccagaaggttgattgcgagggtttttagaaagataggcatctgaagctccttaacgttcaatgtctttgatcgccagtcgagtgctagcgaagtcagcggcattctcctcgttctggagttccataacagcccgttcgagtttctgaccccagaactgggaccgagcttcatccatggtgtacagataaatctgctcaaggacaccatagagataaatctgcggatacttcgtcagagcccaagtcgttgggttagcgaggcttagctctgggagtacagtccagtagttcacaatgaacggggcaccgtcaggaacaacggggaatactcgccagaagttacccaaccgagtgtagtaggttacaccctgaggttggtagttatagttaacatagtgggtgaagatatcttgggtgatgtactgaagagtacgcccaccgataagagagtcacccgtgatagaccttagagcaacaaagtgctcagggatctcaatgccaccaccgaaggccatgagagtttcgaagtgttcgttctccctcactcgtagcaatcggttaagacggtcagtagtgttcccaatgaacaacatcagaagttcttgggtaagatcctgacggtcagaccactggatagcagcaatagcgagatcagttacgttattgatcgtagccattcattacacccgtgcctcagaggtccgcatccgatagttatctcggtcattaagccaacgggtaaatcttgcggcatggtctgggtcacaaccaatcaggtttagatcgataggaccaccttcagccatgggacgattccgtagtgcctctacgacaaccagggggatacttgctaccttgcgcatattatccttgcggttgctattgacacccgagtggcgctcttcggcgttagcggacaggattgactcaacatcttgagtatcctttcggataaagagcccaaggtcttcgtcaattgcataagtcgattggatactcatgatgtacctcctaaggggaaacaaagggccccgaagggccccgttgggttagacctgggctacaacgtcgcggatcagagcaccggacttctcgttgtttacacgcagggtgtactcaaccagcagctggcgcttctcgctgtcaccggtcttagccagttcgtgctggaagaacggacgcaggtagcagagggcgtgcatcttcggatcaaagatgaacatggtgttttcgtggaaccagcggttggcacgaatggtgtacttaccgaagtcactctcgtagacatccacggtctgcgcaatgcggttgtccgaggcatccagggtgatctcagttgcacgacccttcatgttcttgctgatggccttcttgatcgagctcgaagtctggatcgagttagcctgaccaccgttgcgccagatagcctcagaggcattcaggagcatgtcttcggtcagaagacggaggtcaccagcggtaccagtgtcggaaccatcaccagttggcagggtaccgttagcacctaccgaaccgttggtcttgtagtaggcaaagatgtttgccatctgacccggagtagtggtgttacgctggatcttagcctgaggggcaccgaccatggcgtattccatgtccagcttcagttccttcgacttcttagccagctgatacgccagttcgttcttacgaccagccttcttgaccttatctgcggtaccggtgacttgcagggtctcgtccgagatttggcagaagttgttcagcatggtggtgaagctaccagccttgatggttgcatcctcaccttccactcgggtgttcttacccggctggcggagttcatcagtctgccactcgtgggtgatagcggtagctacgcccttgccgatagcagtcatgaacggggtgtcatagggtgcgatgttgtagatgatatcgataaggtcttcgcgcttaccgttgatctctacagtcgagacggcattagttggagttgccataagttacgtttccttctattagaaaatatcgagagaggagaagagagcagcagcggcttcaaccgactgatctttcctcagattagcgcgggcagctttaacccgcttagaaccctctgaggcttccgccctacgagcagcaggtttaactgcggcaggtagttcagtctcctccttcttctctagggcagccttgcgacggacctgagattcagcccacttacgtgctgcatcaagtacagccagttggcgggcatcagatatccctcggatctcatcctcggagtatccaatcgatttgccgtaggacacaatcttgtcaccccaagactcatccgtggtcatttccgggataagtttcttggctagctctgtctgacgcttaacgtaggcagagtggacaatctcggctcgcttatcctgcatagccttaatgtcattgcggcgtttaattaaggcctgggctcgatctcgggcttccagggcttccagtcgaagattttgatacttctctgggtcctgggccttaagctgctcccagtttacattgtcatactgattagcaccagcaatagcggtaacagcatactgctcaagctcggccagtagattagagcgttcagcatcaagctcttcgaatttagctgcatactgatcctctagttcagcttgtcgagttacgaactcttcattgcgaaggtagccactcttaagctcttcgaagttaacctcgtagacttcatccccaatcgggatctcgaagagtttatcctcaggatcttcctcggactcaacctcgggatcttcctcagaaccctcttcttcctcctcggactcaacctcttcggtgtcctctggagtaccttcgtctactacctcttcctcctcttcttcccctacgactttaccatccacggtttcatcaccgggggccaggaggtcatcacctagcaaatctccgaaggcttccgctgcctcgaattcatccatgccttgattctcaaggtccattacttatactcctttagagtgatcgaatccaagattgcctggatacgaagttgtacgcggttaagggcgtggagctcgtggtatatcgcctcccgagtctcactatctttgggggccgtagccttccattcgccctcgatctcttcttggacaatacggaaaagctcaggaagaacgttctcacgtaccatctgttgtgccgcatcagtcagcactagactatagccaaaacgttctcccaagattatttcctcactgccttagatggcttcttagtctcaggtactttaccgtctccgatataagcagcccgagcctgagtagcctcaagatgatactccgcttcgttacgagcccgttcccaagtgaaacgatcacgctcaagttgtagttccgcttccttaagggccatttctctctgctgaaggacagcctcttgcttcttcagttcgatctcagccagtcggatctgagcctctacctgcttcatctgggcctccgcttgcttagccaaggcgtccgattgggcacgttgggcatcagcttgggctttgatatcttcaggcttaggttgtgcttccttctgctccctgatggccttagcctgttgagcttcaggagaatccgggttagtccagaagcgatccgggtctttatacccagcgttctctgtgacttccttaaggatattgtaaaggttctgctcagagactaggaccccaagaccaccaccccctactacagcctgggccatttcccagatacgcataaggtggagcatctgctggtctttgttcatgttgccaataccaacggtaaccgtcaggtcggatctctctctccagttggcagggttaatagcaacccacttgcctcgtagctggaagacctcttcctgattctggtacttgatggcatggtcatgcagaagttggaacaaacgcttaacaccagtctctgcaaacatccgggcaatcaggtcaatctgttgctcagcagcagtcatcaactggttaacactcatagccgcttggttagagtgcagggtgttttggtctagtcctcgggtacggtcagtgatacctgtccgcttacccctgtctgcctctagacggtctagcataccgtagacttccccagacagctgaggggtctccagaggcatgatagagttcatggccttaacccgaacgatacccgctgcctcgttggtcagcaagtcttcgaggttaacctgtccatccaggactacagatcgcccttggttggtccggtagatgttatccatgatgttgcgcatgagcaccgaacggatctcttgaatgtctcggatcttatcgtagacactcatcccgtggaacttatgggcaattcgataggcattcaggtcagcgaagggacggcaatcccaaggctcgttgctgatgatgtagtcgcccacgtacaggatacggcgcaactcagagataccatccccatctacgtccagaagggtgtagcactcagaggcccatacctcacggttggcttcagcatcatccccagagttgtactggagttggccagtcatatcgaagttatcacgtaccaacctttctggctgactatcagagaattcatactcatcgtatggaagctcatctagtacatcctcgggaacacccaagagcctcaggtcacttacggtatacttctcacggtgacagaggaagcgtgcatcatcaatgcaggtagccaatcgatcaaccaggaagttctcaggcttgatacaggtgactttaatctctcgcttcttcttgtccttgcgaattttaatactgtaggttccatcctcatccacactctgtgctagaatctcagtgtctggatcagccaggatatccgctaccatttcctcagagagaccagagaatcgttcgaaggtaggattcaggacctcttctacatagacctttacaacaccggtcttcatcatcagagtgtcttggaaccagtcgaacattaccttgaacccctcgttcttacgcatgaagaggtagttcacatactcagtctcttgctctgcctgttcaacatcttcggcagtctgaggttcatacttaactacttgaccgcctgacgtgaataccttcataagagaaggcataatccagtctacagtctcttgaacatccctagatacaatcgcggacttacccggacgctcattaccgaagggctcaccgaagtaatacttcagggcttcagagcgttgtttagatagttccgacgagttgaaatcaagggcgtcgttaacaagttggtctagatgacgaagtacctgttcatcatccataggcttaatcttgcgacgacgcttagccattagacaatactcccaaaccaatcaggggtcaactttgcagtatcactcctgtagtatccactgtttcgtacagcaccaggacgtgcatgccgggaagccatcaacagggcataccgggtagcggatatcatatcgtcgtttctgtcgataatctttccgtcctttcggtggtacattttcatttcttttaggaagttcgtacacgtattaaacaccttcagatcaccattctccatacgggtcaacatccagttaacgccgaactctacagagttacctccgtgtttaccatcaggacccggtgggttactgaagggctcatacactacattgaggttgtggtcatctttaagaaggtctacgaatctacgaccagaggttgctccatcgtgcttaaaggcatcgtgggggacaactaccgggatctggtgaccacccttcaggtagatagcatcagcgtgcatccccaaggtctcaccactctcacttctctcatcatagaggtagtatttgtctttctcagggtcccaggcaacacaggcgatagcgttagggtggtcaaacccaaggtcgataccgatgatcctatggaagtgatcggggatctggaaaggctcacatacaaacttctcttccagaatggggaagactacaccagatccgagcataggaacaccctcggccctcatcctgcgttctgctggagagtatacagagagtagctgctctttaacttctggactgaggtgtggggcgtcttcccagcttgcatggacaaggaactgaccaggtttaagatcctggaggaagtccttgacgatctccgtcagaccatgctctggggtaaacgtcagatatacaatacccccagtagtagccgttcgggttacacactgggtataaatatccttggggcattcctcatcgagccagataacgtcgatggcagtacccatgaatttgtcctgggacatttcgtaggacttgaagataagggacgagaggcccccggaggcatgcttaacaactactgcttgcacacatccgggtttaccttccctacgaatcgtctctacgatatcttccttggggatcatccccgttccaaaagcctcagggttcttccagtcacctagtagttcggactgaagaatatcccgagtggtatccgtggagatccccgccgcccagcagttcactggacgatcatactttctaccagtccaccactcagggtagcgaccggtgaggtggcaggccatgataaaggccccggtgtaggttttaccacagcggttaccagtcatagccagcaactgggcgcagttcgaggaagctgcgataaacttctcttgccacccataaggagtgtactggttcatgcggaaatacttctgccgctccgccaactccttgactagattccgtagccgctcttgggtatccattagaccaccttgtcacctactgttgatgcacgccacagggcccgttggaggtcccttacgcgcactggagtttgtttagcccagaggctatcttctgcctcccatgcagcttcatcaaaccttccggacttcaggagattccacgtcttggggaacttcttcgtccacgctgtacccagctggaagttgacgctaacgagggcatcgaatagctctggagtgcaaaaaggcagctgagatacttgcccttgggctgcatcataggctgccttactatcttgctctagccaagtctctgctcgtgctagggtaatcggtccgtcttccccagggagttgcaagtggccataaccaccagttatcttcccgagggagtctttgtaccattttagtaccaacccctcccttcgcttgattagatcaaggtacttaagaggctgggaaagaaatgactttagccaactctggctcttcgtcgagaattcgtcgaacttcactgattagatcctctgcggacatatcttccacattcttagtagtaagctccagtttctgcttagctccgaagcctccacgatccaggatatcctgggccgccttgaggcgaatcccacctttctcttctgggttgctagcgatctctacaaccacacgaagcgccatggggacatgactcccgatgcgctcagagataaaggcgttgatgtattcggcatgctttcgatggtatgcagctacgttgcgttgcgcatgattaggagagaacccagcggctatatatgcttgggttttgttcataccatctgccagagcctcacaatagaggtccagcttttctttagcagaaagaggagcagccccaatcgagacaaccttttcgtctgacatacactgctccgatctctctaaatggtcaccccggtaggactcgaacctacgacctcctgtgtccaagacaggcactctaaccaactgagctacgaggagttaatggtggtcgaaggaaggaattgaacctctagcctaaggcgtccgggttacaaccggatggtagtagccatctacctctacatcgacctctgttggctgggacggcagggctcgaacctgcgacctgagagttaacagctccctgctctaccaactgagctacatcccaatgaaatcttaaggtaatttctcaaccttataatactattatatcatactttttctattttgtcaagtcttttttcttctttttttattttagtcgcaaggcccggttttgttagggtttttgctggaatgggaaaggggttcttaagactatcttaagataaccttaaggtaactaaccttcttagtaagtaagtcaaaaggaagaaggaatcttaagagcctataggtctattatactacattttggataccttgtcaagcactttttgatatttctttgataatcacatgatttacccgacgaacggtatgatagggttctatagatataccctaagactacccttcgtaggttgctggtaaggggtaagtggcatagggttcccttgatccaggttctataggtataccttaggactacctctgtttgctatgtcctggcctattgccccctatccagtaatataccaacaggtatcgggggttgcctttgatccagggcctataaccgggggataccccaaaagtctattttatcctccggtgtatctggggaatatccccccaggagtcccccagataaagtgggggtggcctatccacaggggtatagcccctagcccctccctaggataccatgggattagtccgggggtcaacccttagacccttgggctaagccccctagagctaccgttcatcgggtggacactagggtattcataagaaaaatcttagggtattcaggaggtggatcggggggaat

SEQ ID NO: 6 - DNA, 43744 bp, Phikmvirus
  source 1..43744: mol_type = genomic DNA
tggcgggctggtctgtggctggcatctggctgggagtagttactccgggtccaattttgatatcgtcgtgtgagaaccctcccgactctgatcagcccacccttcccccgtaggccctccgcctggtgggccatcgcctcgcattgcctgggtggtgctgcctgtcctcctgggagcttccggcttcgccggggtggcggtggcttccttgcccttcgccgcccattctacgcatcctgccgggagtgtcaacccttgggctatcgctgtcactctaccgggcttggccgtagtgcctggagcgctctatcgcctcctggtgcctggctacggctagcgctcggtctgcctctagggtcctggctacgcctgggtagtgcctggcatcttccctagcccacttggctagcctgcgctgccaagctgcctcgtgctggtgccaggctcgctcggctcggtcctgtctgctcagcatccttgtgcctcctgtggtggtctgcggtcctgtcgggtggtggtgcgggagtggctggccttgcctctacgctctgccctgcctcctgtgcctggcattgcctcctggctctacctggcgttgcctgggtggtcctggctctgcctggggcctacctggccactccctctaggccacgtactctactcgcctgcctctgccttgtctagtccctcctggctggtgcctgggtgctggtctgtctcacctggctcactctgtccctacctgtgccctgcctggctctgtcctggctaccgctggtcctgctgtcttgcctcgccgctccctcgcctgctcggtcgcacctgcggcgctgatggactcctgtttgtccattgtgtgtgacataaccgcagccttagtgccatgcgggttccagggtggtaggtctggctggtcgggtggtgcctgggtgatgggctatcgctccctggtaacgcaaatcctggctagctagactaagcctcgcgcatggggtctctatacgcgtggggctcctggcagggccataggagggagttgacacgtaggcggtaggtctgtagagttcgccctgtcttcacgcaataccgccttcacaggcagcctggagacagggttgacacactgccagggcatcggtagagtgcgcagccagaacgacgggagattgcaaccttccaagcgcggcacaagccataggcgcaagggacacggcaaactcttagggcaggaaccgcagtgtgtaaggccggcaggcatcactgaggggattgacaaggtaataagatgcggtaagatgtgcggcgtcaagtggtcccgatgtacacactgtgaagggattacggcgcggtcagacagatgaccggcaccgcttgacactgtaaagctcagtcggtacgatgggcacccatagcggacgtgatggtccggggcgatgcggataggacgccttgtttataacctgaccgcaaagctgtgactccagccgataggactgacccaccacgtaaatacagacgggttgacacgacaaggccaagtcgataacatggccgccacaaagggaagcgatagcttcctggcggtagaggatcaaagcttcacctgcggaacatggacaggtgcggtggcgaaccgaagctgcaactggttaggcagggtcccagggaatacctgtcgggtgctgaagactcacccaaaagagtctgagcgggaagcctccccgtccacggttaagcaaaggcacgttagtgccggtgggaacgaatagagtgtcagtgggatcgagaactagaaacctcggttaatcgcgactgacagtatgctgggtagtatcggcgggccgattgaacaaggccaggcagatagcgcaaagggtacgggggatgagtgaagacgatcccgaagagtatgcgcaggacaagccagaaccgctgatactacagggactatgccaatgccaaggtttgtcccttgaggcccttccaccgaggggattcaagagacagacctagttgaggaatgccgatggcacacttcaaggctaaggctcccaagtcgcccttcgctacccaggtagcgtactggcgggattgggaagccaaacgtactaagctcatcgcacaggataacgtcgaggggcgcaaagagcttcgcaagatgcgtgacgtgcgctacgctaccgacccggagccagcgccaggacgctaccacaaccctgaacagaaggcgttcgtgaagggtagcgaaggcaaggcgcggaacatcctgaagggatggaacgctaagaagtcgcaagggaagggtttgtaatgccacgtgtgaatgaactgacgccgcgtcaacgcaaagccgccaaggctcgccgcgacaaggcacgccggattgatctagcgcacaagatgccgaaaggcgccgactgcccgatcttccgcaaggctgaacaggcgcaagctaagcagccccgcgtcgataccctgaccactccccgcagtgccggctacctggccgccgctgcatacctgaacaaatccatctgaggtacataccatgaccaacgcaatctccaaaaccgtaatcgcattccgtggcaccgaagagatcaaccgcgctatcgacgccatccgtgtccgtggcaaggaactcgacgaagccatccaactgaccggcctgtcgatcatccatcacatcgaccagtgcggtgacgtgaccgtggtcaaggcgctgtatgaagccatgccgaagggcagccgccgcaatgcgctggtcgagtggctggtgctgcacggcaaggtacaggtgaataccgacaagaagtcgaacaaggacctgcccttcctgtacaacaagtttggcaagaccgatctcgtcggcgccaccaacagcccgtggtacagcttcaaacctgagaaagcgctggaccaggagtttaacctggccgctgccctggccacgatcaaaaagcaggtgcttcaggctcagaccaagggcaaggtgatcgtcggcatggaactcctgggtgatctggaagcgctggccgccaaggctgcacccatcgccgagcagagcaagcgcgctgccgcccattgactcaagtcgaacgcctgctaagcgggcgttccgctggaatcaatgacaactggagaaacacgatgagctttaagcaacgtctgcaacgtcaaatcgccctggcccaatacagccgcccggctcagttcccgtacggcgagcaagccgtccaggcgaagggggagtgaccatggatttctggatcgccatcccgttcctcgaactcggcctcaacctcggcgaggatgaactgcgcatgctgtggttcagcggcctgacggtattcttcatccacctcctcaagcggtgactcaagtcatggccctggcgggcgaccctcgcctactccggggccatcgctggactcatcacaagcgagaactagaccatgcaagctttgaacactctgttgatcgcaatccccaaggacccgtcgaacgcattcaatgcagccgacaaggctctgtgcgcccacggcttccgtatgggtgacctgaacaccgcgcacgtcctgacccccggcgggttcgtggtagtgggcgctggcgtgactgtgaaccgctacgacgaagcgtaccgtatgagtcggaacctcgactccgaaggcttcgacgtgctgctggttcagggcagcccgctggcgggtcgcgtcacctgccaggcgtacggctggatcaacgctgaataccgcaagggctgcgcgaacgggcgcccgatcttcgacattgcaggaacctcgtaccatgtcctcgcgtgatccctaccacatcggccaccgcgttgggctggtgaactacagcgaccgctacctcggtgccgacgcggcaggcaccaagggcatcattgaagccataacccgaccgtcccgctgtatgacgatctatcacgtacgctgcgagcggactctgcgcctgatcgaggccgaggcccgtaacgtgcgattcatcagacagctaccgatccgcaaatgacgtggcgcataatcgtcgtcagcccatcaagcggctgcgccttcgtgtggagtctcaagcggcctgtgcggcccgtgcgattctactcccgtaaggcagctaaatgctggctccgcaagcaccgccgacagggcttgcctggccactactacctcatcgtgaactggagcaaacgcctatgaatcctacttacgtcgtccgcctcaaggacggaaccacccgccaggtagtcgccgacagcatcgtcaccggccacgccttcgtcgaactctggttcctcggaggcgcggtcgctatctacccgacctgcgaagtacaggaggtccaccgcactgacctcgtaaaggaggggtggtgttgaatacccgcactgtatacgtcaagccgcacagttcgaggtgcccgccggtattgtccgcaggacgcctgaccccgggtgaactctaccacgtgatcgcacctgccgaggtcgaaggcgtcattgtgctggcaacttcaggcccgtggcacatccggtccgtggtggtgcatagcatgcacccctcggtatatcccgtagggatggctgtcactgacgattcctggcggttccgccgcctgggcgtgagcgagtacgtccaactaattcaagggtacgaacaatgatcgccgcactgatcctgatcgcgatcgcctacatccttgtaggcgcccttgtgttgaccctctactgcttggtagtgtcgccgcccttcgagaaccctacagaagagcaattcgaggacgcttgcctggccggctgcatctggccctcttgatcgtagtcatgatctaccaggcggtgcgtggcttcctacagggcgtacgtggcgggttgtaccgtcacctgttcaacaaatcgacgaggaattgagatgatccgcacccatacccacaagtcccaccgcgaacaaggtcgtctctacgatctcacagacctgaactccggtgagatgtaccaggtagtacagcctgagtccaagcgaggcacgctggtggtcggcgtggcggcttggaacagccagggccgccccgtagtgctccccgtggtcatccacgacagtggcgacgccaaggtgactggtccacggcccaccgtgctgcgcaacgacggctggcgcatggtgctcgccgacaagggcacccaggtaacactcaccgccgagtgaccaaggcgaaggctggcgcaccagccttccaccgtggccattccttgccgcgaaccaactcaaccgaggagctacaacatgaccaacgtcaacaccaccaccgccaccgagaccaccaccgctgctgtcctgggtgccaagctgatcaagaagccggccaccgtcgaggacttccgcaacaacgtggtcttccatcacaacgccttggccaagctgaccgaggtctacaacgaatcggtcctcgccctgcataccgccgagcgtctgtccagcctcgttgccggcgacgtaatcaccttcgaccacggcaagggcgagaaagccgaggtgctgagcggcgaagtcatcagcgtggtcgccggcgtctaccaggtactggtccgcttcagcgacaacgcgccggccaagctgctggacgtgaaagccagcgccatccgcgctgtccaggcaccggcaaactcggctgaatgcctcgacgaggccctggcccaaggcgagtaaggcccgcacgtaataggcccggccctccgggcctattgcgagctagccataccataggaggagtcaccatgagcaagcgtaaccccgagcacatcagcggcgctgtgcgtagcgtcagcgtccagaagtcggcagccgtccaggaactggaggatcgactggagtctgccctggccgtgtgccagcagcgggcggaagacatcgatctgctgagccgccgtctccaggccgcagagcgcgcccgccgctgggagatcgacgagattcgcaaccaccaggcgaccatccgcctgttgcagaacgacctgaacgctgcgcatgatgcccacgaggcacaagagcgccgcgctcgtaaggcaaccttcatggcctgggtatgcctgctgaccgcaggattggccgtcaccctgaaactggcaggagtctaaccatgcagtgcaacgatcactacactaagcttgcagcgagcatgttcaacgtaccgtgctcccaggtgaccgccgagatgcgccgcgtagccaagagccgggccttcgcggaggcgtacacgcccaagaagcaggcgtcgggtgggacgtataccgcccgcgtgagcggcgtcacctgcgagggcggtaaggtcgaggtgcggctggataacgtggagcgggtcacctcctgtaactatgccaagctggaggcgctggaagcggccagcctgtaccaggccgccgcgaagcgtgccgatgagtacgaaaagctcctcctccaggtattccccgatatggcgcggaaggacggcccgctggtcgccaaggacttcgcagcgcgattgaacatgctgcgcgtgaccagtctatcggtaaggcgtgccctacgggatgccgggatagaggcagacggcccgctgtaccatcgcgtacggaagctggctgaccggaataacgtgatgagcgccgagctgttcagcctcaagcagggcttggcacaactggtcgaagtgggacaaaaggccggactgtactgggatggcgcggagactcagcgcttactgacggtagccccaaccaaggccctctgtcatctcaccagcaagttgaccggcgtgcggtatacctaccgatctgtcgtgagcaaggccgaagcggcggctcgcacactggcactggcccaagccaaggataccctgcgtgtggccaccttcgcagccaccatcgccggcggcatcgtgggtagcgtgctgacgtacctgctcgtctaagcgaccagggcctactccggggtcaaatccgagggcgttcctagagcgccctctcgtgtgagtctggaggatcacgaacatgcaataccacttcacgcattacaacggataccgcttcggcgtcgagctggaggacgaagccgtcttcccgtgcatcgacggcaagcgggcaacctgggacaaggtggcggcgtgtgccggtagccttgtgcattacatggcgcaggacctgattgacttcggccagcgcaaattgagggatttggaagatgagcaagacgagtctgtacccgctgagccttcatcccggcctgatctcaatcaggacgatacacgtattcagcatccaagctccgacgagcgccgcgaactggtggcagtggttcctctggcagcggaagtaccacccgctccgggagagcctcagcccagccggggaactgagtgcgaatatcgccgagtgtgtgctccacctccgccggaatggctggcacgatagcgacatctggcgcaagaagggcggcgtgctcgccctcggtgccttcagcctcgccggtgagatggtcggttcctgcctcgtagtgggtggtgagctgaaggcactgtgcgtggacgaccggtacagtggccagggtatcggcgctgaactggtccgggccgctgagctggccggtgccgagcatctgacctgcttcgagttcctggagccgttctacgccggcctaggctggagcaccgtccgccgggaggcgaactggaccgaaggtgagccggacgtgctgcacatgagggcacccggccatgacgcatgaggtgatgacatggcttatcgcgaacaaaccgctggtcatcggagccgccttcagtctggtggccctgggcgtgctgctcacacagaacaacggcggcccgcctacggcacccgcatgacctggcatcttcaggacatgttcgaggcccgtggtgggcttcggcccttgtgggaggagtggtatcaatggcactgcgccgagactcctggctaaagcaagcgcaatccctggcagtcggccagacggggcgattccgccacgtcctgggatgcaagagcatgagccggggcgggaccaatatgacctgcaagaacctgcctgaccgctgggtagcatactgctactcctgtcaggagggtggcgtggtcgagaaaacgcatgtgcggagggtacaatgcgcggatcaagaacggttcatgccctggcccgaggatgcctcggactggacgcaggccgactgctatcaatcgctctatggtttgctgctgtccaagggcatcgactacaacgtgatgacgccagggctgccgctgctgtacagcgaaaggcagcatcggcttatcttccctaccgacgcgggctggattgggcgcgctactgccgaccaaaatcccaagtgggtgggctacgggtatcctgccccggactaccatggatggccccaggaattatcaacgggcagaccatgggtgctgacggaagactacttgtcggcgctgaaggtgcggtgggcctgtcccgaagtctttgctgtcggtctgaacggtacaaggctgcgcgacaggctggcggcagtcatgttgcagcagacctgcaagcgcgccttcatcttcttggatggcgacccggcaggtgtccgtggtagtgcaggcgtgatgcgccggctccggtccctgcttatcgaaggccaagtcataccaacgccggacgggttcgatccgaaggacctgacccgcgagcagataaggagcctagtaattggacgtattgacgcttcacgcactgagtgaccgggaccgcttccgcacgttgcggagtgtggtccctgaagggatgatggggccggagacgtgcttcgtcatcgactggatcgagcagtattggaaggtctacccggttcatcagaaggtagacccgcaggcactgcgcgaactcatcaagctgcgaggtggctaccagccggaacaactggcggtggtcctgaacctcgtcaaccaactggacaagccggtggacccggactcgctacaaggcgtcgtatcccagctcaacgaactggacttctccgggcgggtggatgccctcctggcgcagtacaaccagggcgaggacatcgacctggcgtatgagctgcgacgcctgagcgacgaggccctgcgccgcgagggggtcagcacgccaaccgactacgtgacggacgacgtgtttgatatcctggcggaagagcagggtgaccacggcatcaagctgccaggactggtgctgccggcgtatatgaagggtctccacgctggggcctcggtgctggtggcggcgccgccggatgcgggcaagacctcgttcatggcctggatcgctgtacacatcgcgccgcagctcaagcggtacttcgaccctggccggcccatcctgtggctgaacaacgagggcaagggacgacggatcaagccgcgtctgtactcggcggccctgggcatgaccgtgggtgagattctcgccctggacccggaagaggttcgccggatgtacgctgagaagatcggcggtgactccgagctgatccgcatcaaggacttccacggcgggtcgctggctcaggccgagcaggtcatcgacgcaatgaagccggcggtggtgttttgggacatgatggctcacgtcaagggtggccagcgcaaggaccagaaccgcaccgatgagatggagtacaaggtggccgaggtccgcgagatggcggtgcgccacgatttcatcagcttcatgacgtggcagattagcaacgacggccacgaccagttgttcccgccgcagtcctgcctcaaggattcgaagacggcggtacagggcgctgtggacgtgcaaatccacctgggccgtctcaacggtgcggatcaacaggtcatgcgtggcctgtccctgccgaagaacaagttccagatggacgggaagccttcgaacgtggaggccatgattaacttcgacgccgcacggtgtcgtttctttgagagtgtagaccatgcaagttaagcactacgatctgttgaaaggcaccaaggagattccatgcgtcgagctgtccagccagatggagcagctcctcctgcgcctgtactccgacgttacccacttcgaaggtgtggccctggccggcggctgcctgcgggacctgatgcacggcgccgagccgaaggacttggacgtggccctgtacagcatgtcccagcgccgcgctgaacaactggtggccgacatgctgggcttcctggacccgctcatcctgcgcggtggtggctggtcttctcagtacgccgactgcggcgagagcggcatcttcgtgggcgtcatgcaactcatcggctgccgtgggctgggcgggtgcgacgtggacttcaactactacaacgccgacagcctaggccgcgtcctggaatccttcgacttcaccatcaaccaggttgccgccacctaccagtggccgaacccggaagacggtccgaagctgggcacctacctgcacaaggacgttacctggggcgtgaacaaggaggtcggagtaggctccaggcgtcccgaacgtcgtgagaagatgctggccaaggccgcgtattacggatgggagaacgtgtgatgagcaagcgcgacgtggtactggatatcgagaaaggcatctggcgcggtgttgaccagaacgacaaggccgtcgaggccataatcaagaagcacgggtacgtgatcgtcgagcctaagatcgacgggtgccgtgccatcgtgggtgcgcatggcgtggtatcccgcagcggccgccgcttccctgccctggacggcctggaggatcgcatcatcgcgaaactgtcccagtccggcctggactccggtctggtgctggactgtgagatgtacctggaaggcatgcccttcagtgaggcgaccgggcgtatggcccgcaaggccccgctgacagaggccgagctgaagtgcctgcacttcgcggtattcgacgccacccatatcggcgtgctccgcaagtcgcgcaagtcccacctcgtgtacgatgagcgccgcgccatggtccgcagcctcatggaagattgccggcggggcgacaccccgtacttcttccaggtagccgcacaatcctgccgttctatggaggcggtactacgctggtcttcgaggggtcgatggagaaagacccgagcctgacctaccgcaacggcaaggttgctggctgctacaaacgcaagccggagatcaccgtggacgggcgtatcgtcgggtacgtgatgggcaagactggcaagaacgtgggccgcgtcgtgggctaccgtgtggagctggaagatggttccggcaccgtgggcgccaccggcctgagtgaggagcacatccagctcctgacctgcgcccacctcaacggctgcatcgacgaggccatgccgaactatgggcgcatcgccgaggtctccgcgatggagcgctcggccaacaccctccgccatcccagcttcagtcgcttccgcgacctggccagtaaccctggagtgaaggtatgaagattcgaaagtcccataaccgcaactacccggaagatatggtgtaccacgccaccaaccgggattcactgctgtatccgaagtacgtcatgggttccgtgttcatcagccaggacggaacattccgtatctgcgtcatggcagggacttgggaccacgttgggtccgaagttcggcatcatgcgcgggacatccaatccctcggcgccggtcgccgtaagttgcaccgggtcatgcgacggctgcgtcgcaatctgcaacaggtaggagtcaaggtatgagaatgccaaccgaagaagaacgcacgatccgctgcctcctggcagacatccatgaacccttgaacctgctgttccccggtatccgtgtgaaggccgagacactgcccttgggctggggcgatgatatctgcgccctggtactccgggtgagctacgagcatctcacgctgggtcgcctggagtacatgcacgaggtccccatcctgcacctgacgcagtggggccgggacggcatgctccagcacctgatgaacgagattccccgtcgggtactggacggcatgctgcgccaggcgcagaagtacagtcagagcaactggtacagcaaatgacgactatccgaatcctcgacctcgaaaccgagagctacgagcacaaagggcgcaaggcgtcgccctttgacccccgcaactacatcgtcatggccggctggcgtgacgacgttgacggcaaggtcggccagaaggtggagcatcgcttccgcagtcgggccgaagccgaggacccgaacaaccgctggttcaacctcgacggcgtggacgtgatcgtagctcacaacgccatgttcgaatcgaactggttcttcacccgctaccgggacgagtacctggccttcctgcgacgcggtggccgggtctggtgtacccagcaggccgagtatctgctgagccatcagacgtggctgtacccggcgctcgacgagctggctccgaagtacggcggcacccacaaggtggacggcatcaagatgctgtgggaccaaggcgtgctcacctcggagatggaccaagacctgctgagcgagtacctgtccggcccctgcggcgatatcgagaacaccgccctcgtgttctatggccagttgatgaagctccaggcccgtggcatgtgggctggctacctggagcgttgcgaggccctgatcggtttctccgcgatggagtgcgccggcctgaaggtggacctcgaagtcgccaaggtgaaccacgccaagcaactggaggaggtggccggaatcgaggctgagctgaagaagctgatgcccgacttcccggaatacttcgagttcaagtataccagcctctaccatatgagcgcatggctctacggcggcgaggtgcggtacaagggccgggtgctgtacgaagatggccggatggagaaggccgacttcgtacgcttcgggacggccaagcgggggactcccatcgagagtacctcggtgcgggtcccactccacgaagtgaccgaggacggcggccactggaactggcacgccatcaccgagctggccagaaaatacggcccggtcatcaccttctccgccggcaagaacaagggcagcatcaaggtattccgcgaggacacagacattccggcgaccaagtgggatgacgaccagcgcttcaagttccccggcctaatcaacctgaacaacctgccggaagtggtgcgcgagaagttcctgggcaagcgcccggagttccagtgcgccctcaccctagcggacggatcgcccgtgttcagcaccagcggtgacgccctcacggctctggagaaacagggcttcgaggcggccaagctgctgattcgcctggccgagctacacaaggataactcctcgttctacatcacccacacctacaacaaggatgggacgattaaggacacgaaggggatgcttcagtacgtggacgatgacggcatcatccaccactcgctgaacacgaccgcgacggccacgactcgactgtcgtccagccgcccgaacctccagcagctcccgtcgaaggacgaggatgacccggaggccggcagccgcgtgaaggagatgttcgtgtcccgcttcggcgcggacgggatgatcggcgagaccgactataccgccctggaggtggtgatgttggcggctctgtcgaaggaccggaacctcctggcgaagctgatggccggcacggacatgcacttgtaccgcctggccgggaagcacaacaactggaacggcttcgattacgaccagctcgtggccatcaagaaggaccccagccacccatggcacggtcgcatgatgcaggcccgaaagaacatcaagcccaaggcgttctcggcgcagtacggcgcgagtgcggcaggtatcgcattcaacaccggctgtaccgtggaagaggcgcaggagttcttggacaacgaggcggccctgttccccgagtccatcgcattccggcagatcgtccgcgacagtgcagaggccaccagcctcgtgatgtacaaggccgaggaccagatgccggcaggcgccttcagcgagatggggccggatggcaactggcggcagtaccgccgagggttctggcaagcgccgggaggcacctgctacagcttccgccaacaggagcgctgggacaaggaacagcgcaagacggtcatggacttcaaggacacgcagatcgccaactactggaaccagggcgaggctgggttcatgatgaccgtgagcgtagggcgcatcttccgttggatgctgcatcgcccaggattcatggttaccgagttcctgatcaacaacgtacacgatgccgtgtacactgactgccacaaggacaccgccgccgaggtcaacaagggcgtgcgcgacatcatggccgacgctgcccgctacatgagcgagcgattgggctacgacatcgcggacgtccccttcccggcggtggccgagatgggacccaacatgttcaacatggacgtgatccgggactaggccgaccctagcctactccggccttaaatcttcattcgacacgagagagaccacgcatgactcaacaactcaacgctctgcaagccgccctcgccctggccaacaaggctgccgagaccgcaaccatcgacatgtccgaaacctccaccggcggtggcggcggtcgcatcttcccggcgggcaccgccatgggccgcttctgcatctacatcgagctgggtgaccacgccaaggaattccagggcaagctcaagaatccggcgcctcaaatccgcctgggcttcgcattgtggggcgacgtgaacccgcaggccggtaacccgcagagccgcccggacgacctgttccacacctacgaggccgacggctcgatcaagcccggcctgttccgtaccttcgagatgaccctcggcaacaacgaaaagtccaagaccaagctggccttcgacaagatgaactggagcgggcagcatacccacttcgctcagatgctcggccaggcgttcatcatcccgatcaagcgcaccaagatcaccaagggcaacaacgctggtaaggaacgcaacgacatcgattggggcggcatcatgaagccctataacccggtcgatggcagcccgtataacgtgccggaactgccgatggacctgttgcagtatttcttcttcgacgcgccgaccaaggagacctgggacgccctgttcatcgaaggcacctcggacaacggcaagtccaagaacttcctgcaagagaccattcgctcggccaccaacttccccggctcggccctgcacatcatgttgggcggcggcgacgatctgatcatcaagccgacgacccaggccgcaggcagcaacctgccggcagtgcccaacgtggccgccgacgccggcgtagcggcagcaccggctgtcccggctgttccccaggcagtggctcagacggcccccagcgtgccccaggtggcgaatgtggccgcccctgtggtaggtactgccgaggcacagaacgtgctgcctgacgtgccccaggtggctcagacggcggctccggcagcggtcgaagtcccggcggtcccggtagtgccggcagtaccgcaggtctaatgcgcctgccatcggaagagttcctggcaggactatccgcgcagttcgaccgcagcatggcaggcgggacgttggtgtgtgacgccgacggacccgcctacgtggctgcggccactgctaagaccctggacactgcactccgaagattctggaagctcattttggagcagcagttcctagcgcactgcacagggacacgggttcacctcacggcagcaggtggggcgaaggcgtaccgcgacacgtatccgaccatgaaaccgtaccagggccagcgcaagggcaaggcaaagcccgcgctgctggagccactgcggcgggccgtggcggacgtgcatgagcgaggcggggcgccggaggggatcgatgtcatcctgcacacattcttcgaggcggacgacggcatgatgatggacgcctacgccatgcaggacaaggccatcatccggtccgacgacaaagacctgcggatgacgatctacccgtattgggagatcgatacggcatgtgtgagcaggatcgagggtggcttcggctacctcaaggaagcgtacacgccttccggccagttcaagctcaagggccatggacggaagttcttcttggcgcagtggctcggcggcgacaccgctgacaacatccgagggatcgatcgattcaacggtaagctctgcggtatgaagacggccttcgacatcctccatccgatcacggatgaggacgaggccatcgacatgatcctggaggcgtacgccaagatcaagcaaaacccgctggcagaggccgaggtgctgtggatgcgccgaacgcctaccgacaacgcagcgcagtatctgttaagccgcgaccttcgtccggccttccgccagtggatcatcgagctggacgcctaccacgaggcgctgctccagaagcggagggagagcgattatgacgagtgagccgaaggtctaccagataccgcgcagtcaacagcgcaccttcaccctgaagctatgggccgggcagaacaagctgtgcccgctctgcggcaagcccatcgatatcagcgtgaagggcgaagcggtgatggaccacgaccacgaaacggggctggtgcggggcgtcctgcaccggtcctgtaacaccgcagaaggcaagataacgaatgcggcaggttcctggggatgcaagtcgatgaagtattccgacattatcccctaccttcgtgccctcctgacgtatctggaggggccgaagcatccgctgatctaccccctgcacaagaccgacgaggagaaacacgaagcgaagctggccaagcgccggcaggcagccgccaaacgcaaggcggcgatggccgtcgcaaagcacaacgcgaggaacgtatgagcaaactccgcaagcaattcaccaatgagtacctgcgaaacgtctatgtcgagctgggtctcaagaagggcgccgagcatctgaccaggcattcgcgcttcggcgaagtgagccgccagtgcttccgcaactggtgcatcaagctgggcttccacgacagcaggacacgcggcacgtacgccaagaagggcgctctgcactggctgggccgaaaggccgccgaggtagtgcgcaagttccctggcgccgtgggcaacgtggtcggccagggtccgaaggtactgagcctggacatcgagacctcgcctatcgagggttgggtctggtcgctctggaagcagaacgttggcctcaaccagatcaagcgggactggaccatcctgtcgttctgcgcgaagtggatgcacagcgacgaggtgatctacatggactgccagggtgatcccttggacgatatgcacctgctggtcgccctgcataagctgctggacgaagccgacatcatcatcgtccagaacggcaagcgcttcgacgtgcctaagatcaacgcccggttcttcctgaacaagatgccgccgccacgaccgttcaaggtgatcgataccttgatcatcgccaagcagcaattcgcgttcaccagccgcaagctggagtacatgacccacaaggcatgcaccatcaagaagcgcctccacggcaagttccccggattcgacctgtgggcagcctgcctccaggacaacccggaagcctgggaggagatgcgcctgtacaacatcgacgacgtacgatcgatggaggagctgtacatcctgatgcgcccgtggttcgtcggccatcccaacgtggccgtgtacttcaatgacgccgagccgaccatccgatgcccgaagtgtggcgacacggatgtcaagcaagaaggctgggtgcatacgcagaccggcaagtacgagcactatcactgcggcggctgcggtggctggagccgagggcggtacacccgcaacacctcggaacagcgcaaggccctgctgagcaactaaggaggtagcatgagcctagcattcccggactcttacgggccgacgatcacgactgaaacgtaccgcaaaggtgcgagtctggaagaacgcaaggttggcaagcttcccatgcacctggtagtcgaggggttcccgctgctgaagcgggagcttgctcgaatgatgcaatgggctgccgaggtcaaggggtatctgccgcacgactggaagaagatgacggtgggtgagttcaagtccgcccaacacaggcacgagtccaagcggctgatcgacgggccgctggatgacgagtccaacctgatgcacctggtgcatgaggcattcaacgcaatggccgccgccgagcgtgccctgatggaccgggagaaaggcaatgagtaaaatctgttggtgtacccgaccgcacgagaccgatgaaggtgtccgtgtcatctgggccttcaacgagcggggcatcggggtaaactacgtcacggcgtacatcacgccggcgatgatccaccacccggactggagcgatgccatcctcccggacatcctccaggagatggcggagcgcctggaccgagaggttaagctggtggaattgcgctggttccgcgctgagattctgagctgcggggaatggcgcgactaccgagcaatgacgctggacggggcggttagcctggccgaggccgagtggggtcccgaggatatcgggcgtgtaatcgaaagacgataggagacggaatggacctgatacagcagcagatcgcccacgaagaggcccttgtcggggcggcgcagaacgacgcccgcattgccttggaaaaggcgattgcccaagggtccatcgaccgcatcccgagggcacgcatcatgctgatgcggatgctccccatcgtgaccgaagcgatcttcgcccaccaggaagcgaaggcggcggggccggcagcaaagctgcggcacctgctgaggatcatcgacgcccaggacctcgcagtcatggcgctgcgggccgggctgtcgatgctcatcaactacccaacgatcaccgcgacgaagtattacacccatatgggcaagatgctctgtcgcgagatcgaagtgcggttggccttcaaggtcaaccaaccctattacgaccggacgctggactacctcaagaccagcaggactcgcagcgtccggcacatccagaagacgatggacgctcttctggacgcggtactgccggaagaggcacgtatcgacctgccggatggcgactacctgcgcctcggcaagttcatcggcgacccgctgatccaatgcggcctgttcgagccgaaccgcttcacagggcggggcggtacgagcgtccacctggagccgtcgccggaggccaaggagttcctgcaagacccttcggcggcgatgacctggggaggcccaggccgtagcgtgatgctggcgccgcctcgaccctggaacgactggtgcgatggcgggtactacagcaccaaggcacagaagcaccatgtgttggtacggcgcaccaagcaccagaccaagcgggcacgccagatgcagctccgccacctgggccgggacaagatgcccaaggtgtacgaggcggtcaacgcgctgcaatcggtggcctacgagatcaaccacgacgtgtacgagatcatcgagcgcgtcttcacttccggcggcggcgtgcttggcatcccgcagcgcacctacccggagaaacctgagttcccgctcggcgacgagtgggccaaggagaacgccagtgaacaagagctggaagccttcaaccgatggaagcgatccgtccaccgatggtacaccggagagcgggagcataccgccaagcttcgcgagtttgctgcactctaccgagttgttcgagagcatcatggcaaggcagtgtacttcccgatgcacgttgactcccgtggccgcatgtactattggggcacaccgaatccccaagggtccgacatcgccaaggcatgccttcagttccacgaaaagcgcgccctcggcaagcgcggcctgtactggctcaaggtccacgtcgccaactccctcggatgtgacaaggtgtacttcgacgaccgggcagcctgggtcgatgagcgatgggacgacttccagcgggcactcgacgaaggcccggagaactatccgagtctcttcccggaagacgagtcgcccctgtgcgccatcgcaggtctgctggagctgcgggcggcctacgcatcaggccagccggaggcttaccgaagtgggttcatcgtccacatggatgcaacctgctccggcctccagcactactcagccattctccgagacgagatcggcggagcctacgtcaacctgttgccacctggacttgccaaagctgacatctactcccgagttctcggtctcgttgcagagtctctggcacgagacagagaaagtgctgaaggcgaggctcggggctacgctgtactgtgggataaggctggtctatcccgaagcctgacgaagaagccctgcatgacgctggtatacggcaccacgttcaagggcgtggtagaccactgcctggactacctggacgagtccggcctggagattcccgagggtatcccgtcataccgcctgggaagctacatggcaacgctcatactggacgcaatccgcgagacagtaccatcggcagtcttcgccatggaatggctccagcggctcgctaaggcccttccggacgcatccaaggatttgcactggatcacgccactcggcatgcaggtcttccagtcgtacccgaagaccgaggaggtgcgggttaggctgcgggcagaggctgtcgagtacgtcaccctgtacgaggccaaagatgagctggacccggtacgcaacgccaacggcatcgctccgaacttcgttcacgggctggacagcagccacctgggcctgacggccctggcctgtgcggcagagggtatcccgatacaggccatccacgacagcatgggcacctatgcggcagacgtggatcggatgcacgtccacatccgggagcagttcatcgccatgtacagtggcccctgtgtgctcgtagagctggcaaaacagcttgggatagaggctaccccgcccaagagaggatcgttgaatctggaggctgtacgggactcctgggcgttcttctgctgaggtggattatgtcacccacataggagcaagtgcatccgtccaaggccctcgtagagggagcagggagagagaggggtcagggaagaccagagggtagaagaagagtagagggagagtagaagatgagactagatgactacgaaggattctagatagagtagactaaccaacgtaggagatatgatagatggctactatgaagacccaccgccctatggttatgtcacccacagtggaaggatcgagaacaggcaagggtacggcccgccctgtcacgttcacctctcagcagatcgagtggttagaacagaccttccccgaacatcagatcggccctggaaccactatggaagacatccagttccaggccggtaggcgagacgtggtgcgagcagtgcgcctgcgccgacgcgatgccatcgcagtggagctgaagtgatgaacaagtccatctggcgagtccacgcaaaggccggcactccctcggaactccagggcctgtgctggctggcaatacaggagttggaggagttcaccctcttccgctcgaaagacgacgccctgaatacgatgctggacagtatcgagggcaatgatcgaaccgagctgttggtattccgcgatggccagttggccggcggtgcctgcattgtgttcgaggacgatccccacgtcggcccgtgcgtcacagcacagtggcagtacgtcctaccgcgctaccgcaatacaggcgtggtccgggagttcatccgcgaactccaccgtcaggccggctggggtcaaatccccctcgtgtgctggagccatcgtgaaagcgatagccggtacacgatccactaccggagagccaagccttatgggcaagaaagtcaagaaggtgctaggcaagaccatcatcggcaaactcgctgatggcctgctgggcaccgatctgagcggcgcacaatctgatgcccgcaagatggaagagcagaaccgcctcatgcagcagcaggcggaccagctcgcacgaaaccagcaggttgacctcaccgccgagaacgtggcgcaggttgacctaggagcgatggccgatgccactggcaccggcacgcgacggcgccggaatcaggcgggcacaggcgtatcgcaaaccctcggtatcaactactgacgaggtacgccatgaaaaccaccgcagctatgctgtgggagaaacttcgggatgggagcgtggagagtcgagccatcgagttcgccaagaccacgctgccctacctgatggtcgatcccatgtccggcagccggggagtcgtagagcatgacttccagtccgccggtgccctcctggtgaacaacctcgccgccaagctggccaggtctctgttccccacgggcatcccgttcttccgatccgaactcaccgacgcgattcgccgcgaggccgacagccgggacactgacatcaccgaagtgaccgctgccctggctcgggtggatcgcaaagcaacacagcgcctgttccagaatgcctccctggcagttctgacgcaggtgatcaagctgctgatcgtgactggcaacgccctgctttaccgcgacagcgccgctgccaccgtggttgcatggtcgctccgctcctatgcggtgcgccgcgatgcgactggccggtggatggatatcgtcctaaagcagcgctacaagtccaaggacctggacgaggagtacaagcaggacctgatgcgcgcaggtcgcaacctgtccggttcgggtagcgttgacctgtacacccacgtacagcgcaagaagggcacggcgatggaatacgccgagctgtaccacgagatcgacggcgtgcgtgtgggcaaggaaggccgatggcctatccacctgtgcccgtacatcgtgccgacctggaacctcgcccctggcgagcactacggtcgcggccacgtcgaggactacatcggtgacttcgccaagctgtccctgctgagtgagaaactcggcctgtacgagctggagtcgctggaggtcctgaacctcgtggacgaggccaagggtgcggtagtcgatgactaccaagacgccgagatgggcgactacgtgccaggtggtgcggaagccgtccgtgcgtacgagcgtggcgactacaacaagatggctgctatccagcagagcttgcaagccgtagtcgtccgactgaaccaggcgttcatgtacggtgccaaccagcgagacgccgagcgcgtcactgccgaggaagtccgcatcactgcggaggaggcggagaacacgctgggtggcacatactcgctcttggccgagaaccttcagtcgccgttggcgtacgtctgcctgtccgaggtggacgatgcgctcctccagggcttgatcaccaagcagcacaagccggctatcgagacgggccttcccgccctgtcccggtccgctgctgtgcagagcatgctcaacgcttcccaggtcattgctggcctggccccgattgctcagctcgatccacgcatctcgctaccgaagatgatggacacgatttgggcagccttcagcgtcgatacctcgcagttctacaagagcgaggcagagctacaggccgaggcagagcagcagcgccagcaggccgcacaggctcaggcagcccaggagaccttgctggaaggcgcttccgatatgaccaacgcactcgcaggagtctgatagatgtctcaacagaacgaacagcaactgccgccgggcctcgctaacctggttgccaacgtaccgccggctgccgcgccgaccccgagtcatgtgcaggtgatgccgaatccggtgatccagccgcaggccccggtccaacccggccaggtgggttcgccgcagcaactggccatcccgacccagcagccgcaacccgttccgaccagcgccatgacgccccactaccagccggtagcggtgcccgtcgccggtcaacccgttgttccgcaagcacccgctcagccggccccggtagctccgccggctgcgggtgcagttcttcccgagaacctggaagtcccgccgccgccggccttcactcccaacggggagatcgtaggcaccctggcagggaacctcgaaggcgacccgcagttggcgccctctatcagctatctggaagcattctctgacaagctggataccgtccgtgccttcggcaaggccgccgagaaccgcgatccgcgattcatcgacgagcactatctgaaggaaatcctgggtccggcccaggcacagcacgtcatcaacgtggccaagggcgtcctgacttacgtcgatgcgcagaccaaggccgtcctgaatcagacctatgccgccgtcggtggtgaggccgtcctgaagcaggctgccggcgtcttcaaccaacacgctgacccggccaccaaggccgccatcggtcggctgatggactcgggcgatgcccaggccatgcagtacgcagcgaagcagatcatcgctttcgcacaaggctccggcgccgttgtacaggctaccggccaacccctgggtgctgcggcacctgcactcgcagccctgaccgctgagcagtaccgcgcagaggtatcaaagctgccgctgaacgcatccgaagccgacatggctgcgctgcgcgagcgccgtaaggcaggtatggcgcagggtatctaacgaccctgccctactccggccttaaactcacatccaaaagagagagaatcgcatgagctttctgaacgacctgactcgtccgaactacgctggcaagaacgcggacgttgacatccacctggaagagcacctcggcatcgtcgacaagcacttcgcctacacctccaagttcgcaccgctgatgaacatccgcgacctgcgtggctcgaacgtggtccgcctggatcgcctgggcaacgtcgaggccaagggccgccgtgccggcgaagagctggagcgcagccgagtcgtgaacgacaagtggaacctgaccgttgacaccctgctgtacctccgccaccagttcgaccaccaggacgagtggacccaatccttcgacatgcgcaaggaagtcgccgagctggacggccaggaactggcccgtaagttcgaccaggcgtgcctgatccaggtgatcaaggctgccgcgatggacgccccggtggacctggaagacgcgttctcgccgggcgtgctggagaaactggacctgaccggcctgaccgccaagcaggctgccgacaagatcgtccgtatgcaccgccgcgtagtcgagaccttcatcgaccgcgacctgggcgatgcggtctactccgagggcctgaccccgatgtcgccgcgtgtgttcagcctgctgctggagcacgacaagctgatgaacgtcgagtaccaggcaaccggcgcgaccaacgactacgtgaagtcccgcgtggccatcctcaacggcgtcaaggtgctggagactccgcgcttcgccaccaaggcaatcgcagcccacccgctgggccgtcacttcaacgtgagcgccgaggagtccgagcgccagatcgccctgttcctcccgagcaagaccctgatcaccgcccaagtggcgccggtccaggccaagctgtgggaagacaacgagaaattctcgtgggtcctggataccttccagatgtacaacatcggtgcccgtcgtccggacaccgctggtgccatcgagctgaagggtatcggcgccttcgacatcaccgcgtgatgccacgaaaccccgcacttcggtgtggggtttcttcaaagcctaacgacccgcgcagattccctgcgtgggtttttgcgctttaggagaaaccctatgctactactcgacgcagtgaatgtcatcctgcgcaagatcggcgagctgccgatcccgagcatggatgaaacgtacccaactatggccattgccctcccggagctggaggaccagcgcatccagttgctgacgcaaggctggtggttcaacacctggtggaagcacaagctgacacctgacccacagggtcgcatcaacctacccaaggataccttggcattctacccggactccccggacctccagtgggacggccagggagtgcgagacgccaacaccggcgacgaccgcatcggtaagccggtcgagggtcggctggtactgtccagggagtgggaccgtatcccggagatcgcacagcgcgtcattgcgcaccaggccgcactcgcggtgtacacccacgagattggcccggacgagaccgcccagggcatcgcccaggaattgcaggcgtatcagaacgaactgtcccgcatgcacacccgatcccgtccgctgaacacccaggccaagcgtagcttcagccggtggcggcgcagcttgaggacctgagcaatgagctacaagcaatccgcgtatcccaatctgctgatgggtgtgagccagcaggtgccattcgagcgcctgcccggccagctcagtgagcagatcaacatggtatccgaccccgtgtcaggactgcgccgccgtagcggtatcgagctgatggctcacctgctgcataccgaccagccctggccgaggccgttcctctaccacacaaacctcggtggccgtagcattgcgatgctggtagctcagcaccgtggcgagctgtacctgttcgacgagcgggatggccgcctgctgatgggtcagcccctggtgcatgactacctcaaggccgacgattaccggcagctacgggccgccacggtggctgacgacctgttcatcgccaacctgagcgtgaagcccgaggctgaccgcaccgatgtcaagggcgtggaccccaacaaggccggctggctgtacatcaaggcggggcagtattcgaaggcattctccatgaccatcaagatcaaggacaacgccaccggcaccacctacagccacacggccacctacgtgacgccggacaacgccagcagtaaccccaaccttgccgaggcgccgttccagacgagcgtgggctacatcgcgtggcagctctacggcaaattcttcggtgcgccggaatacaccctgcccaactccacgaagaagtacccgaaggtggacccggacgccaacgcggcgaccatcgccggctacctcaaccaacgtggagtgcaggacgggtacatcgcattccgtggcgacgccgacatccacgtcgaagtgtccacggacatgggcaacaactacggcatcgcgtcaggcggtatgagcctcaacgccacggcggacctgccggccttgctgccgggcgcgggtactcctggcgtaggcgtacagttcatggacggcgcggtcatggccaccggctccaccaaggccccggtgtacttcgagtgggattccgctaaccgccgctgggcagagcgggccgcctacggcaccgattgggtcctgaagaagatgcccttagccttgcgctgggacgaggccaccgacacctacagcttgaacgagctggactacgaccggcgcggctccggcgacgaggacacgaaccccacgttcaacttcgtcacccgaggcatcaccggcatgacgaccttccagggtcgcctcgttctcctgtcgcaggagtacgtctgcatgtcggccagcaacaatccgcaccgctggttcaagaagtcggcagccgcgctgaacgacgacgaccctatcgagatcgccgcccagggcagcttgaccgagccgtacgagcatgcggtcaccttcaacaaggacttgatcgtcttcgccaagaagtaccaggccgtggtcccaggtggcggcatcgtgactccccgaacggcagtcatcagcatcaccacgcagtacgacctcgacaccagggcggcgcctgccgtgactggccgcagtgtgtacttcgccgccgaacgtgccctgggcttcatgggcctccacgagatggccccgtcgccgtccacggacagccactacgtcgccgaggacgttaccagccacatcccgagctacatgcctgggcctgctgagtacatccaggctgcggcctccagcggctacctggtgttcggcaccagcacggcggacgagatgatctgccaccagtacctctggcagggcaacgagaaagtccagaacgccttccaccgctggacgctgcggcatcagatcatcggcgcgtacttcaccggcgacaacctgatggtcctgatccagaagggccaggagatcgccctgggccggatgcacctgaacagcctgccagcccgtgagggtctgcaatatccgaagtacgactattggcgccgtatcgaggcgaccgtcgagggcgagttggaactgaccaagcagcattgggacctgatcaaggacgcccctgccgtgtaccagctccagcctgtagccggggcctacatggagcgctaccaactcggcgtgaagcgcgagacgaatacgaaggtgttcctcgacgtgcccgaggctgtagtcggttcggtgtacgtggtcggctgtgagttctggtccaaggtggagttcactccgccggtgctccgggaccacaatgggctgcccatgaccgcgacccgcgcagtgctccaccggtacagcgtgaacttcggatggactggcgagttcctgtggcgcatcagcgacacggcccggcctaaccagccgtggtatgacacgacgccgctgcggctgttcagtcggcaactcaacgccggcgagccgctggtggatagcgccgtagtgccgctgccggccagggtggacatggccacgtccaagttcgagttgagctgccatagtccgtacgacatgaacgtccgggctgtcgagtacaacttcaagtccaaccaaatctaccggagggtgtgatggctttctggctaccactattggccgctggcggcatgtcagcccttcagcagggaatggccaacaaggaagagcgcaagaagatcaaggctgagaacaaggctcgactgaaggcggacctcgacaacctgggcgccgctgcccgcgacatcgccaacctgggcgtcatggccgctagctaccgcaagcaggctgtggcctcgcaggtggaggccaagcgccaggggatgctcgccggcggcagtgccgaggctcaggccggcgcgttcggcgtcaagggtgcatccgtggatgcggtggccctggacatcgagcgcgaggtcggggaggccctgatccagattgacgacaacctggacaatcagatgtggaacctcgccgagcaggcgcactccatccaggctcaggcgaaggccggcctgctggggcagaagagtaccacggcggggcaacggtccccgctggtggccggcctgatgtcggcgggttccctgtacgcaagtcaatacttcaagttcggcgccacgcctaaaggaggcaactgatggcggaatcgcaacgtgcttcccaagagcttgggatcaacgtcggacagacgcaactccagccgggccagagtgcccggcgaggggtgcgcgactccgaagtcaactacagcgggccgagtgtaggctcacagattctcgacggcatcctgggtgccggtcagcagatcgctggcaagtggttcgagcacaacgtgcagcaagaggtgctgcgcggcgagcgtgcccgtatggcgggcgaggccgaggaggccgtcgatagcaacatcctggccaagcccttcgtgaagggcggctggcgcaagcaggactaccgtatcgctcaggccgacttcagcctcaagatgcagcagttcatcgccaacaagggccgggagatgactcccgaggagttccgcaagtacctgtcccaggaggctacacacgtcctggactcgaccgagggcatgaaccccaacgatgctctacaggcgctggcgcagcagcagaaggccgaggagcagctattcggtatgcaggccaaggcgtacatggactggtccatcgaccaggccgcccgaggcttccgcacccaaggtaacagcatcctggccaaggctgtgcaggctcaggccaccggcgacgaactgtcccgccagctcagcttggaagaggccggcctgttctacacgaacatcatgacctccgaggatatcccgctggaggtgcgtgacaaggtaggcatgcagttcctggcggccagcctggacatgaaccagcggggcatctacgagagcctgcgcgatgccggcttcctggacagcatgtccttcgacgaccggcgcgccctcaacggcctctatgagaagtcgaaggcgcagacccgtgccaaggagtcgatggctaccctacgggccgatgcggacttccagcagcgggtcgccaacggcgccatcacggatcttgccgaggtcgaggcgtactcgcggggcatggtcgaggaaggccgctggagcgacgcacaggccatctcgttcatgaccaaggccatgaccggcctgggcaacgcgcagcgcatgcaaggcatcatggcggccctggaggccggggacatcaacgctctgcacacgctgggtacgaacgtctccgaggccctggagcagtgggacaagatgcaggcggccaacggctcaagcctgaccgatcgactcgtgcagggcacgcagctcggcctgcgcctggggaccttccccaagacctacggcgagtccgtgggcagcgccgtgcggatgatccaggcggccaaagaaggcgaggcgaaccctgagctggtcaacacgctgaacagcatcttcgaacaggtggcagcggctcaggagatcaacccctccgccggcaacgtgatgctatccggcatcccggaggccgagcagggtgccgtggcctgggcactcaagcagatgaagatgggcatcgccccagctcaagcactgcgcgagttcagtgccaacgccgaagtcgtgaagcagatggacgagttcgagaaaggccagaacaccaaggcgttcaaggacaacctcggtaagcaggtcaacgacaagttcgtgaacaacatcttcggtcgggcctggaacatgctgaccggtgagagcgacctgagcaacaacgaggccgtcctcagcatgtaccgccgagcgaccatcgacgaggcgaactggctggccagcgaccgcaagcacgccgggctactcaccagcgacacgggccgcgaagccctgctggagatcgccgccgccaacgtgcgcaaccgcaccatccaggtgggcgagggccgcaacctgaaggaaggggacctgttcagccgccgcgacagcgcgccgctgatcctgcctcgcgggaccactgccgagcagctattcgggaccaacgataccgagaccatcgggaccgtcctggccgagcagcacaagcctcgcgtggagggcctcctgggctacaagtcggccgtcgccttcgaatacgaccgcaccagcggtagactcctcgccgtcgagtacgacgagaacggcgtggccctggaccgcacacgggtcgatccccaggcagtcggcaacgaggtgctcaagcgcaactcggacaagctgaatgcgatgcggggtgccgagtacggtgccaacgtcaaggtcagcggcacggacattcgcatgaacggtggtaacagcgccggcatgctgaagcaggacgtgttcaactggcgtaaggaactggctcagttcgaagcctaccgaggagaggcgtacaaggatgccgatggttatagcgtgggcctggggcattacctgggcagtggcaatgctggggcaggtactacagtcacgcctgagcaggccgcgcagtggttcgccgaggacaccgaccgcgcactcgaccagggtgtgaggttggccgacgagctgggcgttacgaacaatgcctctatcctgggcttggccggtatggccttccagatgggcgaggggcgtgcccggcagttccgtaacaccttccaggcgatcaaggatcgtaacaaggaagccttcgaggctggcgtacggaacagcaaatggtacacgcagacgcccaatcgggctgaggcattcatcaagcgcatggcgccccacttcgacactccgagccagatcggggtcgattggtacagcgccgcaacagcggagtaagacatggcacagcaattcaagggccgcatgacgcccaagtatcccctagaccaagcacagctcgacgaggcccaagtacagggccaactcgacgccgtgcctaccgtggggttcgacgccctgacgggtggcgagatcggagaacggaacgtggcagcgggccaacgagccaatgcgcgggaactggaacgcatcgtagcggaccaggaactgccggcccttgaccgtgcttccgcactctggaaccagtccaccctcgtcggacgctggggcgatgcgctccagctcgacgcggacctggcggcgaacagcaccggcgaggtggaccctaacttcgacgccgggacctacggggtccaggcgctccaggcggcgggtatccagccgactgacaactacctccagatcatggcccgtgccggcaatgccgaggacgcggcctacctcctgtcgaggattcaacggtatgagcaggacgagcaaatcgtgcgggacaacccgtactggaacttcgcggctggcatgcttgaccctgctgccctggcagttgatgcggttactttcggcgctggccgtgctctgcggctcgggcgtgctggcatggctgctgctggcggcgctgggcaagtcgggtatgttgctgggctggatgccgcaggggccgacgtggatgccggaacctacatcgtgtcgggtgctcttggcgctggcgtgggtgctctgctggggtctggtgcgggacgcattgccgcagaggccccgacgcagccgcatgtgcccgaagtatcggcgcctactgtcgggctgccagaagtagcgatgaccgccgaggaggccgcagcacgcggcttcaaggccggtgacgtggtagacctgctggacgagggcactgtgctgtcccgtgtcagctcccgtgtggagcaggccgagataccggctatcccacgacgcgacactgccttcggcgacgagctgcacagcctgtcgggccggaagctgtccgaggtcctggaccacctcaagacccacgcagaggtgcccaagccgctccagggcatcgccgccaaggtggccgataccatcaggaccctggagggcctggggcagcgcaccgcgttccgcgtggtgcagggcggcgacaccgccagctccgcattcctcaagccgggtacggcggggattcactccacccagggcctcgataccctggtgcaggtgcgtggcagcaccgcgcccggacgagtcggcaccaacccggtgaccgtgctccacgaggcggtccacgctgccaccgtaggcgtgatgaacgctgccctgcgcaaccccggtgcgatgagtccgaaggtggctcaggccatgcagaccctggagaacgtccggggtaacgtgctcaacgctctgaagcaggaccgcgccgccggtcggcaactgtccgagttcgaggagacgctgctggccggtaactccaacaccctggccaacgtcaaggaactggtggcctggggcctgacggatacccgcttccaacggaccttgaaccgcttgcgctacagcgacggtgggccgggcctgtggtcccgcttcgtggaaggcatccgcaccctgctgggcctgcggtctgatgccgacacggccttgagccgcgtcctggccgcctctgagacgattatggaggccatgccgggctacacgaaggcgcaggctaagtgggccaacaagggcgctccagtgaccgaggaggccagcctggagaccatcgtccggtccaccagggaccgtgcccgtgagggtgccggcttcgtgaaccggttcttcagcgaggcggacctcctggcccagcctggagagggcgcacggcgcctcctgagccgtcttatcgacgaccctgtacgtcgggatggattcagcacgaacgacaacgcagcgagctatctgcgccgttaccggaacgagttcgaaggttacgtgaagtcctacgacgagatgatggccaaagcgatggctgagcagggcgtgggcctgacggcacgggcactgaactcccgccgcgccatggcagtccgggaccagcttaacgagcaggtcacccgcgagctactgcgccgggaccgggagtggaccgcctacggcagcgtccgtgtagacccgaacctgccgccgaccatcaaggccctagccgaccgctcagacgagattcatggtctgatgggtcagcgtgccagggaagccggcgtccgtggcttcgaggacttcgcaccgcgaccgggatacttccaccgctcgtggaactggtcgaagatggcgcagatggacgaggccgcccctggcctggcccgccgcgccatcagcgaggccgtgttccgtggcatccctgggctggagcgcgccgacgccgataccatcgcacaggccattgtgcagcgggcgcgggatcgggccaccggcatccgatccgagttcatgggagcgatgggcgtggcggacacggcattcatccggcaagcgctggaggaggccaacgtgtcccaggccaagttcgacagcatcatggccaagatcgagcagaagcagtccgaccagggcaccgtcaagtacggcaagggccggctgtcgctggacatgaccgccgagatcaaccacaacggcaccgtgtatcgggtgcaggacctgatcgaccgagacctggaccggctgatggagaactacgccggcagtatgtcgggccgctcagcattggcccgcgcaggcatgccgggggactcggagatcgaagccttcatccgggagtaccagcgagaggcagcccacctgggcaccgataaggtgcaggagctgacggggcaactgcggggagtcttcggggacttcaccggcaacgtgccgagggagcatcagctcggcccggttgctcagcgggccagcggactgaccagcgccaccatgctgggattctcaggcgtgtatcagctcgccgagctggccacgatggcgcaccgccaaggcgtcttcaacgtcatgaaggccatgctgaactcccgcctgggagacttcgtgggcgccatgcgtcgcgacccggacctcgctgacgagatgcagaccgtcctcggcctgaacctcgccaacgatatccggatgaagccctggaagcggcagttcgacaccttcctggccagccaagacaccttcatagatcgcttcctccacgcaggtaagcaggctgtcccggtgctcaacggcatgaagttcatccacaactggcaatcccgcatgaacgccaacctcaccttgaacaaggtggcgcgggcggcgcagggggatgaggcggcccttcgagtgctccagcagtacgggaaggacgtggactggacgccagtattggcgcgggttcgcggttatgtcacatacagaggaaggaacgcccaatccatgaattggggcgcctggagccaagcagacgtgaacaccgtcatgaacaccgcactgcggatcatggacgactcactcctgtacggcagggtcggtcagaactcgggcttcgctcggtctccggtcggtcaaatcctgggtcagttccgcagctttgtggccttcgcacacaacaagctactccggggaacctacgagaactccggcgtgcttggcgtggcctcgctcctcgcattccagtatccgctcaccgcgctgatgatgggtgccaaggcagcgatcaacggcaagttcgacacctctgacgaaggcatccgcaagatggccatcgacggcatcggttacactgccggcctcggcttcaccgctgatatgtggggcgtgatcaccgggcactcccggatgtccgccccggtcttcggactggcggagcactccaacgaggtgttccgtggcgtcaaggacctagtaaccggcgacgaccccgcagcagccactggcgatatcgtcaacggcgccgcaggggcactgcctttcgtcaacgtattcccggcgaccaagttgctgctggaatccatcaaaggggaataacgtggctcggttcaagaatcccgagaccatccacgttgcagatggggtcgaggctgtcttcagtctcgacttcccgttcctgcggcgtgaggacgtattcgtccaggtcgataagatactcgtcaccgactatacgtgggtggacgacaccaacatccaattggccgtggtgccgaagaaggaccaagaggtccgcatcttccgcgacacgcccgcccaggtcccggacacacagttcagccagggcatcccgttcctgcctcgatacatcgacgcgaacaacaagcagctcctgtacgccgtgcaggagggcatcaacaccgcgaacctcgctctcgacggcgtactcgacgcgatccgtatcgcggaggaagcccgtcgcctggcacaggaagcactcgacgccgccaatgaggcgctgcgccgtgccctgggcttcgccgagattcgcaccgtgaccgaggactcggacatcgatccgagctggcgtggctactggaaccgctgcatcaccgccgacaagcccctgaccttgaccatgcagatggaagacccggatgcaccgtgggtcgagttcagcgaggttcacttcgagcaggccggtgtgcgcgacctgaacatcgtagccggtccgggcgttaccatcaaccgtttgcagaacaccaccatgcagctctacggcgagaatggcgtgtgtaccctcaagcggctgggcgctaaccactggatcgtgttcggagccatggaggacgaataatgcgcggcattatcgcgggcatcatggcctcccaaattcgacggcccaagcccatcctggcgacctacccgtatcccattctggctacggacgacgcatgggctactaagcctaacatagtggcggcgctgacacgcgacactttgcacgaggttgtgaaccagccaggagaggacacctaccacgcaacctccagtgtggtcaatgtgctgcttcggtcgctgactcagctcggctacgggggtggcgacgggttcctgaccgcacctgccgtccatgcagccctactgcgcgatacggttaagagttacaccgcagagccttacgccttcttgtcgcagaccgcagtggccggcgcagagcttaaggttgtggtcgtctactctgagtacatcgtggagccgtacgccttcgccacttcgacagcaattaaacaggcggaactgaccaatgtttgagacacgtgttaagggtcgctacaccgtgacccatctgaaagccacgggtgaagtcctggcacagtacaccttcgacaacctcatcactaacgcgggccttgactggatttgcgccatggatacctcggacctgttctcacaggccctggccgtgagcaccagtacggcagaccctaaccccgccgcaccttccctgcccgaagaagtccggcgaaccacttcctatgccccgaacggggacgtaacctcgggtctggacggggagtggatttactggcacaagcggtggcgcttcccgataggcactcttaccgggcaggtactggccaccgtgggtattgtggcccaatccgaggtcgggttcgagagtaacactggcgcgaagattccggcagggactccgctatcctacacccggatcaaggatgccgccggccaacctaccaccttggtagttcaggccgacgagattctcgacgtacagtatgagctgcgcagcaaggccgtggcgatggccgaggccaagttcgtgatctccggggtcgagcgcaccatccgacttactccgctgcccttcgcgaaccgtcgtaacctctacggcgagcgctacatccgctacaacgagagtccgcggatcgacggcaagaatgcgtcgggtgcggatgtccaagacggccaatgggtgaagctgtacccgcgatatactcgcggcacctacaagggccagcttatgctacgggccaccgtagataacggcaacatgccggggggtatcaccgggtgtaaggacctgaagatttacaacggtcggaactacgcactcaccatcgaccctcctgtagtcaagaacaacactcaggagttctccattacgatggagttctcggtggcgagggcataacccatggcactgatctacgacttcaacccagacctcgatccgaaggctaagtccaagttcgtaggtgcgcgaggccgtagggacatcagcgatgtgctggacttctgcgacgggggcgtggccatccaggacccatcgcagggtatgatggtccgagtgtggcgaacagagcttcgccaggacgggacctacctggggcacgaggacggctcaaacgagattcgcatcggtggcggtatcgctgacggtatctccacgatgtcgctcgacttcgacagcaacatgaactatgtgtgtgctttcgtacgggctgatcgtaccggtgcaatctcctacttcaacgtgcagcagggtcgccggctcctcgtagagctaggtcaggttgactatgccaaggtggccttggacgacaaacgtccaggggctaccgcctgggcgcaggtcatcgtaccctacacccgtaacggcaacctgtacgttcgcacacagaacgagaactatacggaagagcacctggaggtagataccggcaaggtattccgcccgctggtcaaatgcggtatgggcaccaacctccgcttccaagtccaattcagagggcatatgtaatgagcaaaaagcagaccgcgagtgctgagcggctgggcctgcttcacgagctggtctgcaccgctatcgagcgcaacttcaagtggtacatggacaacgacatcccgatccccgcgtcggatatcgccgccgccaccaagttcctcaaggacaacgagatcacctgtgatccgtccgacacgatcaacatcgaccgtctccgcgaggagatgcggcaggcgcaggccgagaaccgccgtatcgcgctggagggcttcatcgccggtgagaccgacgacgagatggaacgtctgtacactcactaaggaggcagcatgacgccgcaagaacgattccagatagcccacgaagtgcgggacatgtacccgcgcttccgggacttctgcctggacgccatgctgttcctcggcttcaagatgacgtggatgcagctcgacatcgccgacttcatgcaggactcgcccaataaggcgatggtcgctgcacagcgtggcgaagccaagtccaccatcgcctgtatctacgtggtctggtgcatcactcagaacccggctacccgcgccatgctggtatccggctccggtgacaaggccgaggagaacggccagttgatcacgaagctgatcatgcactgggacctgctggcatacctacgccccgaggcccgcatgggtgaccgtacctcggccaccagcttcgacgtgaactgggcgttgaagggcgtcgagaaatcggcctctatcaactgcatcgggatcaccgctgccctccagggctaccgggctgatatcctgattcctgacgacatcgagaccacgaagaacggcctcaccgccaccgagcgggccaagctgacgcggcagtcgcaggagttcacctctatctgtacccacggtaagattctctacctgggcacgccgcagtcccgtgagtcgatctacaacggtctgccggcgcggggcttcctgatgcgcatctggccgggccgcttcccgaccctggatgagcaggaacgctacggtgactggctcgcaccttccatcctggcgcgcattgcccgcctggaggagaaaggccacaacccgcgcaccggcaagggcctggatgggacccgtggctgggctgctgatccgcagcgctacaacgaagaggacctgctcgacaaggagctcgaccaaggccccgagggcttccagcttcagtacatgctggacaccagcctcgccgacgagcagcgtatgcagctcaagctgcgcgacctgctgttcatcgacgccacgcatgagagcgtgccggagcaagtggcctgggctgccgatgagcgcttcaagctcaagttcgacgcccaccgattcccggtcatcaaacctgagctgtacctgccggcgctgatggctggcggctgggcaccactccagcagatgacgatgttcgtggaccctgccggcgacggtggcgacgagctgtcgtatgctgtgggcgggactcttggcccgtacatccacgtcgtgagcatcggcggctggaagggtggctttgccgaggagaacctggagaaatgtattgccctggctgcgcgttatggcgtcaaggtgatctatgtcgagaaaaacctcggcgctggtgcagttggccagctcttccgcaaccacatgcgatccatcgacccggacaccaacaagccccgctatgaggggatcggcgtagaagaccgccagaagtccggacagaaagagcgtcgcatcatcgacaccctgcggcccatcatgcagcggcaccgtctgatcttccacgtatcggcgatggattccgaccacgtggcctgtcagcagtacccagcggacaagcgcaatgagcgctccgtgttccaccagattcacaacatcaccaccgaccaaggctcactgccgaaggacgaccggatcgatgcccttgagggccttgtccgcgagctagcacccacgctcgtgaaggacgacgaagccgctacccgcgctcgtgaagaggccgccaagaaggaatggctgaacaacccgatgggttacactaagtctgtccttcggtctctcggcatgggccgggagcgtcgcaagggccgcccaaaaggacgaagactatgatgctcgataccgccaccgaggcgggcaaaggcaccctcgccgtcaccggcgtggggatcgccgtttactcgccctatgagatcgccagcctctgtgctgcggtactcaccgcgctctacgtgggcgcccagctcatcaccctgctcccgaagatgctcgatagcatcgcggagcttcgccggaggttcaagaagtgaacaagcccctgcgcggcgcagcccttgcggctgccctcgccggccttgtcgccctggaaggtagcgagaccactgcctaccgagacatcgccggcgtacccaccatctgttctggcaccactgccggggtcaagatgggtgacaaagccacaccggagcagtgctaccagatgacgctcaaggactaccagcgcttcgagcgcatcgtcctggacgccatcaaggtgccgctgaacgtcaacgagcaaaccgccctgacgttcttctgctacaacgtgggtccagtctgtacaaccagcacagcgttcaagcgcttcaaccaaggccgcgccactgagggctgccaagccctggccatgtggaacaaggtcacgatcaacggccagaaggtcgtatccaagggcctcgtgaatcgccgcaacgcggagatcaaacaatgcctcgaaccatcgtcgcaatactcgtccttgctgtggtagccctgggagcctcgtacggcttcgtccagagctaccgggccttgggtatcgcccaggaggagatcaagcggcagacggcccgtgcggaggccctggaggtgcggtacgccaccttgcagcgccacgtcaaggaggtcgctgccaagaccaacacccagcgccaggaggtggaccgtgccctggaccagaaccgcccgtgggctgaccggcctgtgcctgctgctgtcgttgacagcctgtgcaaccgccccggcgcccgctgtgctgtgcgaacacccactgattgaccctaccacccaggctggcctaatccgcgctgtagcggcctatcaggacgccctggacctatgcaacgccctgaatcaaggagattgacatggcgaacacccgtgagcaatacctcgctggccgtaacaccagcctgaccttctaccaggtctgccagcccggcaccgacaaccgcatctccctgcacgacatggacgaggccgatgtcaaggccaaggccaccgctgtgatcgcagcagccaccgccctgggcggcgagggtggcgctactccaccggacccgctcaccgcctacaaggtgaagaacggtgacaccctgcccgtggacggcggtggttccgtgaaggtgaccgtagccaacggtgctatcaccaaggtcgtatacaccgcaccggcgggctgagctacagcccgtccaacctgactccatccatagcacaaggaactgaaccatggcaaccttcgccgctgcaactcagaaagacctccgcgccttcgccggcactatcgagaacctgatccgccctctggaagaagcggccctgggttcgggctacaacgccaccttcaaggaggtggagaaggacgatccggacaaccctggtcagaagatcaaggtgcaggtcatcgacaagcgcatcctgcgccccgaactcgtggctaacctcgacgccctgatggccgctgtcgagaccgccaaggccctcgtgttcaagtaaggagacaccatggataagcgctataccctgggcatctgccactactccgcagtggacaagcagacgcccgtcaccttccggtgcagctcgctggccgaggtggaagccatcaaggagcagtggactggcggcaagctcgcacagtaccactaccacctggtagaccattgggcgaacgggcacccggattgtccctgctgctgctctgagtagctcaagccgagcacctgcatagtcgggtgctccactggaactactggaatttttattgaggttggctggcgggctggtctgtggctggcatctggctgggagtagttactccgggtccaattttgatatcgtcgtgtgagaaccctcccgactctgatcagcccacccttcccccgtaggccctccgcctggtgggccatcgcctcgcattgcctgggtggtgctgcctgtcctcctgggagcttccggcttcgccggggtggcggtggcttccttgcccttcgccgcccattctacgcatcctgccgggagtgtcaacccttgggctatcgctgtcactctaccgggcttggccgtagtgcctggagcgctctatcgcctcctggtgcctggctacggctagcgctcggtctgcctctagggtcctggctacgcctgggtagtgcctggcatcttccctagcccacttggctagcctgcgctgccaagctgcctcgtgctggtgccaggctcgctcggctcggtcctgtctgctcagcatccttgtgcctcctgtggtggtctgcggtcctgtcgggtggtggtgcggga

SEQ ID NO: 7 - DNA, 65672 bp, Pbunavirus
  source 1..65672: mol_type = genomic DNA
aatcctaatagaaaaaatctatcacggacgttacctatctttaaaattaataaaattaatagtaatttggtaatttggtaaactttagtatttgaaagcctcgcggcactaagcttgtacatatcccgtcaagtttccgattccagccagctcgcggcagggtcgccggaaacttccggacttccaatccatgggtcgcggcaacaccacggcggactaagcggcaagtgccaaaactcgacgaacggaaccggaaatttgggagcgcgatagaatcgctcagctggacatatttctaacattcgatttaacactcaacccaaacactcaccaccaccatcgcccgccaccagccaatccgatcctcacccaccagcagaccgcccatataacatcctataacaccacctaacactcattcatcatcaaacccacccagacctacagcccacccacaagcagcccatagacgcgatccctggccccatagtacaatcgcgccatactcagtgtcgcgacagagcaccaggccccatccaccaaccgagccaccgcgacgactccagaatcgaactcagggacgcagcaccaaatgaccaaattctacagccccgacgatctagtcacgccacaggaattcgcagacccgcatttcgcggcgatcaaccaaaagcgattcgacctgtacatcgacctgcgcgtccaaggttacagctcctggcgggtcttccgggccatctggggcgaggagcatatggacggtcccgcgcaggcccgcatcttcgcgatggagtccaacccgtactatcgcaagcagttcaaggccaagttgaacgcgaccaaaacgtccgatttgtggaatccaaagacggcgctccacgaactcctccaaatggttcgtgaccccaccgtcaaggactccagccgtctgtcggccatcaaggaattgaacgttctggctgaaatcacgttcgtggacgagtcgggcaagacccggatcggtcgcggtttggccgatttctacgcatcagaagccgaggctcagaccgcgaccgtcgctgctgcggccgaagccaatggctatgttccggaaggcgaagagggcgatttcccgtccccgacgccggaaccgaccgaggaagatcgcgccaaccccatttagacataaaataacatcgttctaggcccgaatcggaccgaactaaggcgacggtagcgggaagggacgaaaaacgattctagggcggttctaggaagtcggagcctaaccctcagaaacgacaaagcccccggactctagctcagaatccgggggctttcttttgggcgccttattcgccagcttcgatgatttcgaagttgtatttgacgccttcgtgctcgaaagtcatcttgccagccgccttcagctgcatgcggaagcggatatgtttcgaagaaggcaggccgaactcgatgaatgctgcgttggtggaccggaactcgccgcgcttgcctttgacagtcacagccacgccatggcgctgagtgcgtttcttggaaacttccgggtctttccaggagttggcgatggctgccgacaggtctttggactctttggctttctccggagcgttcttggcctcttcgcgcatcttccggatttcttccagcgcttcctcttcggtgatctcttcttcaggcttcagattctcttcctcggccttctcttcttccttcttcttcttggaagtgcgggttttgtagactttggccggggcttcctcttcctgaaaggcttcttcctcggccggcagagcattcaggatggcgaggcagcgacgctcagcagtcttgcggtcagagaaacgcttgacggtcgcatcggcgttgtgagcgttgtagaaggcgaccagttctttcatttctgcgttctggatgtcgccgaaggttttgatggagttggtcattttgcgatcctctgttttggaagatttcgttcgggcttcggtttgtcgccccgttgaaagagattatgcctaggtcgatgctgcgtgtctacatttatttcatcagattgatcgcaaagccgacgaacggttgtctgatgtgaaaacaccgcagagcaggttgcggtgtttggtgggcgagggcgatggtcagaaagtcgggactgtgatcggctcgattggcgggtcgccgggcctgtcgttgtccgatgcgggcgccgggctggaagggatcgcacccgaccgaagcgccagcgattccgactgcctgcttacctgcggagctggaggcgcttttggcgcatgaggcgcgggcggaaccggcaggcctggaggagccatcggcgccctgggcggctccggaagatcgggcagatcaggaagactcggcgctatgccgccaaaggaccgctgcgaccgctgcgacggattgtcgccgaacatttcggcggatcggttgtccttgatgacttgacctatggcagtcttgtcgccacccggttctgctggatcgaagcccgtgaatggagtggtcacgcagcgcatgttcggatgggtcggcagattgttcaggacgatggagtccgcccagacatacgggtttttgtggttgccgggtccgtggctgatgatctcggcaggaatatggccgttcatggtgagccattccgccatcccttgccgagtcagcgggcttaccacgatctgaccagtggactcttcggcgacggcgaacagatcaccgagcttgaatccgatgatcatatagttggacctggactcgccgacgaaagccagagtttcgatgttgtggtggatatcttggtcttcccagatgtatagcatgatgtactcctcaataaggctgcttgttgtgctcgaccagagacataccggccggaactttgaagcggatgtactcgatcatcatcgccgtgcgacgccgattcgtgccagactcgtcattgacgaagagttcgcactgatgcggaatgactcgcgtcaccaggtcttcgcctttcgagccgtagaacttgatgtaggctgcgacgcctcgcgtcatgttcagatgaatcgtttcgcagagtcgctgcgcggccgacgcgctagacagatcggtcggactgaccgtcacccagtaatggccattttgttctttatcggacatcaactgccctccattgataaagccccctgccgatccgcagaggctggttgttgttagtcgcgcttcaacagaacgactttgtcatatgcgcgatatttaccgcgccagtcttcccagtgttcgccggccgggcagacaagctccagagtgatttcgtcgcgccagcattcgacggaaaggacaatcgccttgttcctggctgcggaatctgctctgagcttaatcagaatttcgtcgcccgttttcagttcatcgactcttaccactttggccatcatacactcctatgagaaggcgcggccaggacgatcccagccgcgccgatggattaacgtttgtgaaggatggacactgcgtccacgtcgaggatgctgatggtacggcgacggcgcggattgctgcgttcatggatgcgaatcaggtcagcggatggagcttcgtccaccacccatacatcttccggcttctgcgtccggagcaggaccgttacttctgtgttctgggcgaggccgttgcagatgaacaagaatttggacgagggagttctgtacatgtcgagattcctttttggacttcgggtccggcttttcagtcggtgaagagattatgcctgatcatcaccgtcgagtaaagcacttatggaccaattctccagttaaatggaaccacagcgcggtatcgctgatcgctacgctcccacgccatggcccttcttgcttacatacttcgaaccacaagctgatttccatccttgccaggactcggccgaaggattcgagccggcgccggctagccaggatgtcgacattcaaccgccgattgatttcgtatcggcgaccgtttatgacgaagaccagccgcagggtttgtccgtcaagacactcccagtatctggtttcatatcggagccaatagcgcttgccagccgggcctaccatggccatttaatcgatgctcctggccgcgccacgcggtccggtcggcgggacgggatcgaaccgacccaggatgtagtcgggccggcgcgcttcctgaggacacacggcgagaaggcgccatcctgcgtccagggcagactggagttcgtccgtgcagcagtcttccttgagcagcagacggttgacgttctggagattcggaccaggtatggccgatcctgtgagtgagttccaaccctcgattccactcaccatctccggttggttgatgtagcttacggacataccggccaaccggctcgcggccagctccagacgctccagcatgggtcgcagagcagcttccgggtcaatgtcgtcccagagaaggaccaggctgatgatggtatacggatagtccttgtccagatcccaggctgaagcggtcaggcggcccaggccgatttcattacacataacgggaacgtcgctgttccaggtggacggctcccagttccgctcaccaggattcccgattgttacgccttccaggttccccaggagaacgtggagcttgctgacatattccgcttccaaggctttccgctcttcgtcggtctggttgtggcgatagaaggatggagggctgacttttgcatgatagagtttcataactgttcctcggttttggaaggcttgaacgttagagaattgtgtcgcagtatttctcgaaaggactctgacgcttcttctcgcagatcgcacaggtgatttccaggtcgggcagctcgctgtaagtcttgccgagatacaaccagcgcttgcacagactgcggccgtccgacgtgaagaagtggactttgcgagcattgccgggttgcgcccagccgcttggtgccggcttcctgctcataccatcaccacgtcaatttcgtcggcgaagaagttaaagccaactccatctgcgtagccagtgtaacgcagacgagtcgtcccatcaatgtgggcttcctcgacgccgatgacttccagggtggtatcgttgcagtacagcttgacgaacatcttgatgccggagccaatcgccgcgaaggcgatctgcttgtacaggtcttgcttgatcatgctttacgctcctgtttgcggatgtattctgccctgacttcggcttcgaacttcgcccagagcgcgttgtctactggaccccagggaccggtctgagttccgtccaccggcgcgaacttgccaccggcgcgacgatacttggacagcgttctcaggctgatgattttctcttcttgggaatcgaattggacgatcacttgacatacttcccgaagtagcaggtgtggagtatttccaggcctttggagatagccttcagcttgatgccgaaattcttgatcgcccagtccagatcgtggtgatagaactcgatgatgttgacgatttgaccggcgctgtagtggatgacgcgaaccttgccgttccagcggaaatcttcgcggctgtttacggcctcgactgcgatggtgtcgtttctgccgatgttccatttggagctagtcatgtcgcaatcctctttttggagtgtttcgcgttcgatgaggtaactatacctcagccccctcatcgagtaaagcattttcttcagattatctgaaaccttttgaagacaggaattgccgccagagccagtcgatgtgttcgttgcagtaacgctcgccatcggacgacatagataaggcgccatcattgatgccgaagtgggccgcagcgagacattcgaactcgaactggagcgttcctgggcgagggatatgggacatggcgtatttctgcacggtcagtgatcctcagaaggtttagcgtttgcgatagccgctactttctgcataccgaggcgatagaaatcggcttctttcctggcttttgtaagctgctccatggcgtcgcacgccgtcttgtgctgggcattggcgttcttgatgctgccttccaggctcttgtccagctcttcccggagcgccttctgcgatgctagctctgcctccaaatcctggattctgagctggagctggcgatttgtctcgccaacctggttttcgctggcgatggagttctgaaggcattcgtcaaggcgagtgttttcgcgcaccagctgatgcttttcgactttcgcctttctgcacgtctctcgcatttctgaaagctcaatcgcatgcagatcgtcatccgggtctttacgctcttccttcgactccatccgcaggtagtactggccggctgcgaaggcgagcactgcctggtcggcatacgccgcggcatcggtcatgtatctggatttgtagcgaggcagaaacttgcactcctctggatcccagaggagactatcggcaataggccagaatttgcggaagccatcaggatcgacttctacattgaccatttgcagctggccggcctccacttcgacttccagaggaacctgaatggcgccggtgatgtactggaagtacactatgctagacataacacaatcctcataagaagtcgcggccgggaccatcccagccgcatcgtaatcactcttcgccttcgtccgcgctcagccactcttcgaaggcgaaatttaccttagactcgacccaatcttgaagctcatcggcgaactcgtcactgtcgatgtccatcggaatgcccagagtctcttcgttccacagttcggcattcagttcgaactggatagccggttcgccatccacattcagcaggatgcggtctgcgacttcatattcgtcgacatcgaagaggaaaccgccgctgatgatgtgctggatgaaagcttcgtcgaagttgctgacgccgatattgatctgcttagtcattttttctggccccttatttggcgagtttgtgctgagctttgagggtggtcagcttagctttcagggcgatcatagcctggccgcgcaggccttccatttctgcctcgctgatggcgatcttggcggagcggatttgatcgttgatctgggatttggtcatttctgcgttcctctgttttggagtgtttcgcgttcgatgaagagattatgacgctattcagaatggaagtaaagcagaattgtgaaatatttctcaaagtggacgaacggtatgccccgtcaggaatatttcctcccatggaaggcatttccgcatcagaatgttgattaggtatcccaaagcgcgcagtggcgaatgtgagtccgcacgtacatagggctgtattgtgcgaagtgctcgacggtcgcatccaaggctctgctattgccgcacccttccgctttgcgagccaggaagaatgcttctatttgctggtttgcgttcatcgtcttaccctccaggtgtttgttcgtttcgatgaagagattatgccgttggtcagaatggaagtaaagtgtattaacaataaaattatgttcaccgacgaacggttgtgctcgaccgtctgttgcggcgtcgatatactcgacctattgctgacaccggattgattagaatgtacaaactcaaccctgcactgcgagcggtctggcgaactcgcgcccgttacaaagtcatttatggcggccgggcgtcttcgaagtcacacgacgcaggcggtatcgccgtttacctcgcggccaactatagactcaagttcctctgtgctcgccagtttcagaaccgcatcagcgaatcggtctacacgttgatcaaggacaagattgagaattctgagtacaacggcgagttcattttcacgaagaactcgatcaagcacaagaggaccggatcagaattcctattctatgggatcgcccgtaacctgtcggaaatcaagtctaccgaaggcatcgacattctctggcttgaggaagctcattacctgacccaggagcagtgggaagtcatcgagccgaccatccggaaagagaactcagaaatctggatcatcttcaatccgaacgaagtgacagacttcgtgtatcagaacttcgtggtgaagccacccaaagacgccttcgtcaagatgatcaactggaacgaaaatccgtttctcagtgagacgatgctcaaggtcatccacgaagcttatgagcgcgacaaggaccaggccgagcacatatatggagggattccgaagactggcggcgacaaatccgtcatcaatctcaagttcattcttgcggccatcgacgcccacaagaaactcggctgggagccggccggatcgaagcgcatcggcttcgacgttgcggacgacggcgaggatgcgaacgcaactacgctcatgcacggcaacgtcattatggaagtggacgaatgggacggcctggaagatgaactgctcaagtcgtccagccgcgtttacaacctggcgaagatgaaaggcgcctcggtcacttatgactccatcggtgtcggcgctcacgtcggatcgaagttcgccgagttgaacgatgccagtcccgacttcaaactgatctatgatccattcaacgcgggcggcgctgtcgataagcctgatgatatctacatgaagctgccgcacacgacgatcaagaacaaagaccacttcagcaacatcaaggcgcagaagtgggaagaagtcgcgacccgattccggaagacttatgaagcggttgagcatggaaaggtttatcccttcgacgaattgatttcgatcaactctgaaacgattcacccggacaaactaaatcaactgtgtatcgaactttcgtcgccgcgcaaagacctggacatgaacggccggttcaaagtcgagtccaagaaggatatgcgcgagaaacgcaagatcaagtcgccgaacatcgctgactcggtgattatgtcggccattctgccgatccggaagcccaaaggtttcttcgacttctaaacacagaaagcccggatcgctccgggcttcgggtcttactcggtgtggttcctggcgctgagtgtcgacgcaacggcctcgccgactcccagggcttcctggccggccgcgagcgcttcggcttccgactcgacgatgaaatcatcaccttggccatcgcctggcggaacctcgaccagcacggcttcttcgccttcgaaccgcaggtcataggtcttttcgacggacagaccgtaacgagcgttgagcgcgtcccagagctgggcctcataggtccgcaggtcttgcagagctttctggtggctgagcatggccatgtcaacggcccgttgcagggtttcgtccaggacgttgaatcgcatgcgaagagaacgaatccgctcgaccacttccgcatccactacatgcctttcgatcatcgcttttcacctttgctgaatgtaacgttgtagccgttgtcggccaggtaggtcagggcgccttcgaaggaagttccgacgaggtgctttagcttcatttcgcgttgcgcggccagccagaatgcagttccggagaactcggcgcggccttcggccaagaccctgccatcaggcccggcgatacgtacatggacggaagatagcttgatcggcatcagtgaatacctccactggcttgcgacggcatgctttcggcgcgcgcgcggcttcgcagtccgggcagggacatgcttggcggacgcgctccagctcgtcggcatccatgacatagagcttcccatcggcagtgtcgtgcgccatggcgatgttcgggaagtcggtggcgctcaggccggcgacagcgcggatttcgtcccaaagcaccagatgctcggcattcagtcgggcggcgagcgcttcgtgctctttagcgacgcgcgccatgaactcgtccatccggaatgcgaattccgcatcgatggcacgggccgaggccatggagctgagtcgaatcggttctttcttcatgatgattctcttttggttggtggttgttcgctgctcaggcctattacagtctgagaagcatgatgaagatgaacgcaaggaacgcaaacggcacaagtatgccggacatcagctttgacaggcgctgcatctcagcgtatttctcggttgacattccgtgctgcgccgcctcagccgcgaagcgggctttcgcctcgataacttccgggcgcagcgacaggacatattctaaggcctcttcccgcgctttttcggcctcgaccagcctagggtcgcgggccgagacttcgctgtaccctggccttgcgggatgggcctgcagcgatggaggaagttcggcggccacgactccatagtcggcgcaggcccaagcgatcccgatgaggatcgcgaggatggactggacgattcgcagcatcactttgtcgctaggaaagcccatggttaatcctccaccgaccgaatgatttccatgttgcgaccggcattggtcccggcagtgtaggcgcgccgaccgtcactgtcgtccagacgcaggagtttggtaacattcgacttcttgtaacccggatcgccgaaatgttcgtggaccgcagcttccttaaccaccaccagagacgttccggcagaagataccagctccatacgcttcctggttatggactgaaggcgatagctgatttcctgggtcgcggccagtttgaattgcgcggcaacctttacgttgaaacgttcgtacccttgcgccttctgatactcccgacacagacgatcaatggcctcgaccagggagttgaacatgttcaccgccagctcaacgtccgacttgtagcctttgaagcgtacggcatgaccccagcgcttggtagtgcttccgtcgcgggcgctcctggatgccttagccgatgctctgtggttgttgatgccaccggcgaaatccatgatgcagtcattgtacgtcgccacggccactgagaaaaacttcatccagttcgggattgcggaatagtaacgagtggcaatttgctcatcgaactcttcgcgaatctcgccggtagcttcgaagtcgtgaaggtcatatttgtccttcaacttcttcacacgctcggctgcgatggccgcttcgtgcggactggaagagtcggctgccatggcggtcagtttgcggatgcggtctttcgccttctcgatggcttcaggggtgaattcgttctggtcggtcatggtcggttccttttgtctgaagggtttcgcatttcaatggagctattctgccttcattcagaatggaagtaaagcactttcttccactatttcggcatcgactggaagaaattccagatccaatcacctgctaccagcaagaggatgagggcggcaaagaacaagacagcggccgcgagctgtgcgcccggcttcagtttgggatggctgagcttgggctctacgggaacggccggagcgctagcgctgcaaccggcgtctcctgggccgtagccgatgccgcgttcacacgcctggaacgacaccagggatttaagatactcggtctgcttttgcgactcttcgtagatgccggcgacggcgaaccagagggcgaacactacggacgtacacacaacccaggcgccggtcagcaggagggccagcgggccgatgacgaagacggtagcagccaggacgattgcgccgccccagatgatgaagccggccagaccattagtgatgtcgacacagaactttttcattttcagattccttcggttacgggatggaggggatttgaaactctgcgccgccgagaacatcaatgacgacttcccagagcgtcggaacagaccactggtaacggtcgaagtcggtttcaggatcgacgcccagcgtcacataggaagtggcaggccatttatgaacactgcctttccgcatgagagtcgccacgcggccgtcaccgagcggattcgtcctgtgcggaacgtacgcagacatcgaatattgctgcccggcgtcgataacaaatctttgcctctggcgcagacatacagagcccacaggattccagccgcgaccgccgcaagcctggcgagccgaagaatgctcataaccttcgtgagtcatttcgccgaggcaagccgagcgatcctcgtaatagttgatgttctccatcgatccaaccagcaccagagactcgaaatcgaatcgatgatcgtggatggccgagtgattgaagcaaagccgacgcggcagctccgggtgccaaacatggaggcgaccggccggaagttggacctgaatgaaccccaggccgtgcagagtgatcttgtccttcatcgggtcatggacggtgctcatggataatcctcagtagcagaaatgtattgtgagagttacgattgataagccggtcgcccatagaagggcgaaccaggccatggctttgatggtcgtgtagatcatccgaagaattttccggcacagatcgggccaatgcccatttcgatggatgcgtggttggtcaactcgcgaccgcagcaggagcactgaccagtcttccgaccgtaggcgactgccgattccatcggcttttcgaacatcttcagaacgtcgtcgtgctcagtatcggtgcagtcgcgactcttgatgaatttgccatcggtgatccggccgaggtagatgtcgcccaggacgtacaggctaccggcgttccggctgtgagcgctagcctctttcacaacaacgatgagcggctcctcgccttcgccagctaggcggattttcgggcgcttgataccagactctttcgccttctcaaacgctttctcgatgccggaaatgtccagagtcggcgcagcagcttcctgcgcggccactttctcgcgatacttggcgaggttttcgatggcgcgcttcgcagcagcgatctgattttccgtcaaggagccgtatttatacaacgactcctgaaggctctgagcgaagctgaaggaatttccagtccaccactcgatgatatccgggtgcgcggcttcgaaagccttaattttgaggtcgcgttcttgcgcagcgctacagattttctcggcgcgcttttctgccgccttggcacggctcttggcgcgctgctccgggctggttttgtactctttgtatccgacaccgccgcaggcaaagcaggcgcgaccataagatgaagggccacggtacaggccggtgcctgcgcatttggtgcacttgtcgcgatacagcttcacttccttccgggagttcgggcgggcgcccatggacacatcttccagcgtcttcggagcttcgtcagtgatcgctacggtagcgaagtcatcgcccaggtcttcgaagccggtgaacagattctctgctgcgttcatgtcgattctcctgtttggaaagttcgtttcgatgagttgactatacgccagaaatggaaaaacggtagcgttttctcactaccgttcgtcgggtcgaagacaatcaataaatgtcgctattgatcttgaacccatgctcagcgccgtcgttgtagtcgtactcaacataactgtcgcagtagtcgttcaaatgctgaatgatgcctagaacgtcgttcgcggccttgtgccttttcgcggcgatggtcttggcgatgctgtcgccgacttccagggcttcggccgtccggcgatggatcagcaggcgactccaaagatagagccggacgcgacgaatgatgtcgcgatggcgctccagtcgtccgtgcaactcttcaatttcgtgctcgcgagattttaatactcgtcgaagctgttgaacttccaactccaaatcggccttagtagccatgttaacctcagaaaggaaaatcgtctgagactccaggaagctcgacgattattgttgagcctgatcggtctagaatgcatccgaccgagccagccctgtgtggatagggtctacacgaactataacaggtgacttccctgactattcgccaggtcgatcctccacaccatctgcaaattggcgggcgcttcgacttcagttttcgttcgtccaggacggcgcgtctgtcgcaggaaaggcagcgtgccttaaccgacgtaaccattggtatagtcgatcattcggatgagctcatcatcctctgattctctcgacttcagaccgcccaaagagtccgactggccgtcgcatttcgcatcgatatccatcgaagacaggaatcctgccgatactgcggtgatatcaactttgtcgccggccttcttgaagccttcgcactcagcatcgagggccacaattgcactcgcggccatgttcacatgactgatgaggtcggggaagatcacaggaacttcacgcgacatgccacggaccgtcagcttcaggactacatacttcatactcactatcccttttgtatgtgaggaaagaacttgctgttttccggatggtgaaaacgctcggtcgcaggcggtctttcttccggacattgaatcgtcgaaggcgggaaaaccgcgccggcgataatcgccgcgaggagtgcagcggatgtcgacatccagagggcggtttccaggctcacccgaacttccggacggcgcggcttcattcgctccaccctcttcctggctcataggatggcagaccgccgccgcgaatccaattgtcccacatacggttcagaccagtcggcggctggggcggcggactgtagaatccgggagtctcagtgctgctcaggaaataaggcgtgcaaacggcctggacgaccaattggtgccgctcccacatcttatcaatcgctcttagcatgacgtcttcgcactgagccttactgtcgaaccgtctgctagtatggtccggcatctggacgcagccgtctccagtgcaaaggaaagcagtagcaatccatacggtgatactcgccatttcgtcaccctctttagttgatgagcagagtctattccatctgctcgccaggagtaaagcgcttttcgtcgggataaatgccgatgatgtctgcgtcgagcatccaaatctccacggacggatcgtcgctgctgatttggtacaggttgtacagctcccgtccgccgacagcgcgctcgcctcgcggctcaaccgccagaaccttgccgtgcccttctccgtgctcgtccaggtatatgacgtgatcgccgacttcatagctttctttcgtgacgaggcgtgaacgcgagctgttctgcgattccactacccaggaatccagcacgccgcctttcatgtcgcgaaacaatcttgccgatttgtcgcaatcgaatacgcccagaacttcgccgtctttcaacacgatatgtacgattggcaaaagagtattcatgtttaatctccattggttgataattagagtctaatctgccgaaaagttcccgtaaagaattattttctcataactgattagttgcaactgttaatctgatgtatatgtttgaatctcttttgaacgtttgatgtttcccctataataagcgcacacagccaacaaccacgtggaactacaatgtttaaactttcctggatattcgggcgcaaaaaggataatgctgcctgttctgaatcggcgccggagaaagtcgcaaaaatccctcaacacgatccgctcgacccaatgatcaagctgggaaggattcgcggctggaacgtcgagccggagaaagccccggtaattcgtagcgtgaaagatttcctggagccgggcctatctgtagcaatggatagtgcgtatggtgatggaccaactccggccgcgaaggctgctgcgggcggccagaatccctatgtcgtcccgactatgttgcaggactggtacaattcccaagggttcatcggataccaagcttgcgcaatcatttcccaacactggttggtggacaaagcttgttccatgtctggggaagacgcagcacggaacggatgggaactcaaatcggacggcaggaagctatccgatgaacaaagcgcgctgatcgcccggcgcgacatggagtttcgcgtcaaagacaaccttgtcgaactcaacagattcaagaacgttttcggcgttcgtatcgcgctgttcgttgtggagtctgacgatccggactactacgaaaagccgttcaatccggatggaatcacgcccggctcctacaagggaatctcccagatcgatccatactgggcaatgccgcagctcactgctggctcgacggcagatccgtcttccgaacatttctatgagccggatttctggattatcagcggtaaaaaatatcaccgcagccacctagtggtggttcgtggaccgcagccgccagatatcctgaagcctacatacatcttcggcggtatcccgctcacccagagaatctatgagcgcgtgtatgcagcggaacggacggcgaacgaagccccgctgcttgccatgtcgaagcgaaccagcaccatccacgttgacgtggagaaggccatcgcgaacgaagaggccttcaacgctcgcctggcgttctggatcgccaaccgtgataaccacggcgtgaaagttctgggaattgacgaagacatggagcagttcgacacgaacctggccgacttcgacagcatcatcatgaaccaatatcagctggtcgcggccatcgccaagactccagccacgaagctcctcggcacttctccaaaaggattcaatgccactggtgagcacgaaacgatttcttatcacgaagaactggagtccattcaagagcacatattcgacccacttcttgaacgccactatttgcttctggcgaagtcggaagaaattgatgtgcagctggaaatcgtctggaatcctgtggactccacgtccagccagcaacaagccgaattgaacaataagaaagccgcgaccgatgaaatctacatcaactctggcgttgtgtctccggatgaagttcgcgagcgtctgcgtgacgatccgcgttccggctacaaccgactcaccgacgatcaggcggaaaccgaaccgggcatgtctccggaaaacctggccgaattcgagaaggccggtgcacagtcggccaaggcgaaaggcgaagccgagcgagccgaagcccaggcgggcgccgtagagggcgcaggcggcccggttcccgccgctccacgcgggactaagcctctcgcgaaagcgtccgaggaaggggccagcgaggccgctgaaccgccgtcgaggccggaccccaaggccgagctgcggaacttgttggtcgatcttttgtcgaagctccaagacctggacgacattaaggcgccggacggcgtagacatagagcacaatgatgcgcctggcttaaagcgcacatccaaacctggcgtgtctggtatggagccttcggtgttttcgtccaaccgcatcgtcgggcctcgtgatcattcggaactccagagaatcaaggtgaatggaataaccaccttgatcgaaaatccgcgcggaagcattcgacaaggcaaggatgggagttggcgagttcagatgaaacaccactacgggttcatcaagggaacgaaaggcgctgatggggatgaagtcgattgcttcgtcggtccgaatctgggatccaaacgggtcttcgtcgtcaaccaagtgaacaaggaaggtcagtttgacgagcacaagtgtatgctcggcttcaacaacatcaacgatgcgaagtctggatatctgtcctgcttccgtccgggctgggatggtctcggctccatccatgaagttgacctgcccgctttccgtcgctggctggcgaacggcgacaccaccaaaccgttcgggggcgagtgatggcattcaaggcctccaaaaagcgcgagcgccgggcacctcttccagtcggaagagggaagcccataattccatcggcaggaatcgaggcctggtatcgaaagcagatgaaggatatgtccaagctcatgatctccgactatcgaaacgagattgagaaggcgctgtcccagcctgcggccgaacgtttcttcgccagagacgaatccgttaacgtcctgttcaagatgacccttcgaagcctacagcagcgatggagccgcatttttgaaggtttcgcggccaagatcgccccggagttcgtcaaccggaccgaagaagccgctaccgccgcgacccttcacagcttgtcggtggccggcgtcgatcagccacgagctgcgtataatgagagcgtcaggaacaccctggaggccgcaaccacttacaatcatactctcatcaccaagatccaagaggaagtccacgagaagatttacacatcagtaatgctgtctctgacttccccgaatccggaagagcaaggaacttccggcataactaacgcacttcgcaaagtcgggaagttttctgaagatcgaatcgaactcatcgcaagagatcaaacaagcaagctttacagttctctgagcgatgagagaatggcggaaaatggagtcgaggagttcgagtggctacactcttctgccggcaagactcctcgccacacccacctggagaaagatgggaagaggttcaagctgaatgaccccagactttgggagggtccgaaagcagaccaggggccgccaggatgggcgattaactgtagatgcagaaagataccagtcatttgacatcgataggagcgctatatgccgttagttcatggcacttccaatgaggctcgttctgaaaacatcaagcgggaaatcgaagccggtaaagacccaaagcaggctgcggccatcgcttattccatccagcgcagtgagaaagggaagacggcgaaagattgttcgcctgagctcgtcgccgatcttcgcgccctggtggacgctctgtcgaggctcgtgaaatgaaccgcaagacgtgccggcgccgactcgtggtcgatgtaatcagggccaatattcacggcggattcttcagcctgaagtttgccgccatcgatttggcaatcatcggcgtcgccatcttgatggcttttggccgatgatgctgagaaaaatctggattctgactaaaaattctagtccggatagccgcaagttaccgtttacggaaaatagcagtaatttggaaatcctactgccgcgaggctttaacagagccagttcctaatttccgatttagccgcatgcttcaaaagtatatagcctgggaaattagaagtaacgttccaatagaattcatctataagtaacgttataatataacgtcaatctatatgctctagacgtattgaaattcaatttttaatcggtaaattggtaatttgaattagtttaggagttgaaagcctcgcggcagtaggcttagacaaatcccgtcaagtttccgagaccaaattaccggattttcgcggctgaggaaactggtaattagatcacaatacaaattataatgtaagttaacagtcacggctacatctaattattgttccgcttatttacccttagatgtactgcgtatataatacagccatagtccacgactcttcgaattaacgatggcaaagtcgaaaagaaaaattgacgaaaatggatatatgaccatagagggctgcccgatcagctcttatggcgttttccaatattctgctggtcaactcggtcttccgggcgatccgacgcggattgtcaacgtatatcgcccggagtctgccgtcagcgatccggagtacatcgaatctctgaagaatctcccgttgatcgacgagcatgagatgctgtcgggattcgacgatgatgacgatagcgtggcccccgaagacaaaggggtggagggcatcatcacctccaacgcttactacgaagccccatgggctcgcggcgatatccgcatctattcccgcaacatgcagaatcagctggaaaggggcaaagaagacctgtccctaggctatagttgccgctacactgagcaacccggaatctggaacgggacgccttatgaagtcgtccaggacaagatgcgcggcaaccacatcgccctggtaaaagagggtcgtgtgccgggggccagagtattggatggtctgtgttttgaccatctcagttttgatttcagaccatccgatgagggtaatgaaatgagtctcaagaaagccaagcggaagccccctgtccagcgcgtagggcaagctgctgactcggcggtcgaagagttgcgcgccctgtggccgaagctatctgcgtctgtccagaagttcctgggcgaagaagagcaggagccggagcatcaggaaggcgcagctccggccgaaccgaccgacagcgagcacctgaccgagcatccgactctggaaggtgctcagaaggatgacgaagagcaggaagaggagccttccgttgtcgatccggccgtggccgccgtcgagccggagcatcaagaaagcgccgcatccgaaatgtccggtgaaggcgaagtcgccgaactgatctctcaggtcaaagccattctggctcgactggagggcacggtagccgaaggggcggacgaagagcatggcgaaggtcaagatgtcgtcgagggcttggaagagcagagcagcctcagcggcgcgcaaaccgccagcgacgatggtggtgagggcaaggataacagcgaggaacttcctgaaatggcacagaagaacgcgcaagatgctgcaattcgcggtctctatcgcgacattgctgctaaagatcgcctctacaagcgtcttagctccgtggttggtgcgttcgatcaccgagctatggactcggctgaagtcgctgtttacggcgtgaagaagctgaatatcagctgcgcgaagggccaggaagcactggcgctcgacatgtacctgaaaggtgtcgaagccgcgcgcggcgcggccagccgtcaatcgaaagcccaggattcggccggttctgctccgcagtgcgccgagctggacagctacctgaagggggagtaactcatgttccagaaacaagtttaccgccagtacactcctggttttccgggcgatctgatcgaggacggcccgaagcgggcgcggccgggtcgaatcatgtctctgtctgccgtaaatccggctgccaccgccaccggccccaaccgcatcagtcgcgctttcggttacgccggtgacgtcagctccctcggcgaaggtcagccgaagactatcgcggctcgcgcttctgaagtcgtgatcggcggcgccaacttctttggtgtcctcggtcatccgaagcactatgcgctgttcggttcggccggagactccctggctcccagctatgatctgcccgatggcgccgaaggcgagttcttcgacatggccaccggcctggtcgtcgaaattttcaacggcgccgcaaccgccctggacctggactatggtgacctggtcgcctatgtaccaaacaacctgcctaccgccgacaacgcgcttggcctgccggccggcgccctggttggcttcaaggctggctccatgccgaccggcttggtccagattcccaacgcacgcatcgttaacgccatcagtctgccggcccagtcggcggggaatctggttgctggcgttaccatcgtccagctcacgcagtaaggaggcgtcatgagccagatcagcaagacccattcgcgcctcgcaggccgcaatgcgaaacctttcgacctgaaaaacatcaccaatgacgccgtggcgtctctgcgccgcatcggcctggtattcgatcacgccgtcgtccaggaccagatcaaggccttggcgaaggccggcgcgttccgctccggctcggccatggacagcaacttcaccgccccggtgaccacgccgtccatcccgactcccatccagttcctgcagacctggttgccgggcttcgtgaaggtcatgaccgctgcacggaagatcgacgaaatcatcggcatcgataccgttggctcctgggaagatcaagaaatcgtccagggcatcgtggagccggccggcactgcggtggaatacggcgaccacaccaacatcccgctgaccagctggaacgccaacttcgaacgtcgcaccatcgttcgtggcgagctgggtatgatggtgggcaccctggaagagggtcgtgcctcggccatccggctgaacagcgccgaaaccaaacgccaacaggcggccatcggtctggaaatcttccgcaacgccatcggcttttatggctggcagagcggcctgggcaaccgcacctatggtttcctgaacgatcccaacctgccggcattccagaccccgccgagccagggctggtccactgccgactgggcaggcatcatcggcgacatccgcgaggccgttcgccagctgcgtattcagagccaagatcagatcgatccgaaggcggaaaagatcactctggccctggccaccagcaaggtggactacctgtcggtaaccacgccttacggcatttcggtttcggactggatcgaacagacctatccgaaaatgaggatcgtgtcggctccggaattgtccggcgtccagatgaaaaaccaagagccggaagatgctctggtgctcttcgtcgaagacgtgaacgcggccgtcgatggcagcaccgatggcggcagcgtgttcagccagctggtacagagcaagttcatcaccctgggtgtcgaaaagcgggcgaagtcgtacgtggaagacttctccaacggcaccgccggtgcgctatgcaagcgtccgtgggctgtggtgcgctacctcggcatctaacagatgcctattcaccaaaggccgggcttccggcctttgttcactctgactctaactcggttgtaggggccggttagggcataattactaggactacgccaatgactgtttatatcgtttcctccatgactcaatcggtgtcttacaatgcgtatgacacctctgatccgtccaatcctcgcctccagcgaaagattctgattcgcggccgcgcaggcatcgcatccgaaacttccggcttcggcgacatgatttccgacgaggcaggacgtccgatctggaccccacagggcgattgcactgccgtgagcgattcggatttcgagctgcttcaggccaataagattttcatgcgtcacatggagaagggttatctgcgagtcgtgaagaccgacatcaccagtgaccaccagcggatttccaaagagactcgcaccatggagcgcgatggattccagcctctggatgctactcgcctgcagcagaaaatcaaggtgaccacagccagcgcttcccaggaacaagagttccggatttaaccgagggtttcggtatggtgattttcgacgaacataagtttcgcacgctgtttccggagtttgctgatccagccgcttatccggacgtgcgcctgcagatgtacttcgacattgcgtgcgaattcatttctgatcgcgattcgccataccggattctcaatggtaaagccctggaagcctgtctgtatcttctgaccgcccacctcctgtcgctgtccacgatgcaagttcagggcgcggctggaggtggcgtcactgccggtgggacccagggcggtttcatcaccagcgctactgtcggcgaggtcagcgtggccaagctcgcgcccccggccaagaatggttggcagtggtggctttccgggacgccttatggtcaagagttgtgggcgctcctcagcgtcaaagcggtgggcggattctacatcggcggtcttccagagcgccgaggcttccggaaggttggagggacgttctggtgatccctggtgcgaatcttctgcgaatggccttcggggtcatcggtactcaaattgtgaaatatcgcaagtttgagcagcgagtgaagaatgatcaagctcagtacgtttccatgttcgaggagcctttcgacctggcagcgtctgttcagcgagtccgacgcgatcagtatgtccagtttaatctggagttccaacggaattacgttatgatcttcgccaactttgagatggttgacttggatcgcgatgtggccggtgaccagttcctctggaccggaagagtctttcagctggagtctcaaggctcctggttttatcaagacggctggggagtttgcctggccgtggatatcggtgcggccaagctcactgatgacgggaaaccgactttctaggtgatgtatgtttgacggcgaactgatagcgaaaatggttgtcgagctgaatgcggcgatgacatctgctcaagaggctttgcagttcccggattttgaagtcgtccagaaagctcagccgacccaacagggaacgtcaaccaggccgaccatctttttccagaaactgtttgacattcctcgcggctggcctgccaccgattggcacctggacaacacggctcgcaaatatgtagaaataactcgacagcatgtagagacgactttccagattagttcccttcattggcagaatcctgaaataactcacgtggttacggcttctgatatcgccaactatgtgagggcttatttccaagctcgatccacgattgagcgcgtaaaggaactggacttcctcattcttcgcgtgtctcaaatttccaacgaagcatttgagaacgacaatcaccagttcgaattccacccaagttttgacatggttgtaacttacaaccaatatattcgcctgtacgaaaacgcagcatattcggccgatggggtattaataggcatatgagtctgaggcgcgattcagagctaatcgccgcgcacctccagatgttaagagccatgcgcggcaggtccgtttcagccggatggtattccacggctcgatatcctgacaaggcaggcggatcggtcggaatacaagtcgcgagaatcgcacgtctcaatgagtacggcggaactatcgaccatccgggcgggaccaggtatattagggacgccattgttcggggtcggtttgttggcgttcggttcgtcagaaacgactttccgggagaaaccgaggtaactaagcctcacagaattaccatcccggctagaccgtttatgcgatatgcttggaacttgttttccgcagatcgcgccgcaatccagaaccggatagccatgaggctggccagaggacagatcactccagatcaagctcttgcccagatcggcctggcgttggaaggatacatagccagaagcatcaggaccgggccatgggtggctaactcagcatctacggtcaggagaaagggattcaacagaccgctggtcgatacggcgcacatgcttcaatcgattagcagcagagtaacataaccaggagatcatccagtgatcagtcagagccgttatatccggatcatttcgggcgtaggcgcaggcgctccggtcgcaggccgaaagctgattctgcgcgtcatgactaccaacaacgtcatcccgcccggaatcgtcatcgagttcgacaacgccaacgcagtcatgtcatacttcggcgcgcagtcggaagagtatcagcgggctgcggcttatttcaaattcatcagtaaaagcgtgaattcgccgtccagcatcagcttcgctcgctgggtaaacaccgccatcgcgccgatggttgttggtgacaatttgccgaagaccatcgccgatttcgccggcttctcagcaggggttctgaccatcatggtcggcgcggccgaacagaacatcaccgccatcgatacgtccgcagcgacttctatggacaacgtggcgtcgatcatccagaccgaaatccgcaagaacgccgacccgcagctggcccaggctaccgttacctggaatcagaacaccaaccagttcaccttggtcggcgccaccatcggcaccggcgtcctggctgtggcgaaatctgccgatccccaggacatgtccactgccctcggctggtccacctccaacgtcgtcaacgtcgccggccaggctgccgatcttcccgacgcggccgttgccaagagcaccaatgtcagcaacaacttcggttcgttcctgttcgccggtgcgccgctcgacaatgaccagatcaaggccgtgtcggcctggaacgcggctcagaacaaccagttcatctacacggtcgctacttccctggcgaacctcggcactcttttcaccttggtgaatggcaacgccgggaccgccctgaacgtgctgtcggcgactgctgccaacgacttcgtggagcagtgccccagcgagattctggccgccaccaactacgatgagccgggcgcttcgcaaaactacatgtactaccaattccctggccgcaacatcaccgtttccgacgataccgttgcgaacaccgtcgacaagagccggggcaactacatcggcgtcacccaggccaatggccagcaactcgcgttctaccagcgcggcattctgtgcggcggtccgaccgatgcggtggatatgaacgtctatgccaacgaaatctggctgaagtcggctatcgctcaagcgctcctggacctgttcctgaacgtcaatgcggttccggcgagcagcactggcgaggcgatgaccctggcggtgctgcagccggttctggacaaggcgactgccaacggcacgttcacctacggcaaggaaatcagcgccgtccagcagcagtacatcacccaagtcaccggtgatcgccgcgcctggcgtcaagtccaaaccctgggttactggatcaacatcaccttctccagctataccaacagcaacactggcttgaccgagtggaaggccaactacacgctgatctattcgaagggcgatgccatccgcttcgtcgaaggatcggacgtgatgatctaatggtttgcggcggactcgatccgccgctaccttccataaatggagtgaggaataagcaatgatcaacatttctgcgttcggctcgatctgccagttcacggcaagcagaactttcccgaacggattcaccgtcaccgagttcgccgacgatgccgatcccatcgacagcccgccgttcaccgctgccgataccggcgtcggtctcaacggtgacatggtagtttggaaccgggcgaacatcctggaagtagtcgtcaacgtcattccgaataccgagggcgagcgcaacctggcagtcctgctggatgccaaccgcaccggaaaggacaagtcgggcgctcgtgatgtcgtcggtttggtcgtggcgatgccggacggcagcaaaatcacctgcaccaacggcaccccaatcgacggcgttctgatcaacgcggtggcaagcgtcggccgtctgaagaccaagccgtatcggttccgatttgaaaaagtgatcaaagccggtactagctgatgaagaaaattccgctgacagcagtccccaatcaagcgatctcatttaatgccggtagcagctattggaagattcgcctgtaccagaacatggacatgatgaatgccgatatcagccgcgacggcgtgatcgtttgccatggggtccgctgcttcggcgggattcctcttctccaatacagccatcagtaccgacctgactatggcaatttcgtcttcgaccgcgacgccgattggacattgttcggcgacggcatcaacctgttctatctggacggcgccgaattcgccgagtatcaggcgcttgccacgaggaaagaatgagcacatcaacgatcagaaccgggacgaacaacgatatccttttggacgacaatggaaacatggttatcctcagggatgtcgaagcgtgcgcccaggacgttcgggcggcgatgctcatgcgcaccggcgaaaacattttcgatgtgaactccggtgtgggatatttcgaatacatcttctcgccgcagaaaagctatgatgacgctcgcaaatccatcgcggatgcaattttatcctcaccggatgtgaccggcatcgagcagcttgacatcgacataaccggggaagtcttcggcgtcgatgcgaaagtcatcaccatccacgggcctgttaccgcaggagtttgaaatgagtaccatccgcatccaatacgccaacggcacccaactgttcctggacggcaaaaatccgccgcccctggacccgctgccctcgtttaacccgtctgtcgaagatctggaaggcctggaccgcgaaaagaacaccgacaagggcgactcctcgccggccggtcttcccgttcccccggtaaacgtcgattccaatgtcgacaacggcggaaccatcccggctccggtatcgaccgacgctgctgcgaccgaatcggccccggaaggcgcccaggaagctcctgcagcaggccaaggcgacgagaaaggcgccgaggaagccccgactacagccccggtagaaaaggccgaggaaacggcctcgccggccgctgaagaggaaaccccggctcccgccaaggccacctctcgcaaaaccaccagcaagtaaggactcgacatgatcaacgtcagcggcttcggcacaggaattgtaatagtttccgcctcatcgttcccgatggggttttccttgtcgaagttcgctgatgatgagagtccgatatcctccaaagagctggagccgttcggatatgagatgctttatgacggtggcctattcgcctttgacaaggctgctcctctggaagtatctgtatccgtcatcgcagggagcgaggatgatattaaccttcgcatccttctcaattccaaaaagggatcattcagatttcttccgggaatcatcccggacatgacgactctcgtggccactcttcctgatggcggccgcaccgttctgtccaatgggactatcatcaagggtccggccatcgacaccatacagaacaccggacgacgcaaaggcaacacgtacacttttgttttcggtagctatcttggcgcccagactgcgcgtcaagccatttctaacgttatccaatcggtactggaggtggtctgatgttagggattttcaccagcctcctaagttcgcgatctttttcgattgtggaccaaaacacaaaccagctagttgctgcggatttgaggataagccgggtcaacacccggttttcttctgtagggcaacgccacatgctggaagatggtacgaccaagatggattccagaacgatccaccctatggaaatcatcgtcgaagtattttgcccttcaattgatgtcgtcgatcagatcaatcaattgctcctggatcgcgacacactgtacaaagtcatcactcgcggcatggtattcgaacggatgatgtgtaccagcgaagcgctcaatcagactccggatatgatatcggcgactcctgcgcggctgacattctcccaagttctcgtccagaatcccaagcctataatgttcagaaatgcaggggactcttctatgatcgaccgagggctggccctagctgaagacgtggttggctcggccggcgatctgttcgactacgcagtgaacggcgtccagaacgccgcagacttgttctgaggtgccaattgaactctttcctcaagtctattctcaacacgcctactctcaccatacgcgatgatgtcaccaaacttcctgtctggaagagtcttcaagtcaagaaagtggaaatttactcgccggcttccgtagtgtcgaaacctctggcgacgaaagaccagacggaagctcaagtgtacaccgaagctctggacattgatgtgaagaatggaaagatcatccaaccggtgcgactccgcatcaatgctatctgtccggacctgtccaccgttgaaagtatcatgaacgccttcaatgataacacctcgactttcgctatcacttctaagtcgatattggccgataaaatggccatcatggcgctcgatgtagatcagtctccagacatgttgaacgcggctgagatcaatatggaattcgagcaggttgagcctccagtattgaataaattcgattctgcgttccctcaagatagtccgacttatggggtacagattcaatctctttctgatgctaatttgctggatttgggcgccatcggcgattcgatatcttcggccgcaaaatcgctatataatcgcgtgaccagctacttctgaggatgtatcatgcttgaaatcaatcttcccgatggccgtcaaactcgcgtacaaatcgaggcgtggtcggcattggatggctgggaactccagcgccgtttcgtcgaattcgctgtcagccaagattccgacttccgccgctctttcaccatggaaatcctgggctatgcgaaagtgctgcttggcgacgatgacaccggcattccgctgaccaccgcggcagtcatcaacaaccacctcggccactggaagaacgtggaactggttttcaactctgttctcaagcacaatggcatcgacccggccacgcacgccgaccggccggactattgggaacaagtcggatcgcagatggccatcgcatttctggccgaggcgtccaagctcattggtccagcaatgaagatcgccgaaggactcgccaacaagccggagtgattcatgtctagtgatttggatgaattcatacttcggtatgaggccgatactgccagagccgagcgcaatctggagcgcctccagaaccagatcaggcgcgtgaacagcgcatcgacgagtggccttcaggatttgcgccacttcgcagacggcgcggccactgaactcggccgagtcgttccgcagatcgattctgtgacgagcgcgattcgcgggatgaacgcgcaactggcgataggcgccactggcgtggccctggtcgcggccggcgtcaaggcgttcatgaacaccagggaccagtacaatcagcagcgcatccaggcgatggacatcggcatcgccccggcacgcttggaagagtaccagagaaaattcgttcgccagtccggtggaaccatcagccgcgagcagggcgcggagatgaccaaaaatctggcagacactttccggcgagcctatcgcgatatcgggcgagtcggcccagaggcgcggattttgcgaatggccggcgtcgatgtcgggagcttccagaagggcatgcggccgctcaacgacatcattactgatctggccacgaaaatggccaagctgaagccggacgaaatttctgcctacgctgatgcccttggcgtctcgcgagactacctgagcaccctggctaagatcggcccggccatgggaaaagtcaccgagatgacgactgcggaactccagtccagggtccagggcgagtccaacattcagaaattcaacgatgctctggcgaatctcaaccagacgttcaccaccctggaaaaccgagtcggcgaaaagctcgcgcctgcgttcaccaagctgatcgaaatcatcgacaagatagtccaggctattcccaatgaagtggaaagcttcgcgaaggacaccaaatcccgttgggaagatggagtgctcgggaaggcgaccgttggcagtgatatcttatccctcctcagccccggcgccctgctcggtcgcctggcagcgtgggggactcgtcgcggcatggaagaatcagggctcatcgacaaggacaaggttcccggcgctcaaaccagcgaagacctggccaagaaacaagaagaccaggacaaggctactaagtccatgaaagagctagagaagctggctgaccagaccacgaagtctaccaatgattttgcggtggcgatcaacatgttcagtggcgcggtatcgtcgttcgcgaatgccgttgacgagcgccaagcttgggcagcctgggcgggggaaattggtcgggcggtcggtatgggaagcaccgcgccgacttcgcgggcaaccggcgtctatccgcacgcgatctatgatcagtcgaagagtggcgcggccggacaagtcttcggcgagccaatcggcgcccagtctcttcgcaatcgcatgttctcgccgcagcgcaaggccgaaccggtcaccgttccatcgtacatcaacgacatcatcaaagatgcgtcgaagatgtacaacattcctgagctggacatcaagaaactcatatacaccgaaagccgattcaacgccagggctaccagcgaagccggagcgaaaggcctcatgcagctgatgccggaaatcgccaaggcgtatggtataactgacgtatatgaccctcgccagaacatcctcggcggaacgcgtctattgcgggaaaacctggatcgagccaatggcgacatgcggctggccttgacctactatcacggcggcctcgatccgaagaactggggaccaaggactcgcgcatatccgggtttggtgatgagcgctccaatcgagctgatggaagaggcgcagcgcaagcagaaggctgcggccatgaccgccgccaacgagacgttcgctccggaaggcggcgacatggacattcgcccctatgatggcggacgattggaaactccagaccagggcaagaaggaagatgagcgccgcgaagcccgtcgatatgacgacagggttgtgcgaccggaaattcgcatcatcgaccgcatgccagaccgcagcgacggcgaaatcctcaagatgtctagacgtcaagaggccgaccgggcagattctggattccggaagttcccgaatcaagttcgcggcgagaccaagcagaacatccaggctcaactcactgcaggagccatcgcgcaagtgatcggcgttaaccccaaccagatcatgcgccgcgaaatcagccgttctgacttgctgttcggatacaaccaagccatcctgggcaagcaacaggagatcaaggccgccgcgaccgaagccaacaacgtattcctgtctccagccaagcttgccgaagccacggccaaggtgaacgccgcatcgcgagaaatggatattctcaggacatacggcgagcaacttctgaagagcgctccagagcgcggccaggagctgaccatcggtcgaatcgacatgttggtcaacgtcaccggcgcgaattctccggaagaggctcgcgagatattcagtaagcagactgcagaccagctgactacggcaatccaggacgctcaaaacgattccgcaactaagatactctactgatgaaaaagagaattctgcgagtaacattcaacatgccttatggacccgaagtcatccgcgaagatctggatgttcgggtccggattatgaaggctgcgttgcggattcagaaccgggcgacgatggaaattttcggcctcaccactcagctgcgcgagtctcttctgtcgcagttcaccgcgtggaagcaccggcaacgtcaagtgggcagggaagatgaattgatgatcaaggtgtcggtggaagccggctactctgaccaggggcgcgagcaagtttccagagtctttgtcggcgaagttgccattgtcgatatcatttctccgccaccggacattggaatccgcatccagtgctataccaggcaaatcgacaggacgaagaccattcggaatatgccgcccgccaacacgacgtttgtcaagttcgtcgagtggggcgcgaacgaaatgggattgaacttcatctgcgataccagttacaacgatcaagttctgaagaatccgggccggtctatcactgtcgcgtcggcaatcctggcgtcgattcaggatatgtacatgccggacgtggccgcgttcgtcgatgatgacatattgatcgtgaaggaccgcgataaagtcattcgtccggatgaggtgaccaacgtcaactcgtttgttggaattccatcttggtctgaatggggcgtggaattccagtgtctgtttgagccatcgattcgtgtggctggaggcgtagcggtcgaatctctcatgaatccaagtgttaatggtaactatgtaataactgctctggaatacgatttggccagtcgggatcggccgttctatatcaaagtcatggggagtccagcagcataatggccagggaaatcaaatcattcaacatgttcggagttcactatacttcgcggcaattctctgccgtcgatgggctcagcatgatgtcggaaattcagagcgtgccgccagaagaattgctcaagggtactgatgtattggcgcatccggaagaccatccggaaggcatctggcttccattgactgctgcgaacatcaatctttatgtcgttgatcgagcgaaagtaatagctcccgtacaagttcttgcacttctgtccgaagtggtaatcgactggaattttggttttctcaaagactggaccggagtcaagattccatccagatttgtcgaagatatcaaaagcgtgaagacggcacattcaccttctgtagttgcgagtttggtggcgaacggttcggcctctatgcgcgagttggaagagtattattcgactcaagatgcctttaagatgatagatatcatgacggcgaagagcgtgaacgaggccttggcgtccgaagcatcgcacaacagaatcaaaaagggataattcctaaccgggcctgggaaggctatactagacctgccaaatcagaggctttcccatgtccaatatttctctaacatccgcaaaagctcccgacaggacgcgactgatcgccgctcttgacgctcggtcgcggcgggatgctctagatttcgaagtaatgataccggctcaggttgttcaatatgaccgggccgagaatatcgcgacgattcaacctctcatcacctgggttgacacggaacacaacgccgtccaaaggcatcagctggttgatattcctgtaatttccatgggggctggcggcttccacataagtttcccgattcagcaaggtgacataggctggatttatgcggccgaccgcgacacatctcagttcctggagtcgttgtcaatgtcgaagccgaacaccggccgcatccataagttcgagcatggcctgttcatcccggacgtattccgtcgatacaccatcaattccgaagattcggccgctatggtcatacaatcgacttccggagcgaccagaatttcgattcgcggcgacaacatcaagatcactgcgccgtcgaatgtcaccgtggatactccgcaggcgaatttcactggtgatgtgactatcgctaacactctggttgtaaacggtatcaacgtgaacaaccacggccacctcgaaaacaacccgcctgatgcccggacgaagggcggcatgattgcttaaggagaatttcatggcaagttttgatttttctgatttaacagcgggggggggttgtaatggctaactacaactacatcgtcgatactggtgtgatagtcgcagataccgccgacgttctgagcgacgttgaggccgagttccgcgccgccctcggtgccaatatcaacttggccgcgagcactccgcagggatcgcttgtcgcggccgaggccatcgcccgttccagtgtcatgcggaatgaagcgcgaattgccaataccataaacccgaacgtttcattcggaacgttcctggacgcgatctgtgccttgatggggatcgagcgcggttctgacctgtcaaccttcggctatggagttcaagtcaccggccgcagccaaacccgcatttccaccgggtctagggtccagactccggccggcgcgatcttcacagtgatgagtgatgtcacgattcctgctggtggtgtcgcgaccatcgatatcaaatcgcaggagtatggcaacattcctctgccggtcgggaatctcatcatcatcgacggaacaattggctggtccggagcgaaggtcatcgcctccactcgcgtcgatccgggcagccgccaaatgagcgatgcagagttgaagaatgcccgcgttaatcgattggccatccaaggccgcaactcgactatggccatcaaggcgtatgtgagcgccgttccaaacgtcacgtcggtgaacgtaatcgagaacaacaccggcgccgttcaagtggtgaatggagtctcgtttacccttccgtatgctgtttgggtctgcgtcgccggaaacccggataaacaagcagtcgccgatgcgttgtgggccgcccataacggcggaactccatgggactatggtgcgacgaacaacggcgtcccggtggacggtccgaatggcgttcctgtgcgcgatccggcgtccggtcgaaagtatgtcgtgaagtggaccactccaattatgtacgatggatatgttaacgtaacagtccagcaaggttcctcctctgtagctccggaagccattcagaacgcagtggtcaattacgcccaggggaaagtggaaggggaagaggggctggtggtgggcgcgagcctgtcggcattcgaagttgccggcgccatcgctcgcgaaattcccggcatctacatcaaactctgccaggtcgcgtgcgtcgcggctggctcgccggctccggctccgggcgatttcacttcggaatacgtcatgagcgcattcggccaggctaccatttccgttggtaacgttcgggtgactttcgtatgactctgcctgcgtacaattcggacatccaacaagctctgaaatggctccataaccaggcgcctggaatcaccggcctgatccagagaaaggcgcaatggtatgacagattcagccgccaattctgggccaactgggagcgcgacgttttccacttgaaaactgccaacccgttcggccttatggtttggtgcatcatcctcggcacgccttcgaaagggttcggcctttatccaaagaacagttcttgggcattcggtcggctacgccagaacttcatttatagcggtacacaagtcccgccaccggcagacgcatcgcctggaggcaacttctacggtggcggcaatgccgaaattctcaacttggacgaaatcaggaaagtgcttcagctaagatatgtagcgctgatttcgaacggctcgattgcatatatcaatcgcatgcttcgttacatattcaatgatgatgagccatgggacgaggcgaccggtctgtacttctatctcatggactcaaccggcgagaatggccctgtggagaacttggcagtatatcggaaagattgggaaggtatggtgttgttgtccagttcgcccagaacgaaccacgtgctgacatcgacccctgccagcgacgccgattggccaggagtcgatccggccgcgagcggtcttccggtaacggtcgaaacggcgtccgctacggccccggacggctccgctacggtgtgcaagcttactaagccggccgggagtaccgcttacgtctccgcgccgatagatgggccgctggggtccggtagcactgtaacgttctcgttcttcgcgaaagccggctccacccgtttcattgcaattcagtcggctgccgatttccccagtcgagccgatgccgttttcgacctggattccgggaacgtgatcagcgatcagatgttggacagcagcgtggtaagcgcccgaatgattcgtctggagaatggctggtggcgttgcgttctcacgaccaagaccgtcagctcttcgttccgcgcggcttacatcgctccggcagaaaccaacttcagctggattgattcgaattccagcgcggcgattgatgtgcttatctggggcactcagatcgaactgggtgatactccaaccggatacttggagactaccggaacgcccgtaaccatcaccgattacgttctgcagagcgcccagaccggaacggtcaagttcacacagcctcttccgaccggagtagaagcgtattggactggagactggaaaggtgggtctgcgaccgagccggccagattcgcagtaggggatgggactcaagatacattcaatctgtccagccctgcatacatcggcctacccactagtggggcgttcaagctagaatacagagttggtccggcgcttaatttgtcgccgcaattgatcaacctcatgaatgaccgggcggtcggcatcatgccgacttgcgccggttgcgatgtaaaagtcattcaggagtaatgacgtgatcacacccgaactgatacccagtccgtttgccgctcagggcgataaagacccgattccacaaacctcctccactggcttcgcaaaccttcgcgacggctatacgccggactacgaaatcagcctggcgtcgaacaacccgcaggccaaagcggtcgagcggaaaattcaaaaccaactcttcttcatcgcgacccagaacgcacaggcgtggcagcgacaaatggcgccgccgtggtttcagggcatgcctggcggctacgaacagaatgcagaagtcgtgcgcgtcggaaatgacggcataatgcggcgttatcgttccatggtgaatgccaatgcgagcgaccctctcagcagcacgacttgggaagaacaacccgcatggtcggcgatgcgctccaacatcccgatgccggccggaggcccaggcctatcttctggcggagaagtcatcacgaccggccgcaacttcaacgacctgttaaatgggacgtgggagttcttctctgattcagtggttatcgcttctcagaatgcccccgtatatccggcttccgctggtgccgctgctggcatgttggaggcgaaatcttgggtgtccggagccaatacgttctgcgtccaacgctacactgatcgcgtcgggaacgtcgctgtgcgcgggcttaatgccggagcgtggaccaactggatgtatgcggtaaacgtcatggcccttcaacaaggtcgggtcacctatggagtcgcggccggatcggcgaacgcttacacgttgacgctagttccgcagctccaaggcggcctggtggatggcatgattcttcgggtcaagttcaacaccatgaacaccggcgcctccaccatcaacgtctccggactcggcgccaaagccatcgtcggcgcggccaacttccctctcaccggcggcgaacttggccaaggactcatcgctgagcttgtcttcgacgcagcaggcgaccgctggagaatcctcgcaggcgcgccacgcatccaagttggcaacgccgatcaagattaccaggcccccagctggaaacaggtgaaggattacgtcgcgtcccaaaagctgactgaagtggactgggctgacgtcgtcaacaagccgaacgtcgctatccaagacactacgccgtggttcgccaatctggagttgtctgacgctcggcctttcatcgatttccacttcaacaacaaccgcgccaaagacttcgactatcgctttatctctgaagctgatgggtcgatggcgttctactctcgccaggggtcagctggtcctacccaggatatcctgttcagcaggtcgaatgttacattcctccagccgcgactggatgttgcgaaaaacctcgcgtacatcgcgaactctggtcccctttggcagaacacaactgccgatcagcctggttggaaattcaccttcgcacaaggtgtggacgccaacaacaacgcggttatcgcagtcaataccaccaatccggacggctcctatcgctcacagatcatgcgatgggactgggcgtccacgaacgtcatattcaacaatcgtccgctctttgccggtcaatacactccttgggattctggaaactttaatccgaacaccaagttgactgtgaatgtcacgaaccaaatcgccggcccgaccgggattcggaatacaaacggcaacaccggcaacatgaacacatggggctccagttccacgacggcttcatacggaaacgctgctcttcaaatcttcgggaaaggtggtggcgagcctgccgcgctttatttcgacaactcccagacaggatggtatctggggatggacaaggatggacagctcaagcgggccggctggtcgctcggcaataacgcctacgtgattaccgacgaatccaacattcgtttccacgtgaattccatggctggcactcctgtttggggcggaaacgaattctgggggccgtggaactttaatccgaacaccaagctgaccatcaaagccggcacccaggaaactagcagcactgcgatattcagcggaactatgccattcgctccaatcgcatcgctgtccgattattctcaggcccctttgacggtttacaacgcgccaaccggtccgtctgcaaaaccggccgtcatcgcgttcattcgtcctggcaactggggcgcgttcttcggcatcgataccgacaacaagctgaaatggggcggcggatcgctcggcaacagttccagggaaatcgccgattccagcaacatcatgaatctttgggcggccaacccgaccgcgccgtcctggaacggccaaaccgtttggcgatccggaaactttgatccggcgacgaaagtggatttgaacgccgcgaacgccaccaacggcaacatgatcttcaaccgcatcgccggaactggtagcggcatagcttcgtccggccgagttggcgccatcaacctgcagaacggggcgcattcggggcaagcggccgcagtcactttcgagcgtggtggaagtatcttcgtcaacttcggcctggataccgacaacgttctcaaagtaggtggcggaaacctgggggcaaatgcctatccggtcatccacgccgggaactacaataactacatcaaccaggcgctggttcaggtcggtctgggcggggtcggttcctatggcattttcgctgttctggataatgcctctccggttgcaactgttcaacccggagtggtcgtggacggttccattctcatctactcgtcttgcgccgcaaactacaatagcggtcgaaggcctgccggaacttggcgctgcatgggatatgtagtcaaccgggatgccaacactcctgactccgcgacccttttccagcgagtgacgtaaaatgaaatggacgcggatcagaaaccctcgttggctggatgaaacaaacatccacgccatggtgactttcgatgggatcggggaagttcctttcaccgccaatccgcacgacgtggaggcccacggaagggccatccacgctgcaatcctatccggggcgcacggacctatcgccccggtcgatgcgaagcgggagcaggccttgcaggacgctatacgggccagggaaaagcgggctatccttcgtgatacccgctggcccatagatcgtcacgacgagcagaggcggctgggtatcgaaaccacggacggacctgggttgatagcagcccttgttcactggaggcagcagattcgcgattggaatagcggggatcggccgcgacttcccatggctttgaaaacaatgttcaaaaatcaggagtactgatgaaaatcacgaaggatgttctgatcaccggaaccggttgcaccacggatcgggcgatcaagtggctggatgatgtacaggcggccatggacaagttccacatcgagtcaccgcgagccatcgcggcctacctcgccaacatcggcgtcgagtccggcggactggtaagtctggtggagaatctcaactacagcgcccaaggattggccaacacctggccgcgccggtacgcagtagacccgcgagtccgcccgtatgtccctaatgctctggcgaaccgacttgcccgtaacccggttgccatcgccaacaacgtgtacgcggatcgtatgggtaatggctgtgagcaggatggcgacggttggaagtatcgcgggcgcggcctgatccagctgaccggaaagtcgaactattcactgttcgccgaagactccggtatggacgttctggagaagccggagctgctggaaactccggccggcgcgtcgatgtcttcggcctggttcttctggcgcaatcgctgcatccccatggcggaatccaacaacttctccatggtcgtgaaaaccatcaacggcgccgcgccgaacgatgcgaaccatggccagctccggatcaaccgttatgtgaagaccatcgccgcgatcaatcaaggctcctgatattcgcccaaaagaaaaggccgcttattcagcggcctttttgctttccggctttgcctcttcaaccatcttgacttcaaccggcgcggcggactcttcctgagtgaccgaatccacatagttccctagtgaactcagaacgccgattaacagcgctcttaccaccttgtccttgactgtctcgcctatgatcttggtcagaacggatattaactcttcccggagtctggggctgattcttggccgaaagcgcttgcgatgctctttgcgtttcatgtttagtcctctgtctgcggtcttctcctcaccccgataatggcttggggatgcgctgtgttaatcggaaggttcgggcgctattataactcgtcgaaaatgctcgcgcttaactgtttaacgatacgcaccgcgatattaaatcgccttctttctggccaaggaactctggcggccgggtccggtctaaggcctaatttgtcgacattaaaacgagaaaacccggatcgcctgtagggcaaggcgtccgggtttatttctatctagtgtacgctaggatcagtgacttccgccccacccgtccagccagcaatcgaagacggcgtgcctcggcttgtccttggcgccatgggagaagtgcttgaaccggatgacctggcccttgagatactccctgtcattccagcggcgctgtttctcgtcgtgggtcaggctggaggccgacacgttgaaggtgactccaggccacagacgttcgttgcggcagacgaacgcaccgaccattccggacggcgacaggttttctgcgtggctggagcgggccgtgtggccaagttcattgatgaaagcttcattgttgttgtgcatcaactcttccacgtcgatgatctcagcttcatcgtagtcgtatcgcttgactttcacacagtgcccttccttggcagtcgagcgaccgaacttgtacagtccatcagcgcgcttgcccatggaaccttcgaatcccagcattgtgtggcggcgctcgacttcgctgaactgttcgatggaagtcaccagttcctgctcgaccaggtgaatcctctcatagccgaggcagtgacgaaggaagttcacgcgctcggccgccctggctaggcgatcttcggtcggtgcgcgaggatcggtgaaatcatcgaacacatggaaagaccagtccggctcaccgctgtggcggcgaagatcgccggacgacttctggaaaactttcgggtcgctgatgtcgccgcagaccagctcgccgtccaggccgttgaacagtttatcgctgaggtattcgtagatcgattgattgttctgccgcttgagttgacgagtcagcgcctcgccttcgaatacgaagcagcgaaatccatcgatcttcggcgagaaatacatcggcagttggccttccagcagcttcgggtcaaaattcgatgcgagcatgggtttcatacagttctccagaaaagaagcccggcgaaccgggctaaatggcggtaagccggctcagatggtttcgttggcatagttcagttcggccatgatcgacgcatagcgctcgtccgactccttaatgaaaacgccgtcgtacatgacgcctttgcgatccttgatggtgtcgtaggctgcagcgtagcagtcgagcatggtggtgtcgtgctcttccgtcacgtcgaacagagtcatggcggccgataccaggctcttgatggccaacccatgatttccacgtgccagagcgcctgccagatcgccgaggcgctgcaaatcgtcgccgtaggtgggatgtacttcgccgctctcgatgaaggccgacagatgatcgaacagattttcgccgagttgcgcggccatgatcgtggcaaccaccattacgtcgccgatgccatctttcacatcgaccgggttgttctgaacccaggcttcgcatacttctgcgaactcttcgaccaacttcaggaattgatctttcgcagacgagcctttgatcaggttacggtcggaagcccatttaaccaccaggtcgtgaagttcgcggctcatgatttgttcgatgttcattctttcgattccttctgtatttgggatttgactgcattgatgatggacgccgtgctctggcgcgatccatccttggtggtaccgaagtagaaggccattaccgacttcagctcggcgaaccaatagccgatgatggtgccgatggcgaccgaggatgtcgggtccatcagagcctcgcggccgaatgtgaagattgcgatgatgatgagaatggagcctgtcagaagagcgaatgtaatcgccgggcgaacgaaatcgttctgctgcgcagcaagcctcctcgccgaatccctgtctgccgcctctgcggcgaactggctaagctcggcctggagctggttctgctcagactgaaggcgattttgttcggcttgaatcgcaagctcctggagacgaacgcgctcggcgctctggagttcggcgagacgcgctagagcttccggattcgcgtctagagcgctagcgaccgaggctgggtcggccttcgaccccagcgccgtcgcgacgatagcgccaacggcggcgcctgcaggcccacccaggagcgaccccagagccggggcagccgcgccgatcttactacctatgtctttccagtccatttcgactcctcaaaagaaaggcgccattacagcgcctttctccggccggtgatttagaactcttcggcttcggtcgcatcgccgacgccaccggcgtcactgcgaggctgttcctgcttgctgtagtccaccttcacctcgccgcctacgaacgacttgtacaggtcggccgcagccttgaagtgatccgggttcttcaccaggccttccagctcgaactggacgccggaccagctgcccttgtcgttcgacatgcctacggtggtcatacggaccaggttggcgaaagtcggcggggtgcgcaggccctgcggggtctgaacctttttctgggacagcgcggtcatgagcttcttcgaggccttgatctgcgaagacgacagggagatcagagcctggccgaaatcgccggtgtccggatcgatgacgatgacgtaatgaccacgggtgtcggcgaagtagtcagacttcttgtcgctgaccgaaccgtcttcgttcggcgcgtacaggcgtccttcgacttccttcaccttggccgggtctttcatcatttccttgaagtcttcgacgctgatggcacccttgaaaccgccctcggcctcgcgaccggcccagcggatgaactcgcggcggtacgcggccggaatgatcagcaggccggtcttgccgtcgtaaaccttgccggtgacggtgttcaggaacatgccggccttcgcgccttcgatgtacttcgggtcatcttcatcgacctggggagacatcttctgcaaaacctggatgaaggggatggcataggactcggcatcggcgccttcgaagcctgcgccgtcatacgatcccaaatccatgaagtcgggaacttctgtagtcgcgacggcgccgccaccggtggcaattgctacggccttggtttcttcggttgcttcggaagtttcggttttcttaccagccatgttaggctccttgtttgtcgaatttcagttatcgctaactgtgggtttataataacggaagttgcaactaagtaaagcaaattacatatcaagatttgctctttttcaccttcggtttcgtgatcttggcctctttgtattcgtgtacgccgatgaaatctggcagctcttcgcccttctccaggtactcgcgaccgaacgcctggagggtctggtaatggacatcgcggttgatggtggcgtcatagccggcttcgatgatggcctcggccgccttcttcgcatcttccatttcgccgcgaccgaattcggccagaaccttggtcttgatgatgccgtcgttgtcggtgtcttccagccacttccagaacttcgatttgttctcttccttgacggaaatgatggccttcggctctacttttacagtgcgaccgtccgccagagtagtggtcttctgaccaagctcctccaacagctccggaatggtgttacgcttgagggtcttcagctcctcttccttttcggccagcgccttttgaagatcgaggatttcgccgtccagctgcgaagccttgtccaccaagttcagcagtcgatggccgatgtcggtggcttccaccgccatttcatccatgacgccaaaatagtcgatttcgcccggcgcgttctctttcaagtattccgggatttcaagctcttgctctttcatgtccgcctccaacttagtgatgttcccttacttgaaccaagtattgagtagatattatgccgcatcttccttgatacggctactgatttacatattaaatttcgtcgcgagtgctaacgtcagcctcaaacacgccatcaacgacataacttgccaggttgcgtttccactccaagctgacctggattttctcgtcgatggaatccagacagatcaggtcgaagtacagaaccgagttgacggtgccgattcgatgatttcggtcttcggactgcatccgcagctcgttgtcttcgtcggtcgtgtagtagatggccacgtctgcggctgtgagcgtgatcccgatccctgctgcggccgggttgcccaggaacacctggacgcgcttggcctggaaatcgtcgatcaatttttcccgctcggcctctttggtctcgccgtagtaggtgccaaacgaaatcccttgggcctccaaatacgccttgatctggtcgatttcctgaatgcgcatggcccagacgatgatggaacgctccgggtcttcctccagcagaccctccagaagatcagtaaacacggcgaatcgcgggttgtcttcgggcggcaggatcaccggctcaccatagacgttgatatagccggacgccacttgcttgagcttcgagcgcgctgccgcagcatcgaaagatacatccagcatgaaatcttcgttctggagaacgaagtgatagtcttcttccacgcgctgataaacctttcgttgctccggcgacatttcgaagtatatgcgcttgtacaccttgtccggcaggaatggcaatgcttccttcttcgtgacccggaagctgtgcggctcgatcagggatcgcagcttgtccaggttccggaataccgggcgcccataatcgtctttttcgacgagttgcggcggcatggtttgcttcccttccagcttgcgcatgatagcgatcattcgaggatcgtcactgggcaccaagacggaaaattcggccacaaacgcccgataggatttagtccccagaattccattccgcaagaattggaactgcatgaacaaatcggtcggcgcccgcgtcagaggagttccggaaaggatgcgacgggccacggccttctcgcccagctttacgatctttttcgcacgcttggcttgtgggtttttgatcctcgttgactcgtccacaattgcgcaaactttgaatgtatcaaggaatcgctcgacctcatcatagccagcctggtggttgattgcgtcaacgttgatggcgaagacgcgaagaactttttcatctgcgaacgtctcggaatacagacggtccaagcgcgccctggcctttttggaagtcggtcggccgcgccaatccacgctcaaagtcttgatcgcgacgtgggtgggaatctcgcgcagaatccagttggtgtggacgcctttgggggcgacgatgagcagcgcgtccacgcgcccctgtaggaagaggcgaacggcatcggccaaagtcgtccaagtcttcccggtgccctgctccatcaggtatgcgaagttccgtttgttcagggacgctgccagggcattgaattggtgctgcatggcctcggtcttcatgcccttgacgggatatgttttggctttcatttgttctccaaatcggcgaggaactgaacaatgttatccagtccttctgcatagctcgcaacttccaccaagtcgcggctgttaagctcgaacaaatcgaacataggattcagcagcagccaatcggttccgatcttggccaggacgaagccccggccaccccagccgatccgctcccgaagaaaagggatttgcccaggttcgaaacatctggccattgggcaggtggaagcgcgtttcggccactcctccaaagccttgaactcgacccagaactggacacctcgacgattcaggcagatcgaatcggacatgccagaccgccgcgtctccagaaagtcgatcaggattcggccgagcgagcgctgcttaaacgcattcgccgctttcgtttcgcgatcattcatcaccttcgccctctttggaaactttctctgcttgtgctgccaactttgacttctcgcgctcggtcaatatccgcttgacggccttcacgatgaacatgtcgatgccgctgagcctccatcctttgatcaggaaccaagcgccggtcggcgtcccttcagcaatctgctttccgtattgcagatatttttcaggccgaattctgaaacgtatcggctgatcaaccgagtcatcaacgcacatgatgtcgagaaactgcgactggcccttgtacaccgggtttttcccttgatcagccctcttcttctggcgaatcggttcgttctcatcagacagaacttttttcaccatcttgacaatgaccagaccatcatctccatcgcggatatcccgaatgttctgaatggggtttccggaagttactccaaccagctccggattgtcataagcatgaccccagagcgtgtgagcttcgttcaaatctgcgaattgaacttcagaattcgacagactcgcggcgactttctcccaatcctgaagcgtcttcaggtgggtgcctgccagctctttatattgagccttcagctccttaagatcggccttcaactccttcagatcggccttcaacagtttctccagttctttgtcttggctgattttcgccgaaagaatctgggcttccagagctgctacatcagcagccttgtcctcaacatcctgtgccgatatcgggcaattggccagggcgatcctcgcggccttgacttcctcacgaagacgcaggaaccgctcggccttcgccgggccgaagcctttggcgttcatgatgccgccgatcaggcgcccgtccgccaccacccagttgagttcggaatgctccgggtccagggccgtatattctacgccttctttggccaattcgcgaaggatagacacagtttgctggtcgtccttcgccgcccgaaggcacgcggccgcgtattccaggcgatgataccgcttcatgtagcaagtccagtatgtcaccacggcatagcttaccgagtgggagcggttgaatccccaggcgccgaatgtcaccatttcctgccaaactcggtgagcgtcttccggggcgacgcctatggtcttggcgccctcgatgaacaattcccggcgcttgttgaaaaattcttcgccctttcgcgccgacatcgctttccggatcgccgacgtttgttcccagtcgaactgaccaatgtccttaacaattgacatgatctgttcttggtacaggaacacgccatacgtccccgacaaatactgctcgacctgcggaatggtataggtcacaggctcgcggccggccacgcgctcgatatacttggttgccataccagaagacaacggacccggacgggcgagcgccgtgatgtggtcgatgttctcgaacgcggtgatgttgatcgcgtttgctaccgagcgaacggcctgcccttcgaactggaagatgccggacattttgtcttcattgagaatgtccagaaccgccttgtcgttcaaaggcaagtcgtacaactcttgcgcggtcacgcagttcgcgtcctggatgactcccaaagttcgaaggccgagcgcatcaattttgagaagattcagatattccgaatcgggcttgtcgagctgcgcgacgccttcagaagttaccgtacagaagttgatgacttcatcgttgcagaccaggatgcctgccgcgtggacgccagagtgggatgggtgaatttcgaggtcgcccatgcaggcggacgcgatctcatacttttcgcggaagtcgcggccgggctgagttttttcgaaagtgtcctccaatccttttccatatcgttcgtccgccgatgtatattcgatgatcgagtttttgatgttgtcggtgtcgtggaatggaatgccgaagcgttttccgacgtgagcgataaccgacgcggccttgagtgtgttgatgttacccaacttcacaacgttccaagtgccatacttctgctggagatattcgaacactagatagcgatgggtatcggcgaagtcgatatctatatcgggaagatcggaccgggaaatgtcgataaagcgctgaaagaggaggcgatgcgggagcgggtcaacctctgtaatgccaaggagatagcagaccaaagagccggccgaagagccgcgagctggaccgaccagcatgtgcttcttggcaaacgcgaccagatctgccacgaccaggaagtagctgtcgaaatctttcagctgaatctgcttgatctcttcttggaatcgatcctcatactcctgggtccattccttgatgtggccgcgactgaggcggtaggcttgcccctcgcgagccagagcgacgatatcaccatccaagtggatcatcggcgccttcgccagtttcacatccgccaaccgctcgactaccgcacgagtattggctgcggcagtatcgaactcttcgcgagtcatgatgtggcgtaaacggctccacagctcctcttcggtggcgatgtggcgaaggccgaccgattcccgcaccttccaggccgacgcgaaatcagcatggtcgatggatggcatgtcgttgtaagaggtaattaccaccggctttccgaatgccctggccgtctccatagcgccgtgcgcggcgaccatcgacgcgggattgatgtcaatgtagtcgattccggccagatccagatgggcataggcctcgccagcgaatttgatgacgccgtcagcttcctggaattcttgcggagtcaatccttgattctggaccgacttggaagtcaagcggtagaacttcttggtgtccttggcgagcacccaggctttgagcttcagctctttctcgccatcgtcggcgcatttgatcgggatttccatgccgaatccgcgaggcagttctgccttggcagcggcttgttcccaacggacgtggccccatgttccatcatcgacgatggcgacgaatggggattcgatctctttggcgcgctcgatgatctccgggaatcgaccatatgcggcgccgtaggagtaaccagagcgaacgcggagctgagggaaagacatcatgcggcctccattgcttgatacgcccgatacactcccatgcgcttgcagacttcgtggagcagccgcacgtcgtcgagcgcccggtgtttctgtacatatgggccgcagtagtgctcataaagatgttgcaaccgcatgcggtggccgaacaacggcgccgactcttccacagtacagatatcgagtgatgggaaattgacttcttccaggccgagctttccgcgagccaaatcgcaggtaagcatgaacttatcgaatggcaggttgtgggcaatattcgcgtcggctctggaaaagaagtcgcgaactttctggcgctgatcgaggaaagatgggtgcttgaccaggtcttcgttcttcaacccggtgatcttggtgatgatttcctcgataacgattccaggattgcagatgaactctacttcatccaaaatcttttcgccatcagttatcacgccggcgaattcgatgattctcggctgctttctcagactcaccctttggtggaacgggagccctgtggtctcagtatcccatacagcgaatatcatgtttgttccctcttatgtcgaaaggccggctgctttcgcgaccggcctgaggagtataccgcgacggctgaagatttacgccttctgtccgtctttcggcgtgatgcggccggagcgcatggtggcgtgaacaaacgccgaatagttgatcgagtccaaggccgaatcggcatccttgaacccgctattcgccaggcgagtgagtttacccaccatgtgcatcacgaacatggcgagtcgatgatcatcggcggtcttcgccaccaggccgttcgggaagaggatttccatgatctttccgtacatcaggtcattgcgaccataggtgctctggcgggcgcggaagacttctgctgcggcgtacagattgttgagaacatcttccgcgaaatcatctggatgggaatcatcttcgcccggccagacggattccatggcgaacggcgcggcgtcttcggtcgggttttcggactgagccgtttcagcgagcggagacggggctttcgcaaacgcctcgtcgagggtaggggcggagttcggggcggccgggaacggctcgcctgcaatgtcgttgggcgcgctatcggggtcgctatcggccgcgacggcgaagaacggcgcatcgcaaccttccaggttcaggatgtaggagtcgatccccaggctattgtaggcatcgatgatgtcctggcgatcatcgaacgccgcgacgatcttggtgacgccttcgattttcttcaggatgtcgagcgcgactgcccgcttgaactgaggcgccggctcggtgttaccatacggccgcatgatgagttcatactcgcgatgttcggcgatgccgagttcgcggtggagcttggccctggtctggaaaaagtggttgtcggttcggccggtgacgaagaaaatcatgaggtcggcgtcgatggcattcctgatgcgacctacagcgtgcgggttgagagtgtccttgtcgagacgagaatgatactcgtcccattgccgttccaaggcgaagctcttgcggtggctatcgtcgaatacgcagccgtccaggtcgaagatgatgatgccattcttgggtttgcgttccatattcagatttccttgatggttgctttctgggtgacggttttatcgatgaacgtcccatcagaagtgagtcggaaaacttcgcagttctgagtgaaatcgaacgattgcacgttcatcgtgatgcgaatggattcgctgccgttggtcacttcgacttgtgcgatgtcgccaactttctcgacaatgatcttcatgttacatggacttcccgttgacggccacagggttggcctcttgtttttccgatccccagaaatcgcggcgcagttcttcctgctcggccgagcgatccatccaggggcgatagaacttgcactggtagataggttccaacggaacatcaaccacaggaatctggccgggcttcgtctccagagcggccatgaaccggtcataggatttctgctggatttcctcttcattcatcaccttcgacccatagcgcgggaaggcgcaggagccggtggcgacgcagtgcggctggagtaggctgtcgaacatcggatagacttccagaaccagccggcgcatctcgcggaacacttcctggtattcgccctgggtccgaacgcacaggcgaaccttcgccatgtcgctgagagtccgcagattgaacttggccgcgatcttcgtttccatgttggaagggatgatggcacgagcgtcctggagcgacgcgccggcctccagcagcttctggtagctggtttgcgcgtcggcaatggcgtcatgccacagacggttcagctcttcgcggacatggtaggtcgggtcaggctcgccatttaccgtagccggttcgtcgaattcccagcggaaagcttctggctgaacgacggcgctgatttccagagcgcgactggtttcctgctggtaagccccggtccgcgtccgaacgagttgatgggtgaagttcttgctcacgccctcgatctggaaaatgaagtctacgaactcgaacggcgagcggatggtgtccagcatgtacttccagtggtcgagcttttcggcctcggtcatggtcgccgggtcttggccgcgcatgcgggtggacttcgtgcccaagagcaattcccaggcgttctgggtgtaactaatcagagaaatcttcatcagaaatcttccggaattggcgtgaagtggaatttttcggtgagagccagggccaggccttgggcttgctccctgttaaggccatactgctctatctcttccttgagcagttcgcaggcctccaggcgcgcctcatactcttcagcctcatggacggatgagaagacggctccatcagaggttcggtacacaagttcgatcgccatggtgacctcagtagcagcggatgatttcggcgcggatatctcgacggtcgaggtagtgctcacgaatcttatcgcgggcgcgctcggcctcttcgcggctgccgaatgacaggttgaacgacgtgaaaggcttatcgtccagttcagcgccggtctgatacaggatgcctaccagaacgaaagacggcgcggtcttcggctgctggtcggcttgcatttcgaggaaggacataggaacctcttcagaatgatctggtgcgtaaattaatagcgctcctgctgagcagctacggtttccggctcgtagatgagcatgtcaacgatttccgggcactggcctttcacccagtcgatggccgcgaccagtgtggtggaagcggagaaagagaaagtgcggtaagactcatggatgtacggcgaccccatggaatcgcgctcggtcgtgcgcgaaatgactgctttgatattaacgatccggcccatcttcggcctccactttagcgattatatcggacaggcttaacttctcgccattcaggaaataactggcgcgaaacttcctgtcgccctctggcccgacgattcgggccgttatggtgagactcccgccgccaagggcatcggtgtcccggaagaaagctagcagcgcccgcttgagcgctgcttcgcgaggatcgacggccattaacctaccacgttccagccgtgctgagcgcaccacacggcaccggcccctgcaggaagactattcagaaggaacacaggagtcaggcggccgtcctcggtcatatggatgaagtagcgggcgccttcaccgagccattcggccttggcgatagcgcgttcgagattggccttggtggcgtaggttttggtgtggttcttgtcggtggagaaggttacttcgcgggccatttgtcgattccttttggttgaagggtttcgcgtttcgatgagggaatattacgcccacctgatccagaagtaaagcacttttgtaaattacttcacgaacatcttcttggccttctgataagacgaagaagtcatcaggcgctcgatgacgtccatgtcagaaaccagatcatccagaaggacattgcgccaggtagcgaaccggccgagcgagaagatgccagcctcatgggtgagattccagatcatggattcgcgctcgtcgcgaccgagcggaatgattttgcctttggtctggatggtcggctcgccatcttcgatgagatgccttttcctgatgccgaaggccgcgcaaacgtaatccatatcccagtcgctgtcccattcgatggtttcgattttaccatctaaagtctccactatccccttagtgatggattcgacgatcagagtatcaccggtgatggacgctcgaaacgttcccactttaggaccagggaaatacacggtctggaagacatcacaggggatggaaagcttgtatcgactcacgatgatggaggttccttcaccgaatgacgggtcgattcccaggtccagccctgccgcagccagattggcgcggaacggcgcggtgctgatgatattcacgtggtcatcttgccggcgaagatactggaagaaagaggcgtcgaaaggacggctccaagtgatacgattcgcaagcttagccaccagctgctcatagtagtcggccggtgcgatccaacgcttttcagtcgccagattccagatggaccggtccgacaggccgcccgttactttcctggagtacatgttgcagtggtcgatgcgcggctgggaaatgaactcgccgtcgatgtagatagctttgtgtacagtgacttcgcggaacgggatgccggtgagttggccaatcactggcgagcggaatcgcagaagtgcgttgtggcgctccttattctccggcgtcgccgcgtcgatgatttgggcttgaggaaagcgatgcgcggcgatcagtccggcgagtccggcgcccacgatgataactttctgatcaggaatcatgatgtgtcccttatgagtgtacaaaacttgagaggataaaaaagggacccattctcatgagtcccttgaagagctagacgattcaggctcagaagagcggcggcttactcttcatcaccttcggaaccatcggcgccctgatcttcaccgtcgtgctcctggccttcgtcatcggccttctcgtcatcgccctggccagcttcgtcttccttcgaagcgatggcaaccagatcgacccagcccatgatttccagcttgctcaggtagctgcggaccgaagtgccatagagcagatgggccaccttctcgccgaaggcttcgatttcgaccggctcaccaacggtgcagtgctcgttgatgtaagcgaacaccttgccgcgagtcgagaaggcctgcggagtgccatggccgtcgccggtcgggatgaagtgggtggcgcgggggcgacgcgagccattggacttcaggtcttcgcggcgggcttcggccttcttacggcgctcttcctgctcttccttgcggcgctgcttctcggcttcgcgctcggccttcttctgctcggccaggcgcttgcgctcttcttcgcgagcgactttctgggcttcctgggcggccttcttctcttcggcctttttggcgcgctcggcttccttctcggccttcttctgctcgcgctcggcttccttggccttcgccttctcggcctgctcggcttccttcaacttggccttttcagcacgctcggcttccttggcggcggccttttccttcgccttttcagcacgctcggcttccttcttctcacgctcggccttgcgcttctcttcgcgctcggctttcttctgctcgcgctcggcttccttggccttcgccttctcggcgcgctcgcgctctttacgttgacgctcagcggccttctctgccttgcgcagggcggctgcttgttccttggtcagctcttcgccttgggcctggtcgttctggtctttctgttccatgttcttactccgggaatgtttaaagggatggcttattggcctgtgaggggattatctctaaactaattgaagaagggaataccttagcctgaactttcctaaatattttctttcgggaaaatccagactccagggaacttatttatgttcgcgaagtttcaactcttccgcaaaaacagcaagtattcaactgcacgagttatgccggtatacatcaactgactataaggaattgacggcaagttttcttccagcattgccacacgcttccattccgatccctgcgacttatggaacgtcatcgcccaaccgaagtcgaatccgccaatggccttctgcgcctccagccgcacatcttcctcggccgaaaagctcaaaggattgaacttcacccatcgctcatagttcgttccgataatgcgaactttggcgaacaacatttcatccggctcgtcatcatcttcttggccttcggggaccggcttgaagtccagcagaattgcttgctcgccgttcatgatgccatattcgtgctggttcccggtgcacaccagcttctcgccgatttccggttgtacacccttgtagccgaggatgcggcgcgccctggcgttcaaacggcgacgagtattgttgtaggcgcaaaggatcacgccgtcatcgtccaagaacgtccgcatttcgtcgtccgacatgtcgaatccggcccgtaccagaatgtcgtcatactcgcggcagggcaggcgcttgccctggcggacgaacatcgacgcccgaacgatattgccggcgttgcgctcgatttcggtcatgatggtgtcacagctgttctcatggaaaatctggacgccgcgcacaggaggaacttggccaaagtcgccaatttccagaaccggaattcggtgcgacagcaagcgctcttcatcccactcgccgatcatggacgactcgtcgagcacgaccaacttcggcttctcgtcgagcgagtctttgttggcaaacatgatttcgccgtcttcatcttcgccaatcggccgatagatgaagctgtggagggtccgggcattggtgcagcccttctcgcgaagccgcgctgctgctttcccggttggcgcgacgaagaccgtccagtccatcgagcagcaaagttcggcgatgatcttcgcgatggaagtcttaccagttccggcgaaaccagcgagtcgatagacctggcggcggtgcgctcgatcacaccaaccgcgataccagtccacaacggaattgatcgcgtcgatctgctgactgtttggtcgaaagccgaatcgctcttcgatctgatcgacggtgaagttagatgctgacatatttgcgttctccaacgctaggtttaattgaatcgaggctcagtttaagcacgccgtccacagaccagccagtatcacgacgatacttgcggccttgcgggtcgacatagaagttcttcgtgcgccgcagcagaacataatgccaagcagctccaagcgcgtggacccttcctttatacgggaaagccttcgcctgctctgcggcctctttggccccagggagccagcggacggtagaaaggaccaggaccgcacccttaatagcctgggaagcggcgcggccgtcctgtgggctatagcgatgtctatcgaagtctacccagtggcggttgccgcgccggagcttgaccgttcgggatcgcccctcgaacaccaccgtgccttcgtgagtaaaaatatgttccgccatcgaatgttcctttataacgtacagttatgctttacctctgcgcaggaagagtatactatcagctgactcgccaaagcgagcgaatttaatccaactttacttcggcaggaaagtggccgatactagcgccgccgcctgtactgccctccaaaacagaggatacattaaatgcaagaatgcaagatttcccgcgaccaactcccggtcggtaatccgaatcccaatgtcgacaagacccgcgacccgaacctgaagcccggtttcctgcgtcgcagccgcgagctggacccggcgctggccgttcgcattcgtcgcgagctgatccacgccgaagcgtccgatctggccaaggccggatgggtcaattcacagtccagcctttatggatcgaaagccttcccgcgccattccgtcgttcgcgtgaccggagttccggaagatggagctttcatcggcatgctgatcggcttcatcgagcatcgcgagcatggcgaatgggcggtcatggaagccggaacgaaagaaggcggcgccgtcattattccagtcgatcacatcatgcgagcgtcattcgccgaagccgaagagttcgccgaaaagtgggagcggaacttggggtggcgtctcctgcgccaactccgcgagtgcggcgccctggccgggactgaagacgagttcctgcggcggatcatcaatcgatacgttcgtgatcgcacgatcctcgatcaccacaaagtcggcgcggacaaaacctatactgatgcagtactcaaaagcatcggcgaaacatggccgaagattccttcggggaaattcgtcggacaccgagtcgcgcagctcctgatcggccacaagctaggtcgagcggggaccattctgaatgacctggtggacttcctggagaagttcgcggccgggcgcgataaagttctcaacatcgccatctgtaattgaggtgaagggatgaacaataaaccgacgctgaatcaccaccatcaaactgcattgttgtatctgtataacaatccaaatcagccggccttcacaggtcccaacaatcaggcgctcaatgaacttcggcagatggggtatgtaaaggcgaaagaattcgaaaactgggcaggcaccggccatcttaggatggaatggacgctcaccaaagccgggattgagcgcgtcgaagtcgggcttctggggaagtgcgacgcttgcaagggaatcggtcagactttgcttcgggggaagtgtactgtttgcaatggccgcggccaggggtggatcagcgaatggtcgcagaagccaatcgaagataatcctcaaattacccctaagttcgaaaagaccgatgcgaataggcttgcagacgccattgaagaaatcggccggctggaaaaggcactggccgaatccgaaaagcgcgggagcgagctggccgcgagctattgtgacggcgtagtcggcgatgaatacggccatccttattgtcgttataaagtggaacgcgacgccgccttggccgaagtcgagcgcctgcgagaatcaaaaggcgatccctctggcagcttcgacaggtgtatgaagatgatgtacgagcgcgacgagaatgcaaaacgactcgacgccgccttggccagggtcgcggagctggaagggaagttgacggactggttgcacgaagggttccggctcaacgaggcgctagcggtcgccaaggctcaacccagcgtgccggaaatatctggcatcggtcgcgatgccgaacatcccagagctgtagtgctgtatctgcgtaacgaacccagcgatgaagatatgcgagcaatacagaactttttgcgcgccatggccgcccccgctcagcacagcgtgccgaaagcatggctcgacgttcaggcagagcgccgccggcaggtcgaggcccaggcgctaaggcaggaagtcgcagcactgcgcgcaagggcggatgttttgccggaggtgttcgggcttgagcggtaccgcgtagaaaaaactgggaagggtttctggccatactgcgtgcgtgcgggggatggaacgcgtgaactgttcgtcggccacttgaagcagtgtcagcgggtagcgaccgaattggctacggcgtttgaagatgggaagtttatcgccgcgcccggcagctcggctcagcacagcgtgccggaggggtggaagctcgtaccgatggacccgacatcgcagatgacctatgtcggtcagtccctgcgttatgacgcggtaaacagcatcggcgagatttaccggcaaatgctcgccgtagctccctcacccatcgatccggccgcgcatcctcagccgtgccagcaaccacaggcccatcctgcccgctgcgggtgcgagcggtaagtgccaagtaaggaattcatgtaatggaacagaagaaaccttcaccagtagatggagtcatcgccatgaccagcctcgacgttctccggaaagcacagcccgaagcccaggacgagtatgccgtgtccatgttcgcaacggcgatccgccagaaaatgcagcgctcccgcgataaaggccgaggcggctggatcgactgcgacgaagatattctgatcaacggattcgccgaacatgcgctgaagggaaatgagaacaacctcttggacctggcgacattcctgatgttcatgtgggtgcgcggcatcgacgatgcgaagattcccccggcgctcgaaaaggcgcggcagcacaagatcatggaagcatggagtcgggtccacgaagatggactaaactccgccagaaaggcgagtgctgcgcgacagttcgtggaagtgcctcgacgcaaggggcgcccggagcgacttgcatgaagcctcacgaaataagactggcacaggccgaagagttcctgcgcgaactcggccgagggattccggacgacgaacgggtaatggttggctacgctgaagaggccacagtccaaaccgacgagaacggccgcaagctcaacgccggctggtggcctgtgccctggaaggaagggaaatacataaactcccgatccaacgcctacgcttgcatctcgtcatccatcaagacgcccaacccgaagaccggccagatgcgatactggcgcggcgaagcctctttcggccacggcctggcgttgatggtcgatgacatcggctccggcaaagggtccaaaggcgacttcgaccgcgacgaattccgcgagcgactggagccgaccgcgattgtggagacttcgccgaacaactaccagttctggtatttcttcaaagagcctatgtcacacatgctccagttcaaggcgctgctctattcgttcgtggaccaggtgctaaagaaaggcggcgacaacaccgtcaaggacgtcagccgttacggccggatgccattcggcttcaacaacaagcgcgggaaagacggcaagttcaaatatgccgacgaaaacggcaaacccgaactcgtgcgcctgtacagcgccgactattccaagcgctactcgccagaggagatcgcccaggcctttggcgtccgcatcatcatgccacagatgaagaaggtggagataaaccgcgacgattgggtgtatgaccaagtatggctgaagtatgccgagcacatctgcacgaaatacaagatgggcgaggcggcaggcggccaggtccagcagaatatgtccggcaaataccgcatccgctgtccctggggcgacgagcacaccaacggcgatcctttcggcgcatactttcgcggaccgatacctggcgccgagcacgaatatgtgttcggttgcgggcacgatacttgccgcaaagagcatcgacggacgtgggcggccttcactgatgaagtcgtcctgccgtatattgtcgaacaacttgaacgcatcaaccgccgtcatatcggcgaggagtagtaactatgcaaaatgatcctggaattctgatcacagccattggcttgctgttcctcggccttatcatcttcttcgaaggcctaaagggatggaaaatacaagtcgcaaacttcctcgcgtcgcttctgtgcttcttcttcggcctttctgctttgacgttctggttcgtcgttgcgtttgacgtattttaatcgacgaacggtacagaaattttcggatggggacggaacttattagctctgccggtttaggtaggagataatagccgtccctttcgcctcaatatgtagaggcagtgttatatccgatcatgtaaagcagaaggcggcaaacctaacatgattatcgacgacgataacattcttgatgatgacgaatcggggtccggtgagttcgatctcacgcaaatagaagatgctggaatggaccctttgatgaccgccgcaagtaaagcggccgatgatgcgattgcgaggaatgaaacgcaccgcgcacaaaaggcggcaagatacgccgaggcgtatgcggaaccagacttgagaaagcgagcgcgattgttgatgctcgaccaggcgttcgatcttccggtcagccgggtggtgaaaggtccgttcgatgacttcatcactaaatacagctcaacttccgacagcaactatctcgcggtctatgatacgttgttctgtaagggcgacggaaccgtcccgcatccgcacttcgatgagtttcgcggccggctggtggaccaccgaggcgtggcgttcaacaacaagaccctcgaccccattgacctgatgggcgccctcgcggctgcggccttggacgatccatcgattaagaagacgattgagacttgctgcgtttgggcgcgtcgatatcgccgcaactctttgatcgagacgtttgagaagaagataccggattgggacggcgaagagcgaattagcacgttgctgatcgatcttttcaagccgttcgacaccgagctcaaccgtatggtgagcaagtatttctggctgagcctgtactgccgcatcaactatccgggaatttcggcgccgatctcgttggcgttgattggtgggcaggatgcggggaaatcatatttcggcttgctgatctgtaaggaactgtccggtgggcgcgatctggctccagttcagctcgacctgagccgacacgaccagacgccgttcctgcgcaacatcaccggcaactcggttattgcgaacgtcggggaaatgtccggcttcaaaaagggcgacatggaacgcatcaaagaattcctggtgcgatcttcggatacattcgatcaaaaattcgagccgggcgaaacgatcaagcgacaatggatcaccatcatggacggcaacggatacgatggactccagcgggacgactccggcaaccgtcgattctatccgatgttcgtggcacaacttcccgacgaagatggaaagccgaactgggttaagccgggcgatggtaatgaaccgttcaaggtggacttcacagacttcggccgcaagttctggcaggctatggctgagtgccgcgcctggatcgaagagcatggcgtcgatggatacctgaatatggtgtcggaagctaaccgcgaagtgcagaacttctctatttcggaaatggagaatgcgcgtggcgtggttcgtgatgatacgattgacatgtatctgatcaacgttctgatgagttgcgagttcgaagaggttaagccgggcaggaattcaaagaatcctggatggagggctgacaccgtcaccattctgaaatggttcgatattctcgccaggaagaagccgatttctcgccacttaactccgcacctgaaggcgctggggttcgtcccgaacaagaacggcctggctggttggtgcctgcccgtcgataaggttgcgcctggatggacgaatagtatgcaaaccacgctgccgccgttcaatgatgcgcttgtgtacttgctgaggaagggcgacccggatatcactgatgaggccgccatggcaaagattcgggcagtccgggccgagcgagccaagattttgggcgaggatttctgatgtagtggttgagtgtacttggactaggccgccttcgggcggtcttttctttggtgcggcgtacattagattccggcgttgggcgggattggtagaagtgaatacagtaatttggaccagtttcgagcgcgaataatggaaagtcgatagattttcggtatcggtttagcgtgtatggtggacggattttgcgtgaaatgttgagaaattgcgtgtttgaggtggacttttcgtgggaaatagccgcaaattactgtatagcgattctgagcggtaatttgggaagcctactgccgcgtgggttagcgggccaatttcctaatttccggtttttcgagcatgggttaaaactattctacagcgaaaatcgattgcac

SEQ ID NO: 8 - DNA, 65844 bp, Pbunavirus
  source 1..65844: mol_type = genomic DNA
aatcctaatagaaaaaatctatcacggacgttacctatctttaaaattaataaaattaatagtaatttggtaatttggtatactttggtattgaaagcctcgcggcactaagcttgtacatatcccgtcaagtttccgattccggccagctcgcggcagggtcgccggaaacttccagacttacaatccatgggtcgcggcaacaccacggcggactaagcggcaagcgccaaaactcgacgaacggaaccggaaatttgggagcgcgacagaatcgctcagctggacatatttctaacattcgatttaacactcctcccaaacactcaccaccatcctcacccaccaaccgccgactcgaccctcacccaccagcagaccgcccatataacatcctataacaccacctaacactcattcaccatcaaacccacccagacctacaggccacccacaagcagcccatagacgcgatccctggccccatagtacaatcgcgccatactcagtgtcgcggcagagcaccaggggccatccgccaaccaagccaccacgacgactccagaatcgaactcagggacgcagcaccaaatgaccaaattctacagccccgacgatctagtcacgccacaggaattcgcagacccgcatttcgcggcgatcaaccaaaagcgattcgacctgtacatcgacctgcgcgtccaaggttacagctcctggcgggtcttccgggccatctggggcgaggagcatatggacggtcccgcgcaggcccgcatcttcgcgatggagtccaacccgtactatcgcaagcagttcaaggccaagttgaacgcgaccaaaacgtccgatttgtggaatccaaagacggcgctccacgaactcctccaaatggttcgtgaccccaccgtcaaggactccagccgtctgtcggccatcaaggaattgaacgttctggctgaaatcacgttcgtggacgagtcgggcaagacccggatcggtcgcggtttggccgatttctacgcatcagaagccgaggctcagaccgcgaccgtcgctgctgcggccgaagccaatggctatgtgccggaaggtgaagagggagatttcccgtctccgtctccggaaccgaccgaggaagaccgcgccaaccccatttagacataaaataacatcgttctaggcccgaatcggaccgaactaaggcgacggtagcgggaagggacgaaaaacgattctagggcggttctaggaagtcgtagcctaaccctcagaaacgacaaagccccggactctagttcagaatccggggttttcttttgggcgccttattcgccagcttcgatgatttcgaagttgtatttgacgccttcgtgctcgaaagtcattttgccagccgccttcagctgcatgcggaagcggatgtgtttcgaagaaggcaggccgaactcgatgaatgctgcgttggtggaccggaactcgccgcgcttgcctttgacagtcacagccacgccatggcgctgagtgcgtttcttggaaacttccgggtctttccaggagttggcgatggctgccgacaggtctttggactctttggctttctccggagcgttcttggcctcttcgcgcatcttccggatttcttccagcgcttcctcttcggtgatctcttcttcaggcttcagattctcttcctcggccttctcttcttccttcttcttcttggaagtgcgggttttgtagactttggccggggcttcctcttcctgaaaggcttcttcctcggccggcagagcattcaggatggcgaggcagcgacgctcagcagtcttgcggtcagagaaacgcttgacggtcgcatcggcgttgtgagcgttgtagaaggcgaccagttctttcatttctgcgttctggatgtcgccgaaggttttgatggagttggtcattttgcgatcctctgttttggaagatttcgttcgggcttcggtttgtcgccctgttgaaagagattatgcctaggtcgatgctgcgtgtctacatttatttcatcagattgatcgcaaagccgacgaacggttgtctgatgtgaaaacaccgcagagcaggttgcggtgtttggtgggcgagggcgatggtcagaaagtcgggactgtgatcggctcgattggcgggtcgccgggcctgtcgttgtccgatgcgggcgccgggctggaagggatcgcacccgaccgaagcgccagcgattccgactgcctgcttacctgcggagctggaggcgcttttggcgcatgaggcgcgggcggaaccggcaggcctggaggagccatcggcgccctgggcggctccggaagatcgggcagatcaggaagactcggcgctatgccgccaaaggaccgctgcgacggattgtcgccgaacatttcggcggatcggttgtccttgatgacttgacctatggcagtcttgtcgccacccggttctgctggatcgaagcccgtgaatggagtggtaacgcagcgcatgttcggatgggtcggcagattgttcaggacgatggagtccgcccagacatacgggtttttgtggttgccgggtccgtggctgatgatctcggcaggaatatggccgttcatggtgagccattccgccatcccttgccgagtcagcgggcttaccacgatctgaccagtggactctttggcgatggcgaacagatcaccgaattcgaatccgatgattgtgtagttggacctggactcgccgacgaaagccagagtttcgatgttgtggtggatatcttggtcttcccagatgtacagcatggttcgctcctcaataaggttgcttttggtgttcgaccagagacataccggccggaactttgaagcggacgtattcgatcatcatcgccgttcgacgccgattcgtgcccgactcgtcattgacgaatagttcgcactggtgcggaatgactcgcgtcaccaggtcttcgcctttcgagccgtagaacttgatgtaggatgcgacgcctcgcgtcatgttcagacggatcgtttcgcagagtcgctgcgcggccgacgcgctagacagatcggtcggactgaccgtcacccagtaatggccactttgttctttatcggacataagctgccctccaatgagaaagcctctgcgactcggcagaggcttgttgttgttagtcgcgcttcaacagaacgactttgtcatatgcgcgatatttaccgcgccagtcttcccagtagtcgccggccgggcaggtaagctccagggtgatttcgtcgcgccagcattcgacagaaaggacaattgccttgttcctggctgcggaatccgccctgagcttaatcagaatttcgtcgccagttttcaactcatcaactcttacaacttttgccatggtgttctcctattgggcagcgccgcgagggcggatcgggtcgatgtcatgtaagcagatggtaggatagtccctggccaacttgagcttgaagtccacccagtcagcgccgatgagtgccgagacttcgatgcttactttgctgtgcggcgcagctccagatcgcaggactgtggcccgacgccgaacgggatcgttgacgtcaacatgagtgagtatttcgtcgccgacgagcaactcacaggccatcaatattttggccatcatacacccctatgagaaggcgcgcccaggacgatcccagccgcgccgatggattaacgtttgtgaaggatggacactgcgtccacgtcgaggatgctaatggtacggcgacggcgcggattgctgcgttcatggatgcgaatcaggttcgcagctggagcttcgtccaccacccatacgtcttccggtttctgcgtccggagcaggaccgtcacttcagtattctgggcgaggccgttgcagatgaaagtgaacttggacgagggagttctgtacatttcgagattcctttttggacttctggtccggcttctcagccggtgaagagattatgccctgattctcaccgccgagtaaagcatttgtgtaccaattctcccgtcaggtggaaccaaagtgcggtatcgcttatggctacgctaccgcgccatggcccttcttgctcgcacactgcgaaccacaggctgatttccatccttgccaggactcggccgaaagattcgaacctgcgccgactggacaggatgtcgacattcactcgtcgattgacctcataccggcgaccgttgatgacgaagaccagccgcagggtttgtccgtcaagacactcccagtatctggtttcatatcggagccaatagcgcttgccagccgggcctaccatggtcatttaatcgatgctcctggccgcgccacgcggtccggtcggcgggacgggatcgaaccgacccaggatgtagtcgggccggcgcgcttcctgaggacacacggcgagaaggcgccatcctgcgtccagggcagactggagttcgtccgtgcagcagtcttccttgagcagcagacggttgacgttctggagattcggaccaggtatggccgatcctgtgagtgagttccaaccctcgattccactcaccatctccggttggttgatgtagcttacggacataccggccaaccggctcgcggccagctccagacgctccagcatgggtcgcagagcagcttccgggtcaatgtcgtcccagagaaggaccaggctgatgatggtatacggatagtccttgtccagatcccaggctgaagcggtcaggcggcccaggccgatttcattacacataacgggaacgtcgttgctccaggtggacggctcccagttcccctcaccaggattcccgattgttacgccttccaggttccccaggagaacgtggagcttgctgacatattccgcctccaaggctttccgctcttcgtcggtctggttgtggcgatagaaggatggagggctgactttggcatggtagagtttcataactgttcctcggttttggaagatttgaaagttagagaatggtgtcgcagtatttctcgaaaggactctggcgcttcttctcgcagatcgcgcaggtgatttccaggtcgggcagctcgctgtaagtcttgccgagatacagccagcgcttgcacagactgcggccgtccgacgtgaagaagtggactttgcgagcattgccgggttgcggccagccgcttggtgccggcttcctgctcataccatcaccacgtcaatttcgtcggcgaagaagttaaagccaactccatctgcgtagccagtgtaacgcagacgagtcgtcccatcaatgtgggcttcctcgacgccgatgacttccagggtggtatcgttgcagtacagcttgacgaacatcttgatgccggagccaatcgccgcgaaggcgatctgcttgtacaggtcttgcttgatcatgctttacgctcctgtttgcggatgtattctgccctgacttcggcttcgaacttcgcccagagcgcgttgtctactggaccccagggaccggtctgagttccgtccaccggcgcgaacttgccaccggcgcgacgatacttggacagcgttctcaggctgatgattttctcttcttgggaatcgaattggacgatcacttgacatacttcccgaagtagcaggtgtggagtatttccaggcctttggagatagccttcagcttgatgccgaaattcttgatcgcccagtccagatcgtggtgatagaactcgatgatgttgacgatttgaccggcgctgtagtggatgacgcgaaccttgccgttccagcggaaatcttcgcggctgtttacggcctcgactgcgatggtgtcgtttctgccgatgttccatttggagctagtcatgtcgcaatcctctttttggagtgtttcgcgttcgatgaggtaactatacctcagccacctcatcgagtaaagcattttcttcagattatctgaaaccttttgaagacaggaattgccgccagagccagtcgatgtgttcgttgcagtaacgctcgccatcggacgacatagataaggcgccatcattgatgccgaagtgggcagcagcgagacattcgaactcgaactggagcgttcctgggcgagggatatgggacatggcgtatttctgcacggtcagtgatcctcagaaggtttagcgtttgcgatagccgctactttctgcataccgaggcgatagaaatcggcttctttcctggcttttgtaagctgctccatggcgtcgcacgccgtcttgtgctgggcattggcgttcttgatgctgccttccaggctcttgtccagctcttcccggagcgccttctgcgatgctagctctgcctccaaatcctggattctgagctggagctggcgatttgtctcgccaacctggttttcgcgggcgatggagttctgaaggcattcgtcaaggcgagtattttcgcgcaccagctgatgcttttcgactttcgcctttctgcacgtctctcgcatttctgaaagctcaatcgcatgcagatcgtcatccgggtctttacgctcttccttcgactccatccgcaggtagtactggccggctgcgaaggcgagcactgcctggtcggcatacgctgcggcatcggtcatgtatctggatttgtagcgaggcagaaacttgcactcctctggatcccagaggagactatcggcaataggccagaatttgcggaagccatcaggatcgacttctacattgaccatttgcagctggccggcctccacttcgacttccagaggaacctgaatggcgccggtgatgtactggaagtacactatgctagacataacacaatcctcataagaagtcgcggccgggaccatcccagccgcatcgtaatcactcttcgccttcgtccgcgctcagccactcttcgaaggcgaaatttaccttagactcgacccaatcttgaagctcatcggcgaactcgtcactgtcgatgtccatcggaatgcccagagtctcttcgttccacagttcggcattcagttcgaactggatagccggttcgccatccacattcagcaggatgcggtctgcgacttcatattcgtcgacatcgaagaggaaaccgccgctgatgatgtgctggatgaaagcttcgtcgaagttgctgatgccgatattgatctgcttagtcattttttctggccccttatttggcgagtttgtactgagctttgagggtggtcagcttagctttcagggcgatcatagcctggccgcgcaggccttccatttctgcctcgctgatggcgatcttggcggagcggatttgatcgttgatctgggatttggtcatttctgcgttcctctgttttggagtgtttcgcgttcgatgaagagattatgacgctattcagaatggaagtaaagcagaattgtgaaatatttctcaaagtggacgaacggtatgccccgtcaggaatatttcctcccatggaaggcatttccgcatccgaatgttgattaggtatcccaaagcgcgcagtggcgaatgtgagtccgcacgtacatagggttgtattgtgcgaagtgctcgacggtcgcatccaaggctctgctattgccgcacccttccgctttgcgagccaggaagaatgcttctatttgctggtttgcgttcatcgtcttaccctccaggtgtttgttcgtttcgatgaagagattatgccgttggtcagaatggaagtaaagtgtattaacaataaaattatgttcaccgacgaacggttgtgctcgaccgtccgttgcggcgtcgatatactcgacctattgctgacaccggattgattagaatgtacaaactcaaccctgcactgcgagcagtctggcgaactcgcgcccgttacaaagtcatttatggcggccgggcgtcttcgaagtcacacgacgcaggcggtatcgccgtttacctcgcggccaactatagactcaagttcctctgtgctcgccagtttcagaaccgcatcagcgaatcggtctacacgttgatcaaggacaagattgagaattctgagtacaacggcgagttcattttcacgaagaactcgatcaagcacaagatgaccggatcagaattcctattctatgggatcgcccgtaacctgtcggaaatcaagtctaccgaaggcatcgacattctctggcttgaggaagctcactacctgacccaggagcagtgggaagtcatcgagccgaccatccggaaagagaactcagaaatctggatcatcttcaaccctaacgaagtcaccgatttcgtgtatcagaacttcgtggtcaagcccccgaaagactcctgcgtcaagatgatcaactggaacgaaaatccgttcctcagtgagacgatgctcaaagtgattcacgaagcctatgaacgcgaccgggagcaggccgagcacatttatggcgggattccgaagactggaggcgacaaatccgtcatcaacctcaagttcattctcgcggccatcgacgcccacaagaaactcggctgggagccggccggatcgaagcgcatcggcttcgacgttgcggacgacggcgaggatgcgaacgccactacgctcatgcacggcaacgtcatcatggaagttgacgaatgggacggcctggaggatgaactgctcaagtcgtccagccgcgtttacaacctggcgaagatgaaaggcgcatcggtcacttatgactccatcggcgtcggcgctcatgtcggttcgaagttcgccgagttgaacgatgccagcccagacttcaaactgatctatgacccattcaacgcgggcggcgctgtcgataagcctgatgacgtctacatgaagctgccgcacacgattatcaagaacaaagaccacttcagcaacatcaaggcgcagaagtgggaagaagtcgcgacccgattccggaagacttatgaagcggttgagcatggaaaggtttatccatttgacgaattgatttcgatcaactctgaaacgattcacccggacaaactaaatcaactgtgtatcgaactttcgtcaccgcgcaaagacctggacatgaacggccggttcaaagtcgagtccaagaaggatatgcgcgagaaacgcaaaatcaagtcaccgaacatcgctgactcggtgattatgtcggccattctgccgatccggaagcccaaaggcttcttcgacttataaacatagaaaagcccggatcgctccgggcttcgggtcttactcggtgcggttcctggcgctgagtgtcgacgcaacggcctcgccgactcccagggcttcctggccggccgcgagcgcttcggcttccgactcgacgatgaaatcatcaccttggccatcgcctggcggaacctcgaccagcacggcttcttcgccttcgaaccgcaggtcataggtcttttcgacggacagaccgtaacgagcgttgagcgcgtcccagagctgggcctcataggtccgcaggtcttgcagagctttctggtggctgagcatggccatgtcaacggcccgttgcagggtttcgtccaggacgttgaaccgaatgcgaagagaacgaatccgctcgacgacttccgcatccactacatgtctttcgatcattacttttcacctttgctgaatgtaacgttgtagccgttgtcggccaggtaggtcagggcgccttcgaaggaagttccgacgaggtgctttagcttcatttcgcgttgcgcggccagccagaatgcagttccggagaactcggcgcggccttcggccaagaccctgccatcaggcccggcgatccgtacatgcacggaagatagcttgatcggcatcagtgaatacctccactggcttgcgacggcatgctttcggcgcgtgcggcttcgcagtccgggcagggacatgcctggcggacgcgctccagctcgtcggcatccatgacatagagcttcccatcggcagtgtcgtgcgccatggcgatgttcgggaagtcggtggcgctcaggccggcgacagcgcggatttcgtcccaaagcaccagatgctcggcattcagtcgggcggcgagcgcttcgtgctctttagcgacgcgcgccatgaactcgtccacccggaatgcgaattccgcatcgatggcacgggccgaggccatggagctgagtcgaatcggttctttcttcatgatgattctcttttggttggcggttgttcgctgctcaggcctattacagtctgagcagcatgatgaagatgaacgcaaggaacgcaaacggcacaagtatgccggacatcagctttgacaggcgctgcatctcagcgtatttctcggttgacattccgtgctgcgccgcctcagctgcgaagcgggctttcgcctcgataacttccgggcgtagcgacaggacatattctaaggcctcttcccgcgctttttcggcctcgaccgacctagggtcgcgggcagagacttcgctgtgccctggcctcgcgggatgggcttgcagagatggaggaagttcagcagccacgactccatagtcggcgcaggcccaagcgatcccgatgaggatcgcgaggatggattggacgattcgcagcatcactttgtcgctagggaagttcataatcaatcctccaccgaccgaacgatttccatattgcgcccggcattggcccctgcattgaaggcgcgccgaccgtcgctatcgtccagacgcatgagcttcgtaacattggacttcttgtagccaggatcgccgaaatgttcgtgaaccgcagcttccttcaccacaaccagagacgttccggcagaagataccagctccatacgcttcctggttatggactgaaggcgatagctgatttcctgggtcgcggccagtttgaattgcgcggcaacctttacgttgaaacgttcgtacccttgcgccttctgatactcccgacacagacgatcaatggcctcgaccagggagttgaacatgttcaccgccagctcaacgtccgacttgtagcctttgaagcgtacggcatgaccccagcgcttggtagtgcttccgtcgcgggcgctcctggatgccttagccgatgctctgtggttgttgatgccaccggcgaaatccatgatgcagtcattgtatgtcgccacggccactgagaaaaacttcatccagttcgggattgcggaatagtaacgagtggcaatttgctcatcgaactcttcgcgaatctcgccggtagcttcgaagtcgtgaaggtcatatttgtccttcaacttcttcacacgctcggctgcgatggccgcttcgtgcggactggaagagtcggctgccatggcggtcagtttgcggatgcggtctttcgccttctcgatggcttcaggggtgaattcgttctggtcggtcatggtcggttccttttgtctgaagggtttcgcatttcaatggagctattctgccttcattcagaatggaagtaaagcactttcttccactatttcggcatcgactggaagaaattccagatccaatcacctgctaccagcaagaggatgagggcggcaaagaacaagacagcggccgcgagctgtgcgcccggcttcagtttgggatggctgagcttgggctctacgggaacggccggagcgctagcgctgcaaccggcgtctcctgggccgtagccgatgccgcgttcacacgcctggagcgacaccagggatttaagatactcggtctgcttttgcgactcttcgtagatgccggcgacggcgaaccagagggcgaacactacggacgtacacacaacccaggcgccggtcagcaggagggccagcgggccgatgacgaagacggtagcagccaggacgattgcgccgccccagatgatgaagccggccagaccattagtgatgtcgacacagaactttttcattttcagattccttcggttacgggatggaggggatttgaaactctgcgccgccgagaacatcaatgacgacttcccagagcgtcggaacagaccactggtaacggtcgaagtcggtttcaggatcgacgcccagcgtcacataggaagtggcaggccatttatgagcactgcctttccgcatgagagtcgccacgcggccgtcaccgagcggattcgtcctgtgcggaacgtacgcagacatcgaatattgctgcccggcgtcgataacaaatctttgcctctggcgcagacatacagagcccacaggattccagccgcgaccgccgcaagcctggcgagccgaagaatgctcataaccttcgtgagtcatttcgctgaggcaagccgagcgatcctcgtaatagttgatgttctccatcgatccaaccagcaccagagactcgaaatcgaatcgatgatcgtggatggccgagtgattgaagcaaagccgacgcggcagctccgggtgccaaacatggaggcgaccggccggaagttggacctgaatgaaccccaggccgtgcagagtgatcttgtccttcatcgggtcatggacggtgctcatggataatcctcagtagcagaaatgtattgtgagagttacgattgataagccggtcgcccatagaagggcgaaccaggccatggctttgatggtcgtgtagatcatccgaagaattttccggcacagatcgggccaatgcccatttcgatggatgcgtggttggtcaactcgcgaccgcagcaggagcactgaccagtcttccgaccgtaggcgactgccgattccatcggcttttcgaacatcttcagaacgtcgtcgtgctcagtatcggtgcagtcgcgactcttgatgaatttgccattggtgatccggccgaggtagatgccgcccaggacgtacaggctaccggcgttccggctgtgagcgctagcctctttcacaacaacgatgagcggctcctcgccttcgccagctaggcggattttcgggcgcttgataccagactctttcgccttctcaaacgctttctcgatgccggaaatgtccagagtcggcgcagcagcttcctgcgctgccactttctcgcgatacttggcgaggttttcgatggcgcgcttcgcagcagcgatctgattttctgtcaaggagccgtatttatacaacgactcctgaaggctctgagcgaagctgaaggaatttccagtccaccactcgatgatgtccgggtgcgcggcttcgaaggccttaattttgaggtcgcgctcttgcgcagcgctacagattttctcgatgcgcttttctgccgccttagcacggctcttggcgcgctgctccgggctggttttgtactctttgtatccgacgccgccgcaggcaaagcaggcgcgaccataagacgaagggccacggtacaggccggtgcctgcgcatttggtgcacttgtcgcgatacagcttcacttccttccgggagttcgggcgggcacccatggacacgtcttccagggtcttcggcgcttcgttgttgatctctacggtagcgaagtcatcacccaggtcttcgaagccggtgaacagattctctgctgcgttcatgtcgattctcctgtttggaaagttcgtttcgatgagttgactatacgccagaaatggaaaaacggtagcgatttctcactaccgttcgtcgggtcgaagacaatcaataaatgtcgctattgatcttgaacccatgctcagcgccgtcgttgtagtcgtactcagcatagctgtcgcagtagtcgttcaaatgctgaatgatgcctagaacgtcgttcgcggcattgtgccgtttcgcggcgatggtcttggcgatgctgtcgccgacttccagggtttcggccgtccggcgatggatcagcagacggctccaaagatagagccggacgcgacgaatgatgtctcgatggcgctccagtcgtccgtgcaactcttcaatttcttgctcgcgagatttcactactcgtcgaagctgctgaacttccagttccaaatcggccttagtagccatgttcacctcaaaaaggaaaatcgtctgggactccaggaagttcgacgattattgttgagcctgatcgatccagaatgcatccgaccgagccagccctgtggggatagggtctacacgaactataacaggtaacttccatgactattcgccaggtcgatcctccacaccatctacagactggtgggcgcttcgacttcagttttcgttcgtccaagacggcgcgtctgtcgcatgaaaggcagcgcgccttaaccgacgtaaccatgggtatagtcgatcattcggatgagaccatcatcctctgattccctcgacttcagaccgcccaaagagtccgactggccgttgcatttcgcatcgatatccatcgaagacaggaatcctgccgatactgcggtgatatcaactttgtcgccggccttcttgaagtcttcgcactcagcatcgagggccacaattgcactcgcggccatgttcacatgactgatgaggtcggggaagatcacaggaacttcacgcgacatgccacggaccgtcagcttcaggactacatacttcatactcactatcccttttgtatgtgaggaaagaacttgctgttttccggatggtgaaaacgctcggtcgcaggcggtctttcttccggacattgaatcgtcgaaggcgggaaaaccgcgccggcgataatcgccgcgaggagtgcagcggatgtcgacatccagagggcggtttccaggctcacccgaacttccggacggcgcggcttcattcgctccaccctcttcctggctcataggatggcagaccgccgccgcgaatccaattgtcccacatacggttcagaccagtcggtggctggggcggcggactgtagaatccgggagtctcagtgctgctcaggaaataaggcgtgcaaacggcctggacgaccaattggtgccgctcccacatcttatcaatcgctcttagcatgacgtcttcgcactgagccttactgtcgaaccgtctgctagtatggtccggcatctggacgcagccgtctccagtgcaaaggaaagcagtagcaatccatacggtgatactcgccatttcgtcaccctctttagttgatgagcagagtctattccatctgctcgccaggagtaaagcgcttttcgtcgggataaatgccgatgatgtctgcgtcgagcatccaaatctccacggacggatcgtcgctgctgatttgatataggttgtacagctcccgtccgccgacagcacgctcgcctcgtggctcaaccgccagaaccttgccgtgtccttctccgtgctcgtccaggtatatgacgtgatcaccgacttcatagctttctttcgtgacgaggcgtgaacgcgagctgttctgcgattccaccatccaggaatccagcacgccgcctttcatgtcgcgaaacaatcttgccgatttgtcgcaatcgaatacgcccagaacttcgccgtctttcaacacgatatgtacgattggcaaaagagtattcatgtttaatctccattggttgataattagagtctaatctgccgaaaagttcccgtaaagaattattttctcataactgattagttgcaactgttaatctgatgtatatgtttgaatctcttttgaacgtttgatgtttcccctataataagcgcacacagtcaacaaccacgtggaactacaatgtttaaactttcctggatattcgggcgcaaaaaggataatgctgcctgttcggaatcggcgccggagaaagtcgcacaaatccctcaacacgatccgctcgaccccatgatcaagctgggaaggattcgcggctggaacgtcgagccggagaaaaccccggtcattcgtagtgtgaaagatttcctggagccgggcctatctgtagcgatggatagtgcgtatggtgatggaccaactccggccgcgaaggctgctgcgggcggccagaatccctatgtcgtcccgactatgttgcaggactggtacaattcccaagggtttatcggataccaagcttgcgcaatcatttcccagcactggttggtggacaaagcttgttccatgtctggggaagacgcagcacggaacggatgggaactcaaatcggacggcaggaagctatccgatgaacaaagcgcgctgatcgcccggcgcgacatggagtttcgcgtcaaagacaaccttgtcgaactcaacagattcaagaacgttttcggcgttcgtatcgcgctgttcgtcgtggagtctgacgatccggactactacgaaaagccgttcaatccggatggaatcacgcccggctcctacaagggaatctcccagatcgatccatactgggcaatgccgcagctcactgctggctcgacggcagatccgtcttccgaacatttctatgagccggatttctggattatcagcggcaaaaaatatcaccgcagccacctagtggtggttcgtggaccgcagccgccagatatcctgaagcctacatacatcttcggcggtatcccgctcacccagagaatctatgagcgcgtgtatgcagcggaacggacggcgaacgaagccccgctgcttgccatgtcgaagcgaaccagcaccatccacgttgacgtggagaaggccatcgcgaacgaagaggccttcaacgctcgcctggcgttctggatcgccaaccgtgataaccacggcgtgaaagttctgggaattgacgaaggcatggagcagttcgacacgaacctggccgacttcgacagcatcatcatgaaccaatatcagctggtcgcggccatcgccaagactccagccacgaagctcctcggcacttctccaaaaggattcaatgccactggtgagcacgaaacgatttcttatcacgaagaactggagtccattcaagagcacatattcgacccacttcttgaacgccactatttgcttctggcgaagtcggaagaaatcgatgtgcagctggaaatcgtctggaatcctgtagactccacgtccagccagcaacaagccgaattgaacaacaagaaagccgctaccgacgaaatctacataaactctggcgttgtgtctccggatgaagttcgcgagcgtctgcgcgacgatccgcgttccggctacaaccgactcaccgacgatcaggcagaaaccgaaccgggcatgtctccggaaaacctggccgaattcgagaaggccggtgcacagtcgacaaaggcgaaaggcgaagccgagcgagccgaagcccaggcgggcgccgtagagggcgcaggcggcccggttcccgccgctccacgcgggactaagcctctcgcgaaagcggccgaggaaggggccagcgaggccgctgaaccgccgtcgcgaccggaccccaaggccgagctgcggaacttgttggtcgatcttttgtcgaagctccaagacctggacgacattaaggcgccggacggcgtagacatagagcacaatgatgcgcctggcttaaagcgcacatccaaacctggcgtgtctggtatggagccttcggtgttttcgtccaaccgcatcgtcgggcctcgtgatcattcggaactccagagaatcaaggtgaatggaataaccaccttgatcgaaaatccgcgcggaagcattcgacaaggcaaggatgggagttggcgagttcagatgaaacaccactacgggttcatcaagggaacgaaaggcgctgatggggatgaagtcgattgcttcgtcggtccgaatctgggatccaaacgggtcttcgtcgtcaaccaagtgaacaaggaaggtcagtttgacgagcacaagtgtatgctcggcttcaacaacatcaacgatgcgaagtctggatatctgtcctgcttccgtccgggctgggatggtctcggctccatccatgaagttgacctgcccgctttccgtcgctggctggcgaacggcgacaccaccaaaccattcgggggcgagtgatggcattcaaggcctccaaaaagcgcgagcgccgggcacctcttccagtcggaagagggaagcccataattccatcggcaggaatcgaggcctggtatcgaaagcagatgaaggatatgtccaagctcatgatctccgactatcgaaacgagattgagaaggcgctgtcccagcctgcggccgaacgtttcttcgccagagacgaatccgttaacgtcctgttcaagatgacccttcgaagcctacagcagcgatggagccgaatttttgaaggtttcgcggccaagatcgccccggagttcgtcaaccggaccgaagaagccgctaccgccgcgacccttcacagcttgtcggtggccggcgtcgatcagccacgagctgcgtataatgagagcgtcaggaacaccctggaggccgcaaccacttacaatcatactctcatcaccaagatccaagaggaagtccacgagaagatttacacatcagtaatgctgtctctgacttccccgaatccggaagagcaaggaacttccggcataactaacgcacttcgcaaagtcgggaagttttctgaagatcgaatcgaactcatcgcaagagatcaaacaagcaagctttacagttctctgagcgatgagagaatggcggaaaatggagtcgaggagttcgagtggctacactcttctgccggcaagactcctcgccacacccacctggagaaagatgggaagaggttcaagctgaatgaccccagactttgggagggtccgaaagcagaccaggggccgccaggatgggcgattaactgtagatgcagaaagataccagtcatttgacatcgataggagcgctatatgccgttagttcatggcacttccaatgaggctcgttctgaaaacatcaagcgggaaatcgaagccggtaaagacccaaagcaggctgcggccatcgcttattccatccagcgcagtgagaaagggaagacggcgaaagattgttcgcctgagctcgtcgccgatcttcgcgccctggtggacgctctgtcgaggctcgtgaaatgaaccgcaagacgtgccggcgccgactcgtggtcgatgtaatcagggccaatattcacggcggattcttcagcctgaagtttgccgccatcgatttggcaatcatcggcgtcgccatcttgatggcttttggccgataatgctgagaaaaatctggattctgactaaaaattctagtccggatagccgcaagttaccgtttacggaaaatagcagtaatttggaaatcctactgccgcgaggctttaacagagccagttcctaatttccgatttagccgcatgcttcaaaagtatatagcctgggaaattagaagtaacgttccaatagaattcatctataagtaacgttataatataacgtcaatctatatgctctagacgtattgaaattcaatttttaatcggtaaattggtaatttgaattagtttaggagttgaaagcctcgcggcagtaggcttagacaaatcccgtcaagtttccgagaccaaattaccggattttcgcggctgaggaactggtaattagatcacaatacaaattataatgtaagttaacagtcacggctacatctaattattgttccgcttatttacccttagatgtactgcgtatataatacagccatagtccacgactcttcgaactaacgatggcaaagtcgaaaagaaaaattgacgaaaatggatatatgaccatagagggctgcccgatcagctcttatggcgttttccaatattctgctggtcaactcggtcttccgggcgatccgacgcggattgtcaacgtatatcgcccggagtctgccgtcagcgatccggagtacatcgaatctctgaagaatctcccgttgatcgacgagcatgagatgctgtcgggattcgacgatgatgacgatagcgtggcccccgaagacaaaggggtggagggcatcatcacatccaacgcttactacgaagccccatgggcacgcggcgatatccgcatctattcccgcaacatgcagaatcagctggaaaggggcaaagaagacctgtccctaggctatagttgccgctacactgagcaacccggcatctggaacggaacgccttatgaagtcgtccaggacaagatgcgcggcaaccacattgccctggtaaaagagggtcgtgtgccgggggccagagtattggatggtctgtgttttgaccatctcagttttgatttcagaccatccgatgagggtaatgaaatgagtctcaagaaagccaagcggaagccccctgtccagcgcgtagggcaagctgctgactcggcggtcgaagagttgcgcgccctgtggccgaagctatctgcgtctgtccagaagttcctgggcgaagaagagcaggagccggagcatcaggaaggcgccgctccggccgaaccgaccgacagcgagcacctgaccgagcatccgactctggaaggtgctcagaaggatgacgaagagcaggaagaggagccttccgttgtcgatccggccgtggccgccgtcgagccggagcatcaagaaagcgccgcatccgaaatgtccggtgaaggcgaagtcgccgaactgatctctcaggtcaaagccattctggctcgactggagggcacggtagccgaaggggcagacgaagagcatggcgaaggtcaagatgtcgtcgagggcttggaggagcagagcagcctcagcggctcgcaaaccgccagcgacgatggtggtgagagcaaggataacagcgaggaacttcctgaaatggcacagaagaacgcgcaagatgctgcaattcgcggtctctatcgcgacattgctgctaaagatcgcctctacaagcgtcttagctccgtggttggtgcgttcgatcaccgagctatggactcggctgaagtcgctgtttacggcgtgaaaaagctgaacatcagctgtgcgaagggccaggaagctctggcgctcgacatgtacctgaaaggcgtcgaagcctcgcgcggcgcggccagccgtcaatcgaaagcccaggattcggccggttctgctccgcagtgcgccgagctggacagctacctgaagggggagtaactcatgttccagaaacaagtttaccgccagtacactcctggttttccgggcgatctgatcgaggacggcccgaagcgggcgcggccgggtcgaatcatgtctctgtctgccgtaaatccggctgccaccgccaccggccccaaccgcatcagtcgcgctttcggttatgccggtgacgtcagcgccctcggcgaaggtcagccgaagaccatcgcggctcgtgcttctgaagtcgtgatcggcggcgccaacttctttggtgtcctcggccatccgaagcactatgctctgttcggttcggccggagactccctggctcccagctatgatctgcccgatggcgccgaaggcgagttcttcgatatggccaccggcctggtcgtcgaaattttcaacggcgccgcaaccgccctggacctggactatggtgacctggtcgcctatgtccccaacaacctggctaccgccgacaacgcgcttggcctgccggcaggcgccctggtgggcttcaaggccggctccatgccgaccggcttggtccagattcccaacgcacgtatcgttaacgccatcagtctgccggctcagtcggcggggaatctggttgctggcgttaccatcgtccagctcacgcagtaaggaggcgtcatgagccagatcagcaagacccattcgcgcctcgcaggccgcaatgcgaaacctttcgacctgaaaaacatcaccaatgacgccgtggcgtctctgcgccgcatcggcctggtattcgatcacgccgtcgtccaggaccagatcaaggccttggcgaaggccggcgcgttccgctccggctcggccatggacagcaacttcaccgccccggtgaccacgccgtccatcccgactcccatccagttcctgcagacctggttgccgggcttcgtgaaggtcatgaccgctgcacggaagatcgacgaaatcatcggcatcgataccgttggctcctgggaagatcaagaaatcgtccagggcatcgtggagccggccggcactgcggtggaatacggcgaccacaccaacatcccgctgaccagctggaacgccaacttcgaacgtcgcaccatcgttcgtggcgagctgggtatgatggtgggcaccctggaagagggtcgtgcctcggccatccggctgaacagcgccgaaaccaaacgccaacaggcggccatcggtctggaaatcttccgcaacgccatcggtttctacggctggcagagcggcctgggcaaccgcacctatggtttcctgaacgatcccaacctgccggcattccagaccccgccgagccagggctggtccactgccgactgggcaggcatcatcggcgacatccgcgaggccgttcgccagctgcgtattcagagccaagatcagatcgatccgaaggcggaaaagatcaccctggccctggccaccagcaaggtggactacctgtcggtaaccacgccttacggcatttcggtttcggactggatcgaacagacctatccgaaaatgcggatcgtgtcggctccggaattgtccggcgtccagatgaaaaaccaagagccggaagatgctctggtgctcttcgtcgaagacgtgaacgcggccgtcgatggcagcaccgatggcggcagcgtgttcagccagctggtacagagcaagttcatcaccctgggcgtcgaaaagcgggcgaagtcgtatgtggaagacttctccaacggcaccgccggtgcgctgtgtaagcgtccgtgggccgtggtgcgctacctcggcatctaaccgatgcctattcaccaaaggccgggtttccggcctttgttcactctgactctgactcggttgtaggggccggttagggcataattactaggactacgccaatgactgtttacatcgtttccgccatgactcaatccgtgtcttacaatgcgtatgacacctctgatccgtccaatcctcgccttcagcgaaagattctgattcgtggccgcgccggcatcgcatccgaaacttccggcttcggcgacatgatttccgacgcggccgggcgtccgatctggaccccacagggcgattgtactgccgtgagcgattcggatttcgagctgcttcaggccaataagattttcatgcgtcacatggagaagggttatctgcgagtcgtgaagaccgacatcaccagtgaccacaagcggatttccaaagagactcgcaccatggagcgcgatggattccagcctctggatgctactcgcctgcagcagaaaatcaaggtgaccacggccagcgcttcccaggaacaagagttccggatttaaccgagggtttcggtatggtgattttcgacgaacataagtttcgcacgctgtttccggagtttgctgattcagccgcttatccggacgtgcgcctgcagatgtacttcgacattgcgtgcgaattcatttctgatcgcgattcgccataccggattctcaatggtaaagccctggaagcctgtctgtatcttctgaccgcccacctcctgtcgctgtccacgatgcaagttcagggcgcggctggaggtggcgtcactgccggtgggacccagggcggtttcatcaccagcgctactgtcggcgaggtcagcgtggccaagctcgcgcccccggccaagaatggttggcagtggtggctttccgggacgccttatggtcaagagttgtgggcgctcctcagcgtcaaagcggtgggcggattctacatcggcggtcttccagagcgccgaggcttccggaaggttggagggacgttctggtgatccctggtgcgaatcttctgcgaatggccttcggggtcatcggtactcaaattgtgaaatatcgcaagtttgagcagcgagtgaagaatgatcaagctcagtacgtttccatgttcgaggagcctttcgacctggcagcgtctgttcagcgagtccgacgcgatcagtatgtccagtttaatctggagttccaacggaattacgttatgatcttcgccaactttgagatggttgacttggatcgcgatgtggccggtgaccagttcctctggaccggaagagtctttcagctggagtctcaaggctcctggttttatcaggacggctggggagtttgcctggccgtggatatcggtgcggccaagctcactgatgacgggaaaccgactttctaggtgatgtatgtttgacggcgaactgatagcgaaactggttgtcgagttgaatgcggcgatgacatctgctcaagaggctttgcagttcccggattttgaagtcgtccagaaagctcagccgacccaacagggaacgtcaaccaggccgaccatctttttccagaagctgtttgacattcctcgcggctggcctgccaccgattggcacctggacaacacggcccgcaaatatgtagaaataactcgacagcatgtagagacgactttccagatcagttcccttcattggcagaatcctgaaatcactcacgtggttacggcttctgatatcgccaactatgtgagagcttatttccaagctcgatccacaattgagcgcgtaaaggaactggacttcctcattcttcgcgtgtctcaaatttccaacgaggcattcgagaacgacaatcaccagttcgaattccacccaagttttgacatggttgtaacttacaaccaatatattcgcctgtacgaaaacgcagcatattcggccgatggggtattgataggcatatgagtctgaggcgcgattcagagctaatcgccgcgcacctccagatgttaagagccatgcgcggcaggtccgtttcagccggatggtattccacggctcgatatcctgacaaggcaggcggatcggtcggaatacaagtcgcgagaatcgcacgtctcaatgagtacggcggaactatcgaccatccgggcgggaccaggtatattagggacgccattgttcggggccggtttgttggcgttcggttcgtcagaaacgactttccgggagaaaccgaggtaactaagcctcacagaattaccatcccggctagaccgtttatgcgatatgcttggaacttgttttccgcagatcgcgccgcaatccagaaccggatagccatgaggctggccagaggacagatcactccagatcaagctcttgcccagatcggcctggcattggaaggatacatagccagaagcatcaggaccgggccatgggtggctaactcagcatctacggtcaggagaaagggattcaacagaccgctggtcgatacggcgcacatgcttcaatcgattagcagcagagtaacataaccaggagatcatccagtgatcagtcagagccgttatatccggatcatttcgggcgtaggcgcaggcgctccggtcgcaggccgaaagctgattctgcgcgtcatgactaccaacaacgtcatcccgcccggaatcgtcatcgagttcgacaacgccaacgcagtcctgtcatacttcggcgcgcagtcggaagagtatcagcgggctgcggcttatttcaaattcatcagtaaaagcgtgaattcgccgtccagcatcagcttcgctcgctgggtaaacaccgccatcgcgccgatggttgttggtgacaatctgccgaagaccatcgccgatttcgccggcttctcagcaggggttctgaccatcatggtcggcgcggccgaacagaacatcaccgccatcgatacgtccgccgcgacttctatggacaacgtggcgtcgatcatccagaccgaaatccgcaagaacgccgacccgcagctggcccaggctaccgttacctggaatcagaacaccaaccagttcaccttggtcggcgccaccatcggcaccggcgttctggccgtggcgaaatctgccgacccccaggacatgtccactgccctcggctggtccacctccaacgtcgtcaacgtcgccggccaggctgccgatcttcccgacgcggccgttgccaagagcaccaatgtcagcaacaacttcggttcgttcctgttcgccggtgcgccgctcgacaatgaccagatcaaggccgtgtcggcctggaacgcggctcagaacaaccagttcatctacacggtcgctacttccctggcgaacctcggcgctcttttcaccttggtgaatggcaacgccgggaccgccctgaacgtgctgtcggcgactgctgccaacgacttcgtggagcagtgccccagcgagattctggccgccaccaactacgatgagccgggcgcttcgcaaaactacatgtactaccaattccctggccgcaacatcaccgtttccgacgataccgttgcgaacaccgtcgacaagagccggggcaactacatcggcgtcacccaggccaatggccagcaactcgcgttctaccagcgcggcattctgtgcggcggtccgaccgatgcggtggacatgaacgtctatgccaacgaaatctggctgaagtcggctatcgctcaagcgctcctggacttgttcctgaacgtcaatgcggttccggcgagcagcactggcgaggcgatgaccctggcggtgctgcagccggttctggacaaggcgaccgccaacggcacgttcacctacggcaaggaaatcagcgccgtccagcagcagtacatcacccaagtcaccggtgatcgccgcgcctggcgtcaagtccaaaccctgggttactggatcaacatcaccttctccagctataccaacagcaacactggcttgaccgagtggaaggccaactacacgctgatctattcgaagggcgatgccatccgcttcgtcgaagggtcggatgtgatgatctaatggtttgcggcggactcgatccgccgcaaccttccataaatggagtgaggaataagcaatgatcaacatttctgcgttcggctcgatctgccagttcacggcaagcagaactttcccgaacggattcaccgtcaccgagttcgccgacgatgccgatcccatcgacagcccgccgttcaccgctgccgataccggcgtcggtctcaacggtgacatggtagtttggaaccgggcgaacatcctggaagtagtcgtcaacgtcattccgaataccgagggcgagcgcaacctggcagtcctgctggatgccaaccgcaccggaaaggacaagtcgggcgctcgtgatgtcgtcggtctggtcgtggcgatgccggacggcagcaaaatcacctgcaccaacggcacccccatcgacggcgttctgatcaacgcggtggcaagcgtcggccgtctgaagaccaagccgtatcggttccgatttgaaaaagtgatcaaagccggtactagctgatgaagaaaattccgctgacagcagtccccaatcaagcgatctcatttaacgccggtagcagctattggaagattcgcctgtaccagaacatggacatgatgaatgccgatatcagccgcgacggcgtgatcgtttgccatggggtccgctgcttcggcgggattcctcttctccagtacagccatcagtaccgacctgactatggcaatttcgtcttcgaccgcgacgccgattggacgttgttcggcgacggaattaacctgttctatctggacggcgccgaattcgcagagtatcaggcgctcgccacgaggaaagaatgagcacatcaacgatcagaaccgggacgaacaatgatatccttttggacgacaatggaaacatggtcatcctcagggatgtcgaagcgtgcgcccaggacgttcgggcggcgatgctcatgcgcaccggcgaaaatattttcgatgtgaactccggcgtgggatatttcgaatacatcttctcgccgcagaaaagctatgatgacgctcgcaaatccatcgcggatgcaattttgtcctcgccggatgtgaccggcatcgagcagctggacatcgacatcaccggggaagtcttcggcgtcgatgctaaagtcatcaccatccacgggcctgttaccacaggagtttgaaatgagcacaatcagcatccaatacgccaacggcacccaactgttcctggacggcaaaaatccgccgcccctggacccgctgccctcgtttaacccgtctgtcgaagatctggaaggcctggaccgcgaaaagaacaccgacaagggcgactcctcgccggccggtcttcccgttcccccggtaaacgtcgattccaatgtcgacaacggcggaaccatcccggctccggtatcgaccgacgctcctgcggccgaatcggccccggaaggcgcccaggaagctcctgcagcgggccaaggcgacgagaaaggcgccgaggaagccccgactaccgccccagtagaaaaggccgaggaaacggcctcgccggccgctgaagaggcagccccggctcccgccaaggccacctctcgcaaaaccaccagcaagtaaggactcgacatgatcaacgtcagcggcttcggcacaggaattgtaatagtttccgcctcatcgttcccgatggggttttccttgtcgaagttcgctgatgatgagagtccgatatcctccaaagagctggagccgttcggatatgagatgctttatgacggtggcctattcgcctttgacaaggctgctcctctggaagtatctgtatccgtcatcgcagggagcgaggatgatattaaccttcgcatccttctcaattccaaaaagggatcattcagatttcttccgggaatcatcccggacatgacgactctcgtggccactcttcctgatggcggccgcaccgttctgtccaatgggactatcatcaagggtccggccatcgacaccatacagaacaccggacgacgcaaaggcaacacgtacacttttgttttcggtagctatcttggcgcccagactgcgcgtcaagccatttctaacgttatccaatcggtactggaggtggtctgatgttagggattttcaccagcctcctaagttcgcgatctttttcgattgtggaccaaaacacaaaccagctagttgctgcggatttgaggataagccgggtcaacacccggttttcttctgtagggcaacgccacatgctggaagatggcacgaccaagatggattccagaacgatccaccctatggaaatcatcgtcgaagtattttgcccttcaattgatgtcgtcgatcagatcaatcaattgctcctggatcgcgacacactgtacaaagtcatcactcgcggcatggcattcgaacggatgatgtgtaccagcgaagcgctcaatcagactccggatatgatatcggcgactcctgcgcggctgacattctcccaagttctcgtccagaatcccaagcctataatgttcagaaatgcaggggactcttctatgatcgaccgagggctggccctagctgaagacgtggttggctcggccggcgatctgttcgactacgcagtgaacggcgtccagaacgccgcagacttgttctgaggtgccaattgaactctttcctcaagtctattctcaacacgcctactctcaccatacgcgatgatgtcaccaaacttcctgtctggaagagtcttcaagtcaagaaagtggaaatttactcgccggcttccgtagtgtcgaaacctctggcgacgaaagaccagacggaagctcaagtgtacaccgaagctctggacattgatgtgaagaatggaaagatcatccaaccggtgcgactccgcatcaatgctatctgtccggacctgtccaccgttgaaagtatcatgaacgccttcaatgataacacctcgactttcgctatcacttctaagtcgatattggccgataaaatggccatcatggcgctcgatgtagatcagtctccagacatgttgaacgcggctgagatcaatatggaattcgagcaggttgagcctccagtattgaataaattcgatcctgcgttccctcaagatagtccgacttatggggtacagattcaatctctttctgatgctaatttgctggatttgggcgccatcggcgattcgatatcttcggccgcaaaatcgctatataatcgcgcgaccagctacttctgaggatgtatcatgcttgaaatcaatcttcccgatggccgtcaaactcgcgtacaaatcgaggcgtggtcggcattggatggctgggaactccagcgccgtttcgtcgaattcgctgtcagccaagattccgacttccgccgctctttcaccatggaaatcctgggctatgcgaaagtgctgcttggcgacgatgacaccggcattccgctgaccaccgcggcagtcatcaacaaccacctcggccactggaagaacgtggaactggttttcaactctgttctcaagcgcaatggcatcgacccggccacgcacgccgaccggccggactattgggaacaagtcggatcgcagatggccatcgcatttctggccgaggcgtccaagctcattggtccagcaatgaagatcgccgaaggactcgccaacaagccggagtgattcatgtctagtgatttggatgaattcatacttcggtatgaggccgatactgccagagccgagcgcaatctggagcgcctccagaaccagatcaggcgcgtgaacagcgcatcgacgagtggccttcaggatttgcgccacttcgcagacggcgcggccactgaactcggccgagtcgttccgcagatcgattctgtgacgagcgcgattcgcgggatgaacgcgcaactggcgataggcgccactggcgtggccctggtcgcggccggcgtcaaggcgttcatgaacaccagggaccagtacaatcagcagcgcatccaggcgatggacatcggcatcgccccggcacgcttggaagagtaccagagaaaattcgttcgccagtccggtggaaccatcagccgcgagcagggcgcggagatgaccaaaaatctggcagacactttccggcgtgcttatcgcgatatcgggcgagtcggcccggaagcgcgaattctgcgtatggccggcgttgatgtcgggagcttccaaaagggcatgcggccgctcaacgacatcattactgatctggccacgaaaatggccaagctgaagccggacgaaatttctgcctacgctgatgcccttggcgtctcgcgagactacctgagcaccctggctaagatcggcccggccatgggaaaagtcaccgagatgacgactgcggaactccagtccagggtccagggcgagtccaacattcagaaattcaacgatgctctggcgaatctcaaccagacgttcaccaccctggaaaaccgagtcggcgaaaagctcgcgcctgcgttcaccaagctgatcgaaatcatcgacaagatagtccaggctattcccaatgaagtggaaagcttcgcgaaggacaccaaatcccgttgggaagatggagtgctcgggaaggcgaccgttggcagtgatatcttatccctcctcagccccggcgccctgctcggtcgcctggcagcgtgggggactcgtcgcggcatggaagaatcagggctcatcgacaaggacaaggttcccggcgctcaaaccagcgaagacctggccaagaaacaagaagaccaggacaaggctactaagtccatgaaagagctagagaagctggctgaccagaccacgaagtctaccaatgattttgcggtggcgatcaacatgttcagtggcgcggtatcgtcgttcgcgaatgccgttgacgagcgccaagcttgggcagcctgggcgggggaaattggtcgggcggtcggtatgggaagcaccgcgccgacttcgcgggcaaccggcgtctatccgcacgcgatctatgatcagtcgaagagtggcgcggccggacaagtcttcggcgagccaatcggcgcccagtctcttcgcaatcgcatgttctcgccgcagcgcaaggccgaaccggtcaccgttccatcgtacatcaacgacatcatcaaagatgcgtcgaagatgtacaacattcctgagctggacatcaagaaactcatatacaccgaaagccgattcaacgccagggctaccagcgaagccggagcgaaaggcctcatgcagctgatgccggaaatcgccaaggcgtatggtataactgacgtatatgaccctcgccagaacatcctcggcggaacgcgtctattgcgggaaaacctggatcgagccaatggcgacatgcggctggccttgacctactatcacggcggcctcgatccgaagaactggggaccaaggactcgcgcatatccgggtttggtgatgagcgctccaatcgagctgatggaagaggcgcagcgcaagcagaaggctgcggccatgaccgccgccaacgagacgttcgctccggaaggcggcgacatgtacattcgcccctatgatggcggacgattggaaactccagaccagggcaagaaggaagatgagcgccgcgaagcccgtcgatatgacgacagggttgtgcgaccggaaattcgcatcatcgaccgcatgccagaccgcagcgacggcgaaatcctcaagatgtctagacgtcaagaggccgaccgggcagattctggattccggaagttcccgaatcaagttcgcggcgagaccaagcagaacatccaggctcaactcactgcaggagccatcgcgcaagtgatcggcgttaaccccaaccagatcatgcgccgcgaaatcagccgttctgacttgctgttcggatacaaccaagccatcctgggcaagcaacaggagatcaaggccgccgcgaccgaagccaacaacgtattcctgtctccagccaagcttgccgaagccacggccaaggtgaacgccgcatcgcgagaaatggatattctcaggacgtacggcgagcaacttctgaagagcgctccagagcgcggccaggagctgaccatcggtcggatcgacatgttggtcaacgtcaccggcgcgaattctccggaagaggctcgtgagatattcagcaagcagactgcagaccagctgactacggcaatccaggacgctcaaaacgattccgcaactaagatactctactgatgaaaaagagaattctgcgagtaacattcaacatgccttatggacccgaagtcatccgcgaagatctggatgttcgggtccggattatgaaggctgcgttgcggattcagaaccgggcgacgatggaaattttcggcctcaccactcagctgcgcgagtctcttctgtcgcagttcaccgcgtggaagcaccggcaacgtcaagtgggcagggaagatgaattgatgatcaaggtgtcggtggaagccggctactctgaccaggggcgcgagcaagtttccagagtctttgtcggcgaagttgccattgtcgatatcatttctccgccacctgacattggaatccgcatccagtgctataccaggcaaatcgacaggacgaagaccattcggaatatgccgcccgccaacacgacgtttgtcaagttcgtcgagtggggcgcgaacgaaatgggattgaacttcatctgcgataccagttacaacgatcaagttctgaagaatccgggccggtctatcactgtcgcgtcggcaatcctggcgtcgattcaggatatgtacatgccggacgtggccgcgttcgtcgatgatgacatattgatcgtgaaggaccgcgataaagtcattcgtccggatgaggtgaccaacgtcaactcgtttgttggaattccatcttggtctgaatggggcgtggaattccagtgtctgtttgagccatcgattcgtgtggctggaggcgtagcggtcgaatctctcatgaatccaagtgttaatggtaactatgtaataactgctctggaatacgatttggccagtcgggatcggccgttctatatcaaagtcatggggagtccagcagcataatggccagggaaatcaaatcattcaacatgttcggagttcactatacttcgcggcaattctctgctgtcgatgggctcagcatgatgtcggaaattcagaacgtgccgccagaagaattgctcaagggtactgatgtattggcgcatccggaagaccatccggaaggcatctggcttccattgactgctgcgaacatcaatctttatgtcgttgatcgagcgaaagtaatagctcccgtacaagttcttgcacttctgtccgaagtggtaatcgactggaactttggttttctcaaagactggaccggagtcaagattccatccagatttgtcgaagatatcaaaagcgtgaagacggcacattcaccttctgtagttgcgagcttggtcgcgaacggctcagcctctatgcgcgagttggaagagtattattcgactcaagatgcgtttaagatgatagatatcatgacggcgaagagcgtgaacgaggccttggcgtccgaagcatcgcacaacagaatcaaaaaggataattcctaaccgggcctgggaaggctatactagacctgccaaatcagaggctttcccatgtccaatatttctctaacatcagcaaaagctcccgacaggacgcgactgatcgccgctcttgacgctcggtcgcggcgggatgctctagatttcgaagtaatgataccggctcaggttgttcaatatgacagggccgagaatatcgcaacgattcaacctctcatcacctgggttgacacggaacacaacgccgtccaaaggcatcagctggttgatattcctgtaatttccatgggggctggcggattccacataagtttcccgattcagcaaggtgacataggctggatttatgcggccgaccgcgacacatctcagttcctggagtcgttgtcaatgtcgaagccgaacaccggccgcatccataagttcgagcatggcctgttcatcccggacgtattccgtcgatacaccatcaattccgaagattcggccgctatggtcatacaatcgacttccggagcgaccagaatttcgattcgcggcgataacatcaagataactgcgccgtcgaacgttactgtggatactccgcaggcgaacttcaccggcaatgtgactatcgctaacaccctggtcgtaaacggcatcaacgtgaacaaccacggccacctcgaaaacaacccgcctgatgcccggacgaaaggcggcatgattgcttaaggagattttcatggcaagttttgatttttctgatttaacagcgggggggggttgtaatggctaactacaactacatcgtcgatactggtgtgatagtcgcagataccgccgacgttctgagcgacgttgaggccgagttccgcgccgccctcggtgccaatatcaacttggccgcgagcactccgcagggatcgcttgtcgcggccgaggccatcgcccgttccagtgtcatgcggaatgaagcgcgaattgccaataccataaacccgaacgtttcattcggaacgttcctggacgcgatctgtgccttgatggggatcgagcgcggttctgatctgtcaaccttcggctatggagttcaagtcaccggccgcagccaaacccgcatttccaccgggtctagggtccagactccggccggcgcgatcttcacagtgatgagcgatgtcacgatccctgctggtggtgccgcgaccatcgatatcaaatcgcaggagtatggcaacattcctctgccggtcgggaatctcatcatcatcgacggaacaattggatggtccggagcaaaagtcatcgcctccactcgcgtcgatccgggcagccgccaaatgagcgatgcagagttgaagaatgcccgcgttaatcgattggccatccaaggccgcaactcgactatggccatcaaggcgtatgtgagcgccgttccaaacgtcacgtcggtgaacgtaatcgagaacaacaccggcgccgttcaagtggtgaatggagtctcgtttacccttccgtatgctgtttgggtctgcgtcgccggaaacccggataaacaagcagtcgccgatgcgttgtgggccgctcataacggcggaactccatgggactatggtgcgacgaacaacggcgtcccggtggacggtccgaatggcgttcctgtgcgcgatccggcgtccggtcgaaagtatgtcgtgaagtggaccgctccaattatgtacgatggatatgttaacgtaacagtccagcaaggttcctcctctgtagctccggaagccattcagaacgcagtggtcaattacgcccaggggaaagtggaaggggaagaggggctggtggttggcgcgagcctgtcggcattcgaagtcgccggcgccatcgctcgcgaaattcccggcatctacatcaaactctgccaggtcgcgtgcgtcgcggctggctcgccggctccggctccgggcgatttcacttcggaatacgtcatgagcgcattcggccaggctaccatttccgttggtaacgttcgggtgactttcgtatgactctgcctgcgtacaattcggacatccaacaagctctgaaatggctccataaccaggcgcctggaatcaccggcctgatccagagaaaggcgcaatggtatgacagattcagccgccaattctgggccaactgggagcgcgacgttttcaacttgaagaccgccaacccgttcggccttatggtttggtgcatcatcctcggcacgccttcgaaagggttcggcctttatccaaaaaacagttcttgggcattcggtcggctacgccagaacttcatctatagcggtacacaagtcccgccaccggcagacgcatcgcctggcggcaacttctacggtggcggcaatgccgaaattctcaacttggacgaaatcaggaaagtgcttcagctaagatatgtagcgctgatttcgaacggctcgattgcatatatcaatcgcatgcttcggtatatcttcaacgatgatgagccgtgggacgaggcggccgggttgtacttctacctcatggactcgaccggcgagaatggtcctgtggaggatttggccgtatatcggaaagattgggaagggatggttttattgtctagctcgcccaggacgaaccatgtgctgatatcgactcctgccagcgacgccgattggccaggagtcgatccggccgcgagcggaattccggtaacggtcgaaacggcgtccgctacggccccggacggctccgctacggtgtgcaagcttactaagccggccgggagtaccgcttacgtctccgcgccgatagatgggacgctggggtccggtagcactgtcacgttctcgttcttcgcgaaagccggctccacccgtttcattgcaattcagtcggctgccgatttccccagtcgagccgatgccgttttcgacctggattccgggaacgtaatcagcgatcagatgctggacagcagcgtggtaagcgcccgaatgattcgtctggaaaatggctggtggcgctgcgttctcacgaccaagaccgtcagctcttcgttccgcgcggcttacatcgctccggcagaaaccaacttcagctggattgattcgaattccagcgcggcgattgatgtgcttatctggggcgctcagatcgaactgggtgatgctccaaccggatacttggagactaccggaacgcccgtaaccatcaccgattacgttttgcagagcgcccagaccggaacggtcaagttcacacagcctcttccgaccggagtagaggcgtattggactggagactggaaaggtgggtctgcgaccgagccggccagattcgcagtaggggatgggactcaagatacattcaatctgtccagccctgcatacatcggcctacccactagtggggcgttcaagctagaatacagagttggtccggcgcttaatttgtcgccgcaattgatcaacctcatgaatgaccgggcggtcggtatcatgccgacttgcgccggttgcgatgtaaaagtcattcaggagtaatgacgtgatcacacccgaactgatacccagtccgtttgctgcgcagggcgacaaagacccgatcccgcaaacctcttccactggctttgccaaccttcgcgacggctacacgccggactacgaaatcagtctggcgtcgaacaacccgcaggccaaagcggtcgagcggaaaattcaaaaccaactcttcttcatcgcgacccagaacgcacaggcgtggcagcggcaaatggcgccgccgtggtttcagggcatgcctggcggctacgaacagaatgcagaagtcgtgcgagtcggcaatgacggcataatgcggcgttatcgttccatggtgaatgccaacgcgagcgaccctctcagcagcacgacttgggaagaacaacccgcatggtcggtgatgcgctccaacataccgatgccagctggaggcccaggcctatcttctggcggagaagtcatcacgaccggccgcaacttcaatgacctgttgaatgggacgtgggagttcttctctgattcagtggtcgtcgcttctcagaacgcccccgtatatcccgcttcggctggtgcagcagctggaatgttggaggcgaaatcctggatatccgggtccaatacattctgcgttcaacgctacactgatcgcgtcgggaacgtcgctgtgcgcgggcttaatgccggggcctggaccaactggatgtacgcagtaaatgtcatggccctccaacaaggtcgggtcacctatggagtcgcggccggatcggcgaacgcttacacgttgacgctagttccgcagctccaaggcggcctggtggatggcatgattcttcgggtcaagttcaacaccatgaacaccggcgcctccaccatcaacgtctccggactcggcgccaaagccatcgtcggcgcggccaacttccctctcaccggcggcgaacttggccaaggactcatcgctgagcttgtattcgacgcagcaggcgaccgctggagaatcctcgcaggcgcgccacgcatccaagttggcaacgccgatcaagattaccaggcccccagctggaaacaggtgaaggattacgtcgcgtcccaaaagctgactgaagtggactgggctgacgtcgtcaacaagccgaacgtcgctatccaagacaccacgccgtggttcgccaatctggagctgtccgatgctcggcctttcatcgatttccacttcaacagcaatcgcgccaaagacttcgactatcggctgatatccgaagcggacggatcgctggctttctattcgcggcagggatctgctgggcctacccaggacatcctgttcaaccgaaattccgtgactttcttccagccgcgactcgatgtggcgaaaaacctcgcgtacatcgcgaactctggccccctttggcagaacaccaccgccgatcagcccggttggaaattcacctttgcacaaggcgtggacgcgaacaacaacgcggtgatcgcagtcaataccaccaatccggacggttcctatcgttcacaggtcatgcgatgggactgggcgtccacgaacgtcatattcaacaaccgtccgctcttcgccggtcaatacaccccttgggattctgggaacttcgatccttccaccaagttgacggtgaatgccgtgaaccaaatcgccggcccaaccgggattcggaataccaacggcaacaccggcaacatgaacacctggggttccggctccacgacggcatcctatggcaatgctgccattcaaatcttcggaaaagggggcggtgagcctgccgcgatctatttcgacaactcccagaccggatggtatctgggcatggacaaggatggacagctcaagcgggccggctggtcgctcggcaataactcctatgtgatcaccgacgaatccaacatccgaacccatatcaacacaatggctgcgcgcccgatttgggggaatgtcgagttctggggtccgtggaacttcgatccgaatcttaaactcactttgaacgctttcaatgatagctcatacaccaggatgaccaacagcggcgcgaaagacgttggtatcgcgtccatgacgagttatgctgatgcggccatgtcattcttcaactatgaagcctcgaatccgaccgggccgcgcgcggccgttatttcgttcgtgagaaatggatcgcgtggagtgctattcggcttggattctgacaacaagctgaagtggggcggatattccctaggggccgtcgcgttcgagattgccgactccaacaacctcatgagcctgtggtcatcccacgctgccgcgccgaactggaacgggcagaccatctggaggtcgggaaacttcaacccagacaccaaggcgactttggcagctcgcaatacgacgtcatcccctacaatattcagttatggggcgtccggaatcgcatcaaccggacaggtcggtgcgttggttgtggaaaacaacagcgtcaccaataccgcagccgccatcacgttccattcgccgcaaaaatatcaggtcaacttcggcctggatgcggacaacgtggtaaagatcggtggcggcacaatgggcggcgtagcatatcccatcatccacgccgggaactacaataactacatcaaccaggcgctggttcaggtgggtcttggcggagtcggttcctatgcgatccttgcagtatttgacacctccgcgccggcagcgtccattgcccccggaacgatcatggacagttccaagctgttctattcgtcctgcgattcgacctatcgcagcagcgccagtccgacgggcacctggcgctgcatggggtatgtgtataaccgagactccaccaacggcgactcggcatccctattccagcgggtaacgtaacatgaaatggacgcggatcagaaaccctcgttggctggatgaaacaaacatccacgccatggtgactttcgatgggatcggggaagttcctttcaccgccaatccgcacgacgtggaggcccacggaagggccatccacgctgcgatcctatccggggcgcacggatctatcgccccggtcgatgcgaagcgggagcaggccttgcaggacgctatacgggccagggaaaagcgggctatccttcgtgatacccgctggcccatagatcgtcacgacgagcagaggcggctgggtatcgaaaccacggacggacctgggttgatagcagcccttgttcactggaggcagcagattcgcgattggaatagcggggatcggccgcgacttcccatggctctgaaaacgatgttcaaaaatcaggagtattgatgaaaatcacgaaggatgttctgatcaccgggaccgggtgcaccacggatcgggcgatcaagtggctggatgatgtacaggcggccatggacaagttccacatcgagtcaccgcgagccatcgcggcctacctcgccaacatcggcgtcgagtccggcggactggtaagtctggtggagaatctcaactacagcgcccaagggttggccaacacctggccgcgccggtacgcagtagacccgcgagtccgcccgtatgtcccgaatgctctggcgaaccgcctggcccgtaacccggttgccatcgccaacaacgtgtacgcggatcgtatgggcaatggctgtgagcaggatggtgacggttggaagtatcgcgggcgcggcctgatccagctgaccgggaagtcgaactattcactgttcgccgaagactccggcatggacgttctggagaaaccggagcttctggaaactccggccggcgcgtcgatgtcttcggcctggttcttctggcgcaatcgctgtatccccatggcggagtccaacaacttctccctggtcgtgaaaaccatcaacggcgccgcgcctaacgatgcgaaccacggccagctccggatcaaccgctatatgaagaccatcgccgcgatcaatcaaggctcctgacattccacccaaagaaaaggccgcttattcagcggcctttttgctttctggctttgcctcttcaaccatcttgatctcgaccggcgcggcggactcctcctgagttaccgaatccacatagttccctagtgaactcagaacgccgattaacagcgctcttactaccttgtccttgactgtctcgcctatgatcttggtcagaacggatatcaactcttcccggagtcttgggctgattcttggccgaaagcgcttgcgatgctctttgcgtttcatgtttagtcctctgtctgcggtcttctcctcaccccgataatggcttggggatgcgctgtgttagtcggaagggtcgggcgctattataacccgtcgaaaatgctcgcgcttaactgtttaacgatacgcaccgcgatactaaatcgccttctttctggccaaggaactctggcggcctggtccggtctaaggcctaatttgtcgacattaaaacgagaaaacccggatcgcctgtaggacaaggcgtccgggtttatttcgatctagtgtacgctagaatcagtggcttccgccccaaccgtccagccagcaatcgaagacggcgtgtctaggcttgtccttggcgccatgggagaagtgcttgaaccggatgacctggcccttgagatactccctgtcattccagcggcgctgtttctcgtcgtgggtcaggctggaggccgacacgttgaaggtgactccaggccacagacgttcgttgcggcagacgaacgcaccgaccattccggacggcgacaggttttctgcgtggctggagcgggccgtgtggccaagttcattgatgaaagcttcattgttgttgtgcatcaactcttccacgtcgatgatctcagcttcatcgtagtcgtatcgcttgactttcacacagtgcccttccttggcagtcgagcgaccgaacttgtacagtccatcagcgcgcttgcccatggacccttcgaatcccagcatcgtgtggcggcgctcgacttcgctgaactgttcgatggaagtcaccagttcctgctctaccaggtgaatcctctcatagccgaggcagttacgcaggaagttcacgcgctcggccgccctggctaggcgatcttcggtcggtgcgcgaggatcggtgaaatcatcgaacacatggaaagaccagtccggctcaccgctgtggcggcgaagatcgccggacgacttctggaaaactttcgggtcgctgatgtcgccgcagaccagctcgccgtccaggccgttgaacagtttatcgctgaggtattcgtagatcgattgattgttctgccgcttgagttgacgagtcagcgcctcgccttcgaatacgaagcagcgaaatccatcgatcttcggtgagaaatacatcggcagttggccttcaagcagcttcgggtcaaaattcgatgcgagcatgggtttcatacagttctccagaaaagaagcccggcgaaccgggctaaatggcggtaagccggctcagatggtttcgttggcgtggttcagttcggccacgatcgacgcatagcgctcgtccgactccttgatgaacacgccgtcgtacatgacgcctttgcgatccttgatggtgtcgtaggccgcagcgtagcaggcgagcatggtagtgtcgtgctcttccgtcacatcgaacagagtcatgacggccaagaccaggctcttgatggctaatccatgatttccgcgtgccagcgcgccggccagatgtccgaggtgctgcaaatcgtcgccgtaggtgggatgaacttcgacagtctcgctgaagaccgatagatgatcgaacagattttcaccgagttgcgcggccatgaccgtggcaaccaccattacgtcgccgatgccgtctttcacctcgactggtttgttataaacccaggcttcgcaaacttctgcgaactcttcgaccaacttcaggaattgatccttggccgaagagcctttgatcaggttccggtcggaaccccatttaacaaccaggtcgtgaagttcgcgactcatgatttgttcgatattcattctttcgattccttttggatttgggatttgactgcgttgattatggacgccgtgctctggcgcgatccatccttggtggtgccgaagtagaaggccatgaccgacttcagctcggcgaaccaatagccgatgatggtgccgatggcgacagaggatgtcgggtccatcagagcctcgcggccgaaggtgaagattgcgatgatgatgagaatggagcccgtcagaagagcgaatgtaatcgccgggcgaacgaaatcgttctgctgcgcggcaagcctcctcgccgaatccctgtctgccgcctctgcggcgaactggctaagctcggcctggagctgattctgctcagactgaaggcgattttgttcggcttgaatcgcaagctcctggagacgaacgcgctcggcgctctggagttcggcgaggcgcgctagagcttccggattcgcgtctagagcgctagcgaccgaggctgggtcggccttcgaccccagcgccgtcgcgacgatagcgccaacggcggcgcctgcaggcccacccaggagcgaccccagagccggggcagccgcgccgatcttactacctatgtctttccagtccatttcgactcctcaaaagaaaggcgccattacagcgcctttctccggccggtgatttagaactcttcggcttcggtcgcatcgccgacgccaccggcgtcactgcgaggctgttcctgcttgctgtagtccaccttcacctcgccgcctacgaacgacttgtacaggtcggccgcagccttgaagtgatccgggttcttcaccaggccttccagctcgaactggacgccggaccagctgcccttgtcgttcgacatgcctacggtggtcatacggaccaggttggcgaaagtcggcggggtgcgcaggccctgcggggtctgaacctttttctgggacagcgcggtcatgagcttcttcgaggccttgatctgcgaagacgacagggagatcagagcctggccgaaatcgccggtgtccggatcgatgacgatgacgtaatgaccacgggtgtcggcgaagtagtcagacttcttgtcgctgaccgaaccgtcttcgttcggcgcgtacaggcgtccttcgacttccttcaccttggtcgggtctttcatcatttccttgaagtcttcgacgctgatggcacccttgaaaccgccctcggcctcgcgaccggcccagcggatgaactcgcggcggtacgcggccggaatgatcagcaggccggtcttgccgtcgtaaaccttgccggtgacggtgttcaggaacatgccggccttcgcgccttcgatgtacttcgggtcatcttcatcgacctggggagacatcttctgcaaaacctggatgaaggggatggcataggactcggcatcggcgccttcgaagcctgcgccgtcatacgatcccaaatccatgaagtcgggaacttcggtagtcgcgacggcgccgccaccggtggcaattgctacggccttggtttcttcggttgcttcggaagtttcggttttcttaccagccatgttaggctccttgtttgtcgaatttcagttatcgctaactgtgggtttataataacggaagttgcaactaagtaaagcaaattacatatcaagatttgctctttttcaccttcggtttcgtgatcttggcctctttgtattcgtgtacgccgatgaaatctggcagctcttcgcccttctccaggtactcgcgaccgaacgcctggagggtctggtaatggacatcgcggttgatggtggcgtcatagccggcttcgatgatggcctcggccgccttcttcgcatcttccatttcgccgcgaccgaattcggccagaaccttggtcttgatgatgccgtcgttgtcggtgtcttccagccacttccagaacttcgatttgttctcttccttgacggaaatgatggccttcggctctacttttacagtgcgaccgtccgccagagtagtggtcttctgaccaagctcctccaacagctccggaatggtgttacgcttgagggtcttcagctcctcttccttttcggccagcgccttttgaagatcgaggatttcgccgtccagctgcgaagccttgtccaccaagttcagcagtcgatggccgatgtcggtggcttccaccgccatttcatccatgacgccaaaatagtcgatttcgcccggcgcgttctctttcaagtattccgggatttcaagctcttgctctttcatgtccgcctccaacttagtgatgttcccttacttgaaccaagtattgagtagatattatgccgcatcttccttgatacggctactgatttacatattaaatttcgtcgcgagtgctaacgtcagcctcaaacacgccatcaacgacataacttgccaggttgcgtttccactccaagctgacctggattttctcgtcgatggaatccagacagatcaggtcgaagtacagaaccgagttgacggtgccgattcgatgatttcggtcttcggactgcatccgcagctcgttgtcttcgtcggtcgtgtagtagatggccacgtctgcggctgtgagcgtgatcccgatccctgctgcggccgggttgcccaggaacacctggacgcgcttggcctggaaatcgtcgatcaatttttcccgctcggcctctttggtctcgccgtagtaggtgccaaacgaaatcccttgggcctccaaatacgccttgatctggtcgatttcctgaatgcgcatggcccagacgatgatggaacgctccgggtcttcctccagcagaccctccagaagatcagtaaacacggcgaatcgcgggttgtcttcgggcggcaggatcaccggctcaccatagacgttgatatagccggacgccacttgcttgagcttcgagcgcgctgccgcagcatcgaaagatacatccagcatgaaatcttcgttctggagaacgaagtgatagtcttcttccacgcgctgataaacctttcgttgctccggcgacatttcgaagtatatgcgcttgtacaccttgtccggcaggaatggcaatgcttccttcttcgtgacccggaagctgtgcggctcgatcagggatcgcagcttgtccaggttccggaataccgggcgcccataatcgtctttttcgacgagttgcggcggcatggtttgcttcccttccagcttgcgcatgatagcgatcattcgaggatcgtcactgggcaccaagacggaaaattcggccacaaacgcccgataggatttagtccccagaattccattccgcaagaattggaactgcatgaacaaatcggtcggcgcccgcgtcagaggagttccggaaaggatgcgacgggccacggccttctcgcccagctttacgatctttttcgcacgcttggcttgtgggtttttgatcctcgttgactcgtccacaattgcgcaaactttgaatgtatcaaggaatcgctcgacctcatcatagccagcctggtggttgattgcgtcaacgttgatggcgaagacgcgaagaactttttcatctgcgaacgtctcggaatacagacggtccaagcgcgccctggcctttttggaagtcggtcggccgcgccaatccacgctcaaagtcttgatcgcgacgtgggtgggaatctcgcgcagaatccagttggtgtggacgcctttgggggcgacgatgagcagcgcgtccacgcgcccctgtaggaagaggcgaacggcatcggccaaagtcgtccaagtcttcccggtgccctgctccatcaggtatgcgaagttccgtttgttcagggacgctgccagggcattgaattggtgctgcatggcctcggtcttcatgcccttgacgggatatgttttggctttcatttgttctccaaatcggcgaggaactgaacaatgttatccagtccttctgcatagctcgcaacttccaccaagtcgcggctgttaagctcgaacaaatcgaacataggattcagcagcagccaatcggttccgatcttggccaggacgaagccccggccaccccagccgatccgctcccgaagaaaagggatttgcccaggttcgaaacatctggccattgggcaggtggaagcgcgtttcggccactcctccaaagccttgaactcgacccagaactggacacctcgacgattcaggcagatcgaatcggacatgccagaccgccgcgtctccagaaagtcgatcaggattcggccgagcgagcgctgcttaaacgcattcgccgctttcgtttcgcgatcattcatcaccttcgccctctttggaaactttctctgcttgtgctgccaactttgacttctcgcgctcggtcaatatccgcttgacggccttcacgatgaacatgtcgatgccgctgagcctccatcctttgatcaggaaccaagcgccggtcggcgtcccttcagcaatctgctttccgtattgcagatatttttcaggccgaattctgaaacgtatcggctgatcaaccgagtcatcaacgcacatgatgtcgagaaactgcgactggcccttgtacaccgggtttttcccttgatcagccctcttcttctggcgaatcggttcgttctcatcagacagaacttttttcaccatcttgacaatgaccagaccatcatctccatcgcggatatcccgaatgttctgaatggggtttccggaagttactccaaccagctccggattgtcataagcatgaccccagagcgtgtgagcttcgttcaaatctgcgaattgaacttcagaattcgacagactcgcggcgactttctcccaatcctgaagcgtcttcaggtgggtgcctgccagctctttatattgagccttcagctccttaagatcggccttcaactccttcagatcggccttcaacagtttctccagttctttgtcttggctgattttcgccgaaagaatctgggcttccagagctgctacatcagcagccttgtcctcaacatcctgtgccgatatcgggcaattggccagggcgatcctcgcggccttgacttcctcacgaagacgcaggaaccgctcggccttcgccgggccgaagcctttggcgttcatgatgccgccgatcaggcgcccgtccgccaccacccagttgagttcggaatgctccgggtccagggccgtatattctacgccttctttggccaattcgcgaaggatagacacagtttgctggtcgtccttcgccgcccgaaggcacgcggccgcgtattccaggcgatgataccgcttcatgtagcaagtccagtatgtcaccacggcatagcttaccgagtgggagcggttgaatccccaggcgccgaatgtcaccatttcctgccaaactcggtgagcgtcttccggggcgacgcctatggtcttggcgccctcgatgaacaattcccggcgcttgttgaaaaattcttcgccctttcgcgccgacatcgctttccggatcgccgacgtttgttcccagtcgaactgaccaatgtccttaacaattgacatgatctgttcttggtacaggaacacgccatacgtccccgacaaatactgctcgacctgcggaatggtataggtcacaggctcgcggccggccacgcgctcgatatacttggttgccataccagaagacaacggacccggacgggcgagcgccgtgatgtggtcgatgttctcgaacgcggtgatgttgatcgcgtttgctaccgagcgaacggcctgcccttcgaactggaagatgccggacattttgtcttcattgagaatgtccagaaccgccttgtcgttcaaaggcaagtcgtacaactcttgcgcggtcacgcagttcgcgtcctggatgactcccaaagttcgaagtccaagcgcgtcaattttgaggagattcagatattccgaatcgggcttgtcgagctgcgcaacgccttcggaagtcaccgtacagaagtcgatgacttcatcgttgcagaccaggatgcctgccgcgtggacgccagagtgggatgggtgaatttcgaggtcgcccatgcaggcggacgcgatctcatacttttcgcggaagtcgcggccgggctgagttttttcgaaagtgtcctccaatccttttccatatcgttcgtccgccgatgtatattcgatgatcgagtttttgatgttgtcggtgtcgtggaatggaatgccgaagcgttttccgacgtgagcgataaccgacgcggccttgagtgtgttgatgttacccaacttcacaacgttccaagtgccatacttctgctggagatattcgaacactagatagcgatgggtatcggcgaagtcgatatctatatcgggaagatcggaccgggaaatgtcgataaagcgctgaaagaggaggcgatgcgggagcgggtcaacctctgtaatgccaaggagatagcagaccaaagagccggccgaagagccgcgagctggaccgacaagcatgtgcttcttggcaaacgcgaccagatctgccacgaccaggaagtagctgtcgaaatctttcagctgaatctgcttgatctcttcttggaatcgatcctcatactcctgggtccattccttgatgtggccgcgactgaggcggtaggcttgcccctcgcgagccagagcgacgatatcaccatccaagtggatcatcggcgccttcgccagtttcacatccgccaaccgctcgactaccgcacgagtattggctgcggcagtatcgaactcttcgcgagtcatgatgtggcgtaaacggctccacagctcctcttcggtggcgatgtggcgaaggccgaccgattcccgcaccttccaggccgacgcgaaatcagcatggtcgatggatggcatgtcgttgtaagaggtaattaccaccggctttccgaatgccctggccgtctccatagcgccgtgcgcggcgaccatcgacgcgggattgatgtcaatgtagtcgattccggccagatccagatgggcataggcctcgccagcgaatttgatgacgccgtcagcttcctggaattcttgcggagtcaatccttgattctggaccgacttggaagtcaagcggtagaacttcttggtgtccttggcgagcacccaggctttgagcttcaactctttctcgccatcgtcggcgcatttgatcgggatttccatgccgaatccgcgaggcagttctgccttggcagcggcttgttcccaacggacgtggccccatgttccgtcatcgacgatggcgacgaatggggattcgatctctttggcgcgctcgatgatctccgggaatcgaccatatgcggcgccgtaggagtaaccagagcgaacgcggagctgagggaaagacatcatgcggcctccattgcttgatacgcccgatacactcccatgcgcttgcagacttcgtggagcagccgcacgtcgtcgagcgcccggtgtttctgtacatatgggccgcagtagtgctcataaagatgttgcaaccgcatgcggtggccgaacaacggcgccgactcttccacagtacagatatcgagtgatgggaagttgacttcttccaggccgagctttccgcgagccaaatcgcaggtaagcatgaacttatcgaatggcaggttgtgggcaatattcgcgtcggctctggaaaagaagtcgcgaactttctggcgctgatcgaggaaagatgggtgcttgaccaggtcttcgttcttcaacccggtgatcttggtgatgatttcctcgataacgattccaggattgcagatgaactctacttcatccaaaatcttttcgccatcagttatcacgccggcgaattcgatgattctcggctgctttctcagactcaccctttggtggaacgggagccctgtggtctcagtatcccatacagcgaatatcatgtttgttccctcttatgtcgaaaggccggctgctttcgcgaccggcctgaggagtataccgcgacggctgaagatttacgccttctgtccgtctttcggcgtgatgcggccggagcgcatggtggcgtgaacaaacgccgaatagttgatcgagtccaaggccgaatcggcatccttgaacccgctattcgccaggcgagtgagtttgcccaccatgtgcatcacgaacagggcgagtcgatggtcatcggcggttttcgccaccaggccgttcgggaagaggatttccatgatctttccgtacatcagatcattgcgaccataggtgctctggcggtcgcggaagacttctgctgcggcgtacagattgttgagaacatcttccgcgaaatcatctggatgggaatcatcttcgcccggccagacggattccatggcgaacggcgcggcgtcttcggtcgggtcttcggactgagccgtttcagcgagcggagacggggctttcgcaaacgcctcgtcgagggtaggggcggagttcggggcggccgggaacggctcgcctgccatgtcgttgggcgcgctatcggggtcgctatcggccgcgacggcgaagaacggcgcatcgcaaccttccaggttcaggatgtaggagtcgatccccaggctattgtaggcatcgatgatgtcctggcgatcatcgaacgccgcgacgatcttggtgacgccttcgattttcttcagtatgtcgagcgcgactgcccgcttgaactgaggcgccggctcggtgttaccatacggccgcatgatgagttcatactcgcgatgttcggcgatgccgagttcgcggtggagcttggccctggtctggaaaaagtggttgtcggttcggccggtgacgaagaaaatcatgaggtcggcgtcgatggcattcctgatgcgacctacagcgtgcgggttgagagtgtccttgtcgagacgagaatgatactcgtcccattgccgttccaaggcgaagctcttgcggtggctatcgtcgaatacgcagccgtccaggtcgaagatgatgatgccattctttggtttgcgttccatattcagatttccttactggttgctttctgggtgacggttttatcgatgaacgtcccatcagaagtgaggcggaaaacttcgccattctggatgaaatcgaacgattgcacgttcatcgtgatgcgaatggattcgctgccgttggtcacttcgacttgtgcgatgtcgccaactttctcgacaatgatcttcatgttacatggacttcccattgacggccacagggttggcctcttgtttttccgatccccagaaatcgcggcgcagttcttcctgctcggccgagcgatccatccaggggcgatagaacttgcactggtagataggttccaacggaacatcaatcacaggaatctgacctggctttgtctccagagcggccatgaaccggtcataggatttctgctggatttcctcttcattcatcaccttcgacccatagcgcgggaaggcgcaggagccggtggcgacgcagtgcggctggagcaggctgtcgaacataggatagacttccagaaccagccggcgcatttcgcggaatacttcctgatattcaccctgggtccgaacgcacaggcgaaccttcgccatgtcgctgagagtccgcagattgaacttggccgcgatcttcgtttccatgttggaagggatgatggcacgagcgtcctggagcgacgcgccggcctccagaagcttctggtagctggtttgcgcgtcggcaatggcgtcatgccacagacggttcagctcttcgcggacatggtaggtcgggtcaggctcgccatttaccgtagccggttcgtcgaattcccagcggaaggcttccggctgaacgacggcgctgatttccagagcgcgactggtttcctgctggtaagccccggtacgagtccgaacgagttgatgggtgaagttcttgctgacaccctcgatctggaaaatgaagtccacgaactcgaacggcgagcggatggtgtccagcatgtacttccagtggtcaagcttttcggcctcggtcatggtcgccgggtcttggccgcgcatgcgagtggatttcgtccccaggagaagttcccaggcgttctgggtgtaactgatcagagaaattttcatcagaaatcttccggaattggcgtgaagtggaattttttggttagagccagggccaggccttgggcttgctctttacgaatgccatactgctctatctcttccttgagcagttcgcaggcctccagacgcgactcatactcttcagcctcctgaacggatgagaaaacggttccatcagaggttctgtacacaagttcaatcgacatgatgacctcagtagcagcggatgatttcggcgcggatatctcgacggtcgaggtagtgctcacgaatcttatcgcgggcgcgctcggcctcttctcgactgccgaacgacaggttgaacgaagtgaaaggcttatcgtccaggcgcccatcgccaatcaggtacaggatgcctaccagcacgaaagacggcgctgtctgtcgcgtttgcggcgggtcgatttgcatttcgaggaaagacatgggaacctcttcaggatgatctggtgcgtacattaatagcgctcctgctgagcagctacggtttccggctcatagatgagcatgtcaacgatttccgggcactggcctttcacccagtcgatggccgcgaccagtgtggtggaagcggagaaagagaaagtgcggtaagactcatggatgtacggcgaccccatcgaatcgcgctcggtcgtgcgagaaatgactgctttgatattaacgatccggcccatcttcggcctccactttagcgattatatctgacaggctcagtttctcgccattcaggaaataactggcgcgaaacttcctgtcaccctctggcccgacgatccgggccgttatggtgagactcccgccgccaagggcatcggtgtccctgaagaaagccagcagcgcccgcttgagcgctgcctcgcgaggatcgacggccattaacctaccacgttccagccgtgctgagcgcaccaaaccgcaccggcccctgcaggaaggctattcagaaggaacacaggagtcaggcgaccgtcctcggtcatatgtatgaagtagcgggcgccttcaccgagccactcggccttggcgatagcgcgttcgagattggccttggtggcgtaggttttggtgtggttcttgtcggtggagaaggttacttcgcgggccatttgtagattccttttggttgaagggtttcgcgtttcgatgagggaatattacgcccacctgatccagaagtaaagcacttttgtaaattacttcacgaacattttcttggccttctgataagacgaagaagtcatcaggcgctcgatgacgtccatgtccgaaaccagatcatccagaaggacgttgcgccaggtagcgaaccggccgagcgagaagatgccagcctcatgggtgagattccagatcatggattcgcgctcgtcgcgaccgagcggaatgattttgcctttggtctggatggtcggctcgccatcttcgatgagctgtttccttctgatgccgaaggccgcgcaaacgtaatccatatcccagtcgctgtcccattcgatggtttcgattttaccatctaaagtctccactatccctttagtgatggattcgacgatcagagtatcaccggtgatggacgctcgaaacgttcccactttaggaccagggaaatacacggtctggaagacatcacaggggatggagagcttgtatcgactcacgatgatggaggttccttcaccgaatgacgggtcgattcccaggtccagccctgccgcagccagattggcgcggaacggcgcggtgctgatgatattcacgtggtcatcttgccggcgaagatactggaagaaagaggcgtcgaaaggacggctccaagtgatacgattcgcaagcttagccaccagctgctcatagtagtcggccggtgcgatccaacgcttttcagtcgccagattccagatggaccggtccgacaggccgcccgttactttcctggagtacatgttgcagtggtcgatgcgcggctgggaaatgaactcgccatcaatgtagatggccttgtgtacggtgacttcgcggaatgggatgccggtgagttggccgatgactggtgagcggaaccgcaagagcgcgttgtggcgttccttgctcgtcggcgtcgccgcgtcgatgatttgggcttgaggaaagcgatgcgcggcgatcaggccggcgagtccggctcctacgatgattactttctgatcaggaatcatgatgtgtcccttatgagtgtacaaaacttgagaggataaaaaagggacccattttcatgagtcccttgaagagctagacgattcaggctcagaggagcggcggcttactcctcctcaccttcggaaccatcggcgccctgatcttcaccgccgtgctcctggccttcgtcatcggccttctcgtcatcgccctggccagcttcgtcttccttcgaagcgatggcaaccagatcgacccagcccatgatttccagcttgctcaggtagctgcggaccgaggtgccatagagaagatgggccaccttatcgccgaaggattcgatttcgaccggctcaccaacggtgcagtgctcgttgatgtgtgcgaacaccttgccgcgagtcgagaaggcctgcggagtgccatggccgtcgccggtcgggatgaagtgagttgcgcgggggcgacgcgagccgttggacttcaggtcttcgcggcgggcttcggccttcttgcggcgctcttcctgctcttccttgcggcgctgcttctcggcttcgcgctctgccttcttctgctcggccaggcgcttgcgctcttcttcgcgtgcggctttctgggcttcctgcgcggccttcttctcttcggccttcttggcgcgctcggcttccttctcggccttcttctgctcgcgctcggcttccttcgccttcgccttctcggcctgctcagcttccttcgccttggccttttcagcgcgctcggcttccttggcggcggccttttccttcgccttctcggcgcgctcggcttctttcttctcgcgctcggctttgcgcttctcttcgcgctcggctttcttctgctcggcttccttggccttggcttcggccttctcggcgcgctcgcgctctttacgttggcgctcagcggccttctcggccttgcgcagggcagcggcttgttccttggtcagctcttcgccttgggcctgttcgttctggttcttctgttccatgttcttactccgggaatgtttaaagggatggcttattggcctgtgaggggattatctctaaactaattgaagaagggaatacccttagcctgaactttcctaaatattttctttcgggaaagtccaaactctagggaacttatttatgttcgagaagttcctagcttttacgcaagaacagtaagtattcaattgcacgagtgatcccagtatacatcaactgactataagggatggacggcaagttctcttccaacatggcgactcgtttccactccgacccctgcgacttgtggaacgtcatcgcccatccgaagtcgaatccgccaatagccttctgcgcctccagccgcacgtcttcctcggccgaaaagctcaagggattgaacttcacccagcgctcatagttcgtgccgataatgcgaactttggcaaacagcatttcatccggctcgtcatcatcttcttggccttcggggaccggcttgaagtccagcagaatcgcttgctcgccgttcatgatgccatattcgtgctggttcccggtgcacaccagcttctcgccgatttccggttgtacacctttgtagccgaggatgcggcgcgccctggcgttcaagcggcggcgagtattgttgtaggcgcaaaggatcacgccatcgtcatccaggaacgtccgcatttcgtcgtccgacatatcgaagccagcccggactaggatatcatcatactcgcgacagggcaggcgtttgccctggcggacgaacatcgacgctcgaacgatattcccggcgttacgctcgatttcagtcatgactgtgtcgcagctatgttcgtggaaaacctgaacgccgcgcacagggggaacttggccaaagtcgccgatctccagaaccggaattcgatgcgccaacaagcgctcttcatcccactcaccggtcattgacgcctcgtcgagcacgaccaacttcggcttctcgtcgagcgagtctttattggcgaacatgatttcgccgtcttcatcctcgccaatcggccgatagatgaagctgtggagggtccgggcattggtgcaacccttctcgcgaagccgcgctgctgccttcccggttggcgcgacgaagaccgtccagtccatcgagcagcaaagttcggcgatgatcttcgcgatggaagtcttgccagttccggcgaaaccagcgagtcgatagacctggcggcggtgcgctcgatcacaccaaccgcgataccagtccacaacggaattgatcgcgtcgatctgctgactgtttggtcgaaagccgaatcgctcttcgatctgatcgacggtgaagttagatgctgacatatttgcgttctccaacgctaggtttaattgaatcgaggctcagtttaagcacgccgtccacagaccagccagtatcacgacgatacttgcggccttgcggatcgacatagaagttcttcgtgcgccgcagcagaacataatgccaagcagctccaagcgcgtggacccttcctttatacgggaaagccttcgcctgctctgcggcctctttggccccagggagccagcggacggtcgaaaggaccaggaccgcacccttaatagcctgggaagcggcgcggccgtcctgtgggctatagcgatgtctatcgaagtctacccagtggtggttgccgcgccggagcttgaccgttcgggatcgcccctcgaacaccaccgtgccttcgtgagtaaaaatatgttccgccatcgaatgttcctttataacgtacagttatgctttacctctgcgcaggaagagtatactatcagctgactcgccaaagcgagcgaatttaatccaactttacttcggcaggaaagtggccgatactagcgccgccgcctgtactgccctccaaaacagaggatacattaaatgcaagaatgcaagatttcccgcgaccaactcccggtcggtaatccgaatcccaatgtcgacaagacccgcgacccgaacctgaagcccggtttcctgcgccgcagccgcgagctggacccggcgctggcagttcgcattcgtcgcgagctgatccacgccgaagcgtccgacttggccaaggccggatgggtcaattcacagtccagcctctatggatcgaaagccttcccgcgccattctgtagttcgcgtgaccggagttccggaagatggagctttcatcggcatgctgatcggcttcatcgagcaccgcgagcatggcgaatgggcggtcatggaagccggaacgaaagaaggcggcgccgtcatcattccagtcgatcacatcatgcgagcgtcattcgccgaagccgaagagttcgccgaaaagtgggagcggaacttggggtggcgtctcctgcgccagctccgcgagtgcggcgccctggccgggactgaagacgagttcctgcggcggatcatcaatcgatacgttcgtgatcgcacgatcctcgatcaccacaaagtcggcgcggacaaagactacactgatgcagtactcaaaagcatcggcgaaacatggccgaaaattccttcggggaaattcgtcggacaccgagtcgcgcagctcctgatcggccacaagctaggtcgagcggggaccattctgaatgacctggtggacttcctggagaagttcgcggccgggcgcgataaaattctcaacatcgccatctgtaattgaggtgaatgaaatggttgacttggaaaagctgagtccaaagctgagtcctcggcagcatgccgttctactggagatgtacaggcatcctgagcatccagttcacagatcgccaacgaatttaactcttaaggctttgagacgaagggggcttgtcgagctatcctggaaggattccgtggctggatatatgttcggtcgccaaccttgctggaaaataactgatgccggcataaggcgaatcctgggagtgctgggggaataatatggaaaaagaacaaagcgaagatcgcccaagcatccctgagtttgagaagaccgacgccaacaaactctatgatgctctggagacgatttcactgctggagaagaagttggacgaatccgaaaagcgcgggagcgagctggccgcgagctattgtgacggcgtagtcggcgatgaatacggccatccttattgtcgttataaagtggaacgcgacgccgccttggccgaagtcgagcgcctgcgagaatcaaaaggcgatccctctggcagcttcgacagatgtatgaaggtgatgtacgagcgcgacgagaatgcaaaacaactcgacgccgccttggccagggtcgcggagctggaagggaagttgacggactgggtgcacgaagggttccggctcaacgaggcgctagcggtcgccaaggctcaacccagcgtgccggaaatatctggcatcggtcgcgatgccgaacatcccagagctgtagtgctgtatctgcgtaacgaacccagcgatgaagatatgcgagcaattcagaactttttgcgcgccatggccgcccccgctcagcacagcgtgccgaaagcatggctcgacgttcaggcagagcgccgccggcaggtcgaggcccaggcgctaaggcaggaagtcgcagcactgcgcgcaagggcggatgttttgccggaggtgttcgggcttgagcggtaccgcgtagaaaaaactgggaagggtttctggccatactgcgtgcgtgcgggggatggaacgcgtgaactgttcgtcggccacttgaagcagtgtcagcgggtagcgaccgaattggctacggcgtttgaagatgggaagtttatcgccgcgcccggcagctcggctcagcacagcgtgccggaggggtggaagctcgtaccgatggacccgacatcgcagatgacctatgtcggtcagtccctgcgttatgacgcggtaaacagcatcggcgagatttaccggcaaatgctcgccgtagctccctcacccatcgatccggccgcgcatcctcagccgtgccagcaaccacaggcccatcctgcccgctgcgggtgcgagcggtaagtgccaagtaaggaattcatgtaatggaaccgaagaaaccttcaccagtagatggagtcatcatgaccagcctcgacgttctcaggaaggcaaagcctgaagctcaggacgagtatgccctgtccatgttcgcaacggcgatccgccagaagttacagcgctcccgcgataagggccgaggtggctggatcgactgcgacgaaaatgtcctgctggatggattcgccgagcatgcgctgaagggcaatgagaacaacctcctggacctggcgacgttcctgatgttcatgtgggtgcgcggcatcgatgatgcgaagattcccccggcgctcgaaaaggcgcgacagcacaagatcatggaagcctggagtcgaatccatgaagatggcctaaactccgccagaaaggcgagtgcggcgcgacagttcgtggaagttcctcgacgcaaggggcgcccggagcgacttgcatgaagcctcacgaaataagactggcccaggccgaagagttcctgcgcgaactcggccgagggattccggacgacgaacgggtgatggtcggctacgctgaagaggccacggtccaaaccgacgagaacggccgcaagctcaacgccggctggtggcctgtgccctggaaggaaggcaagtacatcaattccaggtccaacgcctatgcctgtatctcgtcatccatcaagacgcccaacccgaagaccggccagatgcgatactggcgcggcgaggcctctttcggccacggcctggcgttaatggtagatgacatcggctccggcaaagggtccaagggtgacttcgaccgcgacgagttccgcgagcgactggagccgaccgcgattgtggagacttcgccgaacaactaccagttctggtatttcttcaaagagccgatgtcccacatgctccagttcaaggcgctgctctattcgttcgtggaccaggtgctaaagaaaggcggcgacaacacagtcaaggacgtcagccgttacggccggatgcccttcggcttcaacaacaagcgcgggaaagacggcaagttcaaatatgccgacgaaaacggcaagcccgaactcgtgcgcctgtacagcgccgactattccaagcgctactcgccggaagagatcgcccaggcattcggcgtccgcatcatcatgccacagatgaagaaggtggagataaaccgcgacgattgggtgtatgaccaagtatggctgaagtatgccgagcacatctgcacgaaatacaagatgggcgaagcggcaggcggccaggtccagcagaatatgtccggcaaataccgcatccgctgtccatggggcgacgagcacaccaacggcgatcctttcggagcatactttcgcggaccgatacctggcgccgagcacgaatatgtgttcggttgcgggcacgatacttgccgcaaagagcatcgccggacttgggcggccttcacggatgaagtcgtgctaccctatatcgtcgaacaattagaaagaatcaaccgccgtcatatcggtgaggagtagacaatatgcaaaacgatcctggaatcctgattaccgccatcggcttgctgttcctcggccttatcatcttcttcgaaggcctaaaggggtggaaaatacaagtcgcaaacttcctcgcgtcgcttctgtgcttcttcttcggcctttctgctttgacgttctggttcgtcgttgcgtttgatgtattttaatcgacgaacggtacagaaattttcggatggggacggaacttattagctatgccggtttaggtaggagataatagccgtccctttcgcctcaatgtgtagaggcaatgttgaatccgatcatgtaaagcagaaggcggcaaacctaacatgattatcgacgacgataacattcttgatgatgacgaatcggggtccagtgagttcgatctcacacagatagaagatgctggaatggaccctttgatgaccgccgcaagtaaagcggccgacgatgcgattgcgaggaatgagacttaccgagcgcaaaaggcagcaaagtatgcagaggcgtatgcggaaccagatttgaagaagcgagcgcgattgttgatgctcgatcaggcctttgatcttccggtcagccggctggtgaaaggaccgttcgacgacttcatcaccaagtacagctcgacttcagacagcaactacctcgcggtctatgatacgttgttctgtaagggcgacggaactgtcccacacccgcacttcgacgagtttcgcggccggctggtggaccaccgaggcgtggcgttcaacaacaaaaccctcgatccgattgacctgatgggcgccctcgcggctgcggccttggacgatccctcgattaagaagacgattgagacttgctgcgtgtgggcgcgtcgatatcgccgcaactctttgatcgaaacgtttgagaagaagataccggattgggacggcgaagagcggatcgaaacgctgctgatcgacttgttcaaaccgttcgacaccgagcttaaccggatggtgagcaagtatttctggctgagcttgtactgccgcatcaactaccctggaatctcggcgccgatctcgttggcgttgattggtgggcaggatgctgggaagacttacttttcaatcttgatctgtaaagagttgtcgagcgaccgaaagttatcgccggtccagcttgacctgagccgtcatgaccagacgccatttttgcgcaatatcactggcaactcggtgatcgcgaacgtcggcgaaatgtccggcttcaaaaagggcgacatggaacgcattaaagagttcctggtgcgatccgatgatactttcgatcagaagtttgaaccaggcgaaactatcagtcgacaatggatcaccatcatggacggcaacggctatgatggtcttcaacgggatgagtcaggaaaccgtcgattttatccaatgttcgtggcgcaacttcccgacgaggatggcaagccgaattgggttaaaccgggcgatggaaatgaaactttccgcgttgacttcaccgacttcggccgcaaattctggcaagccatggctgagtgccgcgcctggattaaggcgaatggcgtggagggatatctcagtctagttcgggcgaccaacaacgaagtccagaaattctctatttcggaaatggagaatgcgcgtggcgtggttcgtgatgacacgattgatatgtatctgatcaacgtgctgatcagttgcgagttcgaagagatcaagcctggcaggaattcaaagaatcctggatggagagtcaacaccatcgaaatcctgaaatggttcgatattctcgccaggaagaagccgatttctcgccacttaactccgcacctgaaggcgctaggatttgttccgaataagaatggcttgaatggctggtgcctgcctgtagataaggttgcgcctggatggaccagagatatgcacacgacgttgccgccgttcaatgatgtgcttgtatacttgctgaggaaggttgattctgaggtgactgatgaagaggcaatgattcaaatccgcaaagttaaggccgagcgcgcaaggatattgggtgaggatttctgatgtagtgatggagtatacttggactaggccgccttcgggcggtcttttctttggtgcggagtacattcgatttcggttgtggccgagtgagattcggaagctatctggtaattagggtttggtggcgatggcgcgttgtggaaagttcgtgaacgttggatcaaggattttgtgcggtgattggatgaattgtggaaaatcgacgattctgactggatttttggggtcggccgcgccggtcttactggtaattaccgaaaccgggaatttgggtcgagccttagtgccgcgtgggcttgaagcgcttattcggatacttcccggtttcggatgcagccgcaaaagtatactacagcgaaaatcgattgcac

SEQ ID NO: 9 - DNA, 65702 bp, Pbunavirus
  source 1..65702: mol_type = genomic DNA
aatcctaatagaaaaaatctatcacggacgttacctatctttaaaattaataaaattaatagtaatttggtaatttggtatactttggtatttgaaagcctcgcggcactaagcttgtacatatcccgtgaagtttccgattccagccagctcgcggcagggtcgccggaaacttccggacttccaatccatgggtcgcggcaacaccacggcggactaagcggcaagtgccaaaactcgacgaacggaaccggaaatttgggagcgcgacagaatcgctcagctggacatatttctaacattcgatttaacactcaatccaaacactcaccccatcgtcgcccgccaaccgccgactcgatcctcatccaccagcggatcgcccgtataacatcctataacaccacctaacactcattcaccatcaaacccacccagacctacagcccacccacaagcagcccatagacgcgatccctggccccatagtacaatcgcgccatactcagtgtcgcgacagagcaccaggccccatccaccaaccgagccaccgcgacgactccagaatcgaactcagggacgcagcaccaaatgaccaaattctacagccccgacgatctagtcacgccacaggaattcgcagacccgcatttcgcggcgatcaaccaaaagcgattcgacctgtacatcgacctgcgcgtccaaggttacagctcctggcgggtcttccgggccatctggggcgaggagcatatggacggtcccgcgcaggcccgcatcttcgcgatggagtccaacccgtactatcgcaagcagttcaaggccaagttgaacgcgaccaaaacgtccgatttgtggaatccaaagacggcgctccacgaactcctccaaatggttcgtgaccccaccgtcaaggactccagccgtctgtcggccatcaaggaattgaacgttctggctgaaatcacgttcgtggacgagtcgggcaagaccaggatcggtcgcggcctggccgacttctacgcatcagaagccgaggctcagaccgccaccgtcgctgctgcggccgaagccaatggctatgtgccggaaggcgaagagggagatttcccgtctccgacgccggaaccgaccgaggaagaccgcgccaaccccatttagacatgaaataacatcgttctaggcccgaatcggaccgaactaaggcgacggtagcgggaagggacgaaaaacgattctagggcggttctaggaagcagtagcctaaccctcagaaacgacaaagccccggactctagttcagaatccggggctttctttgggcgccttattcgccagcttcgatgatttcgaagttgtatttgacgccttcgtgctcgaaagtcattttgccagccgccttcagctgcatgcggaatcggatgtgcttcgaagaaggcaggccgaactcgatgaatgctgcgttggtggaccggaactcgccgcgcttgcctttgacagtcacagccacgccatggcgctgagtgcgtttcttggaaacttccgggtctttccaggagttggcgatggctgccgacaggtctttggtctctttggccttctccggcgcgttcttggcctcttcgcgcatcttccggatttcttccagcgcttcctcttcggtgatctcttcttcaggcttcagattctcttcctcggccttctcttcttccttcttcttggaagtgcgggttttgtagactttggccggggcttcctcttcctgaaaggcttcttcctcggccggcagagcattcaggatggcgaggcagcgacgctcagcagtcttgcggtcggagaagcgcttgacagtcgcatcggcgttgtgagcgttgtagaaggcgaccagttctttcatttctgcgttctggatgtcgccgaaggttttgatggagttggtcatcttgcgatcctctgttttggaagatttcgttcgggcttcggtttgtcgccccgttgaaagagattatgcctaggtcgattctgcgtgtctacatttatttcatcagattgatcgcaaagccgacgaacggttgtctgatgtgaaaacaccgcagagcaggctgcggtgtttgttggcgagggcgatggtcaagcgaacggatcgcccagcatatcttcagacggggcacgttgcatatcgcccagcttgtcttcgtcagttgccgggctggacgggatcgcgccggaccgaagcgacagagattccgactgcctgctcacctgcggagccggaggagcttttggcgcagtaggggcaggcgggaccggcaggcctggaggagccatcggcgccatgggcggttctggaagatcaggaagactcggcgctatgccgccaaaggaccgctgcgactgctgcgccggattgtcgccgaacatttcggcggatcggttgtccttgatgacttgacctatggccgtcttgtcgccgcccggctctgccggatcgaagcccgtgaatggagtggtaacgcagcgcatgttcggatgggtaggcagatttttcaggactatggagtctgcccagacatacggattcttgtggttgccgggtccgtggctgatgatctcggcaggaatgtggccgttcatggtgagccattccgccatcccctgccgggtcagcgggcttactacgatctggccagtggactcttcggcgacggcgaacagatcaccgagcttgaatccgatgatcatatagttggacctggactcgccgacgaaagccagggtttcgatgttgtggtggatatcttgatcttcccagatgtacagcatggtgtcactcctctttggcgaaattgttctttcgaaggtagtaggcgatcttcagtcgtggccagaacggcgtcagtgccacgttgtcgtgacggatgatcgcaaagtggtccgttccttccaaccctgcgatgaagcagcgttcccaggcgctcccgctgtagcgatcatctggcttccagacgttcatgcctgagcttagttcgctcgactcccatttatgatcgatcttgacgttcctcatggctccctcaataaggctgcttgttgtgctcgaccagagacataccggccggaactttgaagcggacgtattcgatcatcatcgccgttcgacgccgattcgtgccagactcgtcattaacgaagagttcgcactgatgcgggatgactcgcgtcaccaggtcttcgcctttcgaaccgtagaactttatgtaggctgcgacgcctcgcgtcatgttcagatggaccgtttcgcagagtcgctgtgcggccgacgcgctggacagatcggtcggactgaccgtcacccagtaatggccactttgttctttatcggacatcaactgccctccaatgagaaagcctctgccgagtcgcagaggctggttgttgttagtcgcgcttcaacagaacgactttgtcgtatgcgcgatatttaccgcgccagtcttcccagtagtcgccggccgggcaggtaagctccagggtgatttcgtcgcgccagcattcgacggaaaggacaattgccttgttcctggttgcggaatccgctctgagcttaatcaggatttcgtcgcccgttttcagctcatcaactctcacaactttggccatgacacaatcctgtttgaagaggcgcggccggaaccaacccagccgcgccgatggattaacgtttgtgaaggatggacacggtgtccacgtcgaggatgctgatggtacggcgacggcgcggattgctgcgttcatggatgcgaatcaggttcgcaactggagcttcgtccaccacccatacatcttcctgcttctgcgtccggagcaggaccgttacttctgtgttctgggcgaggccgttgcagatgaaagtgaacttggacgagggagttctgtacatttcgagattcctttttggacttcggggtccgacttctcagccggtgaagagattatgcctgatcatcaccatcgagtaaagcacttgtgtaccaattctccagttaaatggaaccaaagcgcggtatcgctgatcgctacgcttccacgccatggtccttcttgcttacagacttcgaaccacaagctgatttccattctggccaggactcggccgaaggattcgagccggcgccggctagccaggatgtcgacattcacccgccgattgatttcgtatcggcgaccgttgatgacgaagaccaggcgcagggtgcgtccgtccagacattcccagtatctggtttcataccgaagccagtagcgcttaccagccgggcctaccatggtcatttaatcgatgctcctggacgcgccacgcggtccgttcggcgggacgggatcgaaccgccccaggatatagtcgggccggcgcgcttcctgaggacacacggcgagaaggcgccatcctgcgtccagggcgtactggagttcgtccgtgcagcagtcttccttgagcagcagacggttgatgctctggagattcggaccagggatagcagagcctgtgaccgagttccagccttcgataccgtgcaccatctgcggctggttgatgtagccttcggacctgccagccaaccggctcgcggccagctccaggcgctccagcatgggtcgcagagcggcttccgggtcaacatcgtcccagagcaggaccaggttgatgatggtgtacggatagtccttgtccaggtcccaggccgaagcggtcagacggcccaggccgatttcattacacatcacaggaacgtcgttgctccaggtggacggctcccagttccgctcgccaggattcccgattgttacgccttccaggttccccaggagaatgtggagcttgctgacatattccgcctccagcgctttccgctcttcgtcggtctggttgtggcgatagaaggatggagggctgacttttgcatggtagagtttcatggcggttcctcggttttggaagatttgaaagttagagaatggtgtcgcagtatttctcgaaaggactctggcgcttcttctcgcagatcgcgcaggtgatttccaggtcgggcagctcgctgtaagtcttgccgagatacagccagcgcttgcacagactgcggccgtccgacgtgaagaagtggactttgcgagcattgccgggttgcgcccagccaccttgatcgtttttgcgcttgctcatggcgatatttcctttggatctggaatccatgccgtccgttcgctcacccaaactccgtctacatagatcaggactgacagagcagtcgcgccaaacccgaagcctacatagaatgaaccgggatcgatttccatggtggcgctattggtggcgctattgaaatcgacttcaaagttgaacatcgaatggccactcataccatcaccatgtcgatttcattgatgaagaaatgaacatcgacaccatcggcgcgaccggtgtaacgcagccgagtcgtcccatcaatgtgggcttcctcgacgccgatgacttccaggatggtgtcgttgcagtaaagcttgacgaacatcttgatgccggagccaatcgccgcgaaggcgatctgcttgtacaggtcttgcttgatcacgctttgcgctcctgtttgcggatgtattctgccctggcttcggcttcgaacttcgcccaaagcgcgttgtcgactggaccccagggaccggtctgagtcccgtccaccggcgcgaacttgccaccggcgcgacgatacttggacagagttctcaggctgatgattttctcttcttgggaatcgagttggacgatcacttgacatacttcccgaagtagcaggtgtggagtatttccatacccttggagatagccttcagcttgataccgaaattcttgatcgcccagtccagatcgtggtgatagaactcgatgatgttgacgatttggccggcgctgtagtggatgacgcgaaccttgccgttccagcggaaatcttcgcggctgtttacggcctcgacttcgatggtgtcgtttctgccgatggtccatttggagctagtcatgtcgcaatcctctttttggagtgtttcgcgtttcgatgaggtaactatacctcagtcacctcatcgagtaaagcacttttgaacagattatctgaaatttctggaagacagatccatcggctgattcagtcaatcaatcggcggaaccgagacgccacccgttgcgggcgaaggccgagcgaccagacagcttgcgacactggatggagctaccatcgtcgaaggtgtaagatacggcccagtccaggcgctcgcgacgtactgccgcggcagcgatatcttccagacgggctttgagaagttgttctgctttggtcatttcaagttcctctttggagcgcttctggcatcgatgagatgactatacctaagtcatctcatcgagtaaagcacttctgaggaattatctgaaatttctggaggccaggaattgtcgccagagccagtcaacgtgatcgttgagatagcgctcgccatcggacgacagagccaggcagccgtcctttatgccgagcttggagccggcaatccattcgaactcgaactggagcgttcctgggcgaggggtatgggacatgatgtacttttgcacgatcaggaatcctcgaaaggtttggcgttcgcgatggccgcgattttctgcatgccgatgcgatagaattcggcctcttccctggccttggccagctgctccctggcttcgcacgccagcttgtgctgattgttggcgttctggatgcttccgtccagactcctgtccagttcttcccgaagagccttctgcgacgccagctctgcctccaaatcctggattctgagctggagctggcgattcgtctcggcaagcttgttttcgtgagcaatggagttctgaaggcattcatccagatgagctttttcgagcttcagctggttttcgcgatccgcgtacgcagtaagacatttggtcagacgagcctgttctttcacaagatcgactttgcggagcttggccctggccagagctttgcgaagtgactccagctcaagcgggtgaagatcagcatccgggtcttcacgctcttccttcggctccatccgcaggtagtattggccggcagcgaaggccaatagggcacggtcggaattctctacggaagcggccatgaagtgggaattataacgaggcagaaacttgcccgcctctgggtcccagcacaggctatccgccataggccagaatttccggaagttatctgcgttcacgcccaccttgaccgtttccggcgcacctgaatccgtcgccacttccaggttcaggtgaatggtgccggtgatgtactggaagtacactatgctagacataacacaaactccatgagaagtcgcggccgggaccatcctggccgcgcatcgtgattactcttcgccttcgtccgcgctcagccactcttcgaaggcgaaattcactttcgactcgacccaatcctgcagctcatcggcgaactcgtcactgtcgatatccatcggaacgcccagagtttcttcattccacaattcagcattcagctcgaactggaccatttgctcgccatcgacttccatcaggatgcggtctgcgacttcatagtcgtctacatcgaacagatggccgccagtcaggaggtgctggacgaaagcttcatcgagattggtgacttcgatctggacttgtttggtcattttccgtctccttacttagcggctttgaattgggctttgaggttggccagttcagctttcagatcgatcatcgcctgaccgcgcaggccttccatttcggcctcgctgattgcgatcttggctgcgcggattttgtcgttgatttgatctttagtcatttcggcttccttttgtttgaagggtttcgcgtttcgatgaggagattatgccgacagtcagactggaagtaaagtgtctgatcgaagaaatttctgtacaccgacgaacggttgcgctcgaccgtctgctgcggtgtcgatatactcggcctattgcgaacaatggactgattaaatgttcaagctcaatcctgcactgcgagcggtctggcgaactcgtgcccgttacaaagtcatctatggcggccgggcgtcttcgaagtcgcacgacgctggcggtatagccgttttcctcgcggccaactacaagctcaaattcctctgtgctcgccagttccagaaccgcatcagcgaatctgtctacacattgatcaaagacaagatcgaaaactcagagtataatggcgaattcatcttcaccaagaactccatcaagcacaagattaccggctcagagttcctgttttatgggatcgcccgtaacctgtcggaaatcaagtccaccgaaggcatcgacattctctggcttgaggaagctcactacctgacacaggagcagtgggaagttatcgagccgaccatccggaaagagaactctgaaatctggatcatcttcaaccctaacgaagtcaccgatttcgtatatcagaacttcgtggtcaaaccaccgaaagactcctgcgtcaagatgatcaactggaacgaaaatccgttcctaagcgagacgatgctcaaagtgattcacgaagcctatgaacgcgaccgggagcaggccgagcacatttatggcgggattccgaagactggaggcgacaaatccgtcatcaacctcaagttcattctcgcggccatcgacgcccacaagaaactcggctgggagccggccggatcgaagcgcatcggcttcgacgttgcggacgacggcgaggatgcgaacgccactacgctcatgcacggcaacgtcatcatggaagtggacgaatgggacggcctggaagatgaactgctcaaatcgtccagtcgcgtttacaacctggcgaagatgaaaggcgcatcggtcacttatgactccatcggcgtcggcgctcatgtcggttcgaagttcgccgagttgaacgatgccagcccagacttcaaactgatctatgacccattcaacgcgggcggcgctgtcgataagcctgatgacgtctatatgaagctgccgcacacgacgatcaagaacaaagaccacttcagcaacatcaaggcgcagaagtgggaagaagtcgcgacccgattcaggaagacttatgaagcggttgagcatggaaaggtttatccatttgacgaattgatttcgatcaactctgaaacgattcacccggacaaactaaatcaactgtgtatcgaactttcgtcaccgcgcaaagacctggacatgaacggccggttcaaagtcgagtccaagaaggatatgcgcgagaaacgcaagatcaagtcaccgaacatcgctgactcggtgattatgtcggccattctgccgatccggaagcccaaaggcttcttcgacttctaaacatagaaaagcccggatcgctccgggcttcgggtcttactcggtgcggttcctggcgctgagtgtcgacgcaacggcctcgccgactcccagggcttcctggccggccgcgagcgcttcggcttccgactcgacgatgaaatcatcaccttggccatcgcctggtggaacctcgaccagcacggcttcttcgccttcgaaccgcaggtcataggtcttttcgacggacagaccgtaacgagcgttgagcgcgtcccagagctgggcctcataggtccgcaggtcttgcagagctttctggtggctgagcatggccatgtcaacggcccgttgcagggtttcgtccaggacgttgaaccgaatgcgaagagaacgaatccgctcgacgacttccgcatccactacatgtctttcgatcattacttttcacctttgctgaatgtaacgttgtagccgttgtcggccaggtaggtcagggcgccttcgaaggaagttccgacgaggtgcttgagcttcatttcgcgttgcgcggccaaccagaatgcagttccggaaaactctgcgcggccttcggacaaaaccctgccatcaggcccggcgatccgtacatggacggaagatagcttgatcggcatcagtgaatacctccactggcttgcgacggcatgctttcggcgcgagcggcttcgcagtccgggcagggacaggcttggcggacgcgctccaactcgtcggcatccatgacatagagcttcccgtcggcagtgtcatgtgccatagcgatgttcgggaagtcggttgcgctcaggccggcgacagtgcggatttcgtcccagagcaccagatgctcggcattcagtcgggcggcgagcgcttcgtgctctttagcgacgcgcgccatgaactcgtccatacggaatgcgaattccgtatcgatggcacgggccgaggccatggagctgaggcgaatcggttctttcttcatgatgattctcttttggttggtggtggctaatgtccgtgcctattcaaggccggctcaatgcggcgaagaacaacacgatgaagaggagcgaaaagaatgcgaacgccagagatattccggaaatcagctttgctatgccctgcatctcagtcgccttggcagcgagtctggccttagcctcgataacttccggtcgtggcgactgaacatattctaaggcctcttcccgcgctttttcggcctcgaccaacctagggtcgcgggccgagacttcgctgtgccctggcctcgcgggatgggcttgcagcgatggagggagttcagccgccacgactccatagtctgcgcaggcccaagcgatcccgatgaggatcgcgaggatggattggacgattcgcagcatcactttgtcgctagggaagttcatgatcaatcctccaccgaccgaacgatttccatgttacgcccggcattggtccctgcattgaaggcgcgccgaccgtcgctatcgtccagacgcatgagcttggtgacattcgacttcttgtagccaggatcgccgaaatgttcgtgaaccgcagcttccttcaccacaaccagagacgttccggcagaagataccagctccatgcgcttcctggtgatggattgaaggcgatagctgatttcctgggtcgcggccagcttgaattgcgcggcaacctttacgttgaaacgttcgtacccttgagccttctgatactcccggcacagacgatcaatggcctcgaccagggagttgaacatgttcaccgccagctcaacgtccgacttgtagcctttaaagcgtacggcatgaccccagcgcttggtagtgcttccgtcgcgggcgctcctggatgccttagccgatgctctgtggttgttgatgccaccggcgaaatccatgatgcagtcattgtacgtcgccacggccactgagaaaaacttcatccagttcgggattgcggaatagtaacgagtcgcaatctgctcgtcgaactcttcacgaatctcgccggtcgcttcgaagccgtggaggtcatacttgtccttcagcttcttcacgcgctcggctgcgatggccgcttcgtgcgggctggaggagtcggctgccatggcggtcagtttgcggatgcggtctttcgccttctcgatggcttccggggtgaattcgttctggtcggtcatggtcggttccttttgtctgaagggtttcgcatttcaatggagctattctgccttcattcagaatggaagtaaagcactttcttccactatttcgtcatcgactggaagaaattccagatccaatcacctgctaccagcaagaggatgagggcggcaaagaacaagacagcggccgcgagctgtgcgcccggcttcagtttgggatggctgagcttgggctctacgggaacggccggagcgctagcgctgcaaccggcgtctcctgggccgtagccgatgccgcgttcacacgcctggagcgacaccagggatttaagatactcggtctgcttttgcgactcttcgtagatgccggcgacggcgaaccagagggcgaacactacggacgtacacacaacccaggcgccggtcagcaggagggccagcgggccgatgacgaagacggtagcagccaggacgattgcgccgccccagatgatgaagccggccagaccattagtgatgtcgacacagaactttttcattttcagattccttcggttacgggatggaggggatttgaaactctgcgccgccgagaacatcaatgacgacttcccagagcgtcggaacagaccactggtaacggtcgaagtcggtttcaggatcgacgcccagcgtcacataggaagtggcaggccatttatgaacactgcctttccgcatgagagtcgccacgcggccgtcaccgagcggattcgtcctgtgcggaacgtacgcagacatcgaatattgctgcccggcgtcgacaacaaatctttgcctctggcgcagacatacagagcccacaggattccagccgcgaccgccgcaagcctggcgagccgaagaatgctcataaccttcgtgagtcatttcgccgaggcaagccgagcgatcctcgtaatagttgatgttctccatcgatccaaccagcaccagagactcgaaatcgaatcgatgatcgtggatggccgagtgattgaagcaaagccgacgcggcagctccgggtgccaaacatggaggcgaccggccggaagttggacctgaatgaaccccaggccgtgcagagtgatcttgtccttcatcgggtcatggacggtgctcatggataatcctcagtagcagaaatgcattgtgagagttacgattgacaagccggtcgcccatagaagggcgaaccaggccatggctttgatggtcgtgtagatcatccgaagaattttccggcacagatcgggccaatgcccatttcgatggatgcgtggttggtcaactcgcgaccgcagcaggagcactgaccagtcttccgaccgtaggcgactgccgattccatcggcttttcgaacatcttcagaacgtcgtcgtgctcagtgtcggtgcagtcgcggctcttgatgaatttgccattggtgatccggccgaggtagatgtctcccaggacatacagactcccggcgttccgactgttagcgctagcctctttcacaacaacgatgagcggctcctcgccttcgccagccaggcggattttcgggcgcttgattccagactctttcgccttctcaaatgctttctcgataccagaaatgtccagagtcggcgcagcagcttcctgcgcggccactttctcgcgatacttggcgaagttttcgatggcgcgcttcgcagcagcgatctgattttctgtcaaggagccgtatttatacaacgactcctgaaggctctgagcgaagctgaaggaatttccagtccaccactcgacgatgtccgggtgcgcggcttcgaaggccttaattttgaggtcgcgctcttgcgcagcgctacagattttctcgatgcgcttttctgccgccttagcacggctcttggcgcgctgctccgggctggttttgtactctttgtatccgacgccgccgcaggcaaagcaggcgcgaccataagacgaagggccacggtacaggccggtgcctgcgcatttggtgcacttgtcgcgatacagcttcacttccttccgggagttcgggcgggcacccattgacacgtcttccagggtcttcggcgcttcgttgttgatctctacggtagcgaagtcatcacccaggtcttcgaagccggtgaacagattctctgctgcgttcatatcgattctcctgtttggaaagttcgtttcgatgggttgactatacgccagaaatggcaaaacggtagcactttcgcactaccgttcgtcgggtcgcagacgatcaataaatatcgctattgatcttgaatccatgctcagcgccgtcgttgtagtcatactcagcatagccgtcgcagtagtcgttcaaatgctgaatgatgccaagaacgtcgttcgcggctttgtgtcgtttcgcggcgatggtcttggcgatgctgtcgccgacttccagggtttcggccgtccggcgatggatcagcaggcgactccaaagatagagccggacgcgacgaataatgtcgcgatggcgctccagtcgtccgtgcaacttttcaatttcgtgctcgcgagattttaatactcgtcgaagccgttgaacttccaactccaaatcggccttagtagccatgttcacctcagaaaggaaaatcgtctgagactccaggaagctcgacgattattgttgagcctgatcggtctagaatgcatccgaccgagccagccctgtgtggatagggtctacacgaactataacaggtgacttccatgactattcgccaggtcgatcctccacaccatctgcaaattggcgggcgcttcgacttcagttttcgttcgtccaggacggcgcgtctgtcgcaggaaaggcagcgtgccttaaccgacgtaaccatgggtatagtcgatcattcggatgagctcatcatcctctgattctctcgacttcagaccgcccaaagagtccgactggccgtcgcatttcgcatcgatatccatcgaagacaggaatcctgccgatactgcggtgatatcaactttgtcgccggccttcttgaagccttcgcactcagcatcgagggccacaattgcactcgctgccatgttcacgtgactgatgaggtcggggaagatcacaggaacttcacgcgacatgccacggaccgtcagcttcaggactacatacttcatactcactatcccttttgtatgtgaggaaagaacttgctgttttccggatgatggaagcgctcggccgcaggcggtctttcttccggacattgaatcgtcgaaggagggaaaaccgcgccggcgataatcgccgcgaggagtgcagcggatgtcgacatccagagggcggtttccaggctcacccgaacttccggacggcgcggcttcattcgctccaccctcttcccggttcataggatggtagatcgccgccgcgaacccagttgtcccacatatggttcagaccagtcggtggctggggcggcggactgtagaatccgggagtctcagtgctgctcaggaaataaggcgtgcaaacggcctggacgaccaattggtgccgctcccacatcttatcaatcgctcttagcatgacgtcttcgcactgagccttactgtcgaaccgtctgctagtatggtccggcatctggacgcagccgtctccagtgcaaaggaaagcagtagcaatccatacggtgatactcgccatttcgtcaccctctttagttgatgagcagagtctattccatctgctcgccaggagtaaagcgcttttcgtcgggataaatgccgatgatgtctgcgtcgagcatccaaatctccacggacggatcgtcgctgctgatttggtacaggttgtacagctcccgtccgccgacagcgcgctcgcctcgcggctcaaccgccagaaccttgccgtgcccttctccgtgctcgtccatgtatatgacgtgatcgccgacttcatagctttctttcgtgacgaggcgtgaacgcgagctgttctgcgattccaccatccaggaatccagcacgccgcctttcatgtcgcgaaacaatcttgccgatttgtcgcaatcgaatacgcccagaacttcgccgtctttcaacacgatatgtacgattggcaaaagagtattcatgtttaatctccattggttgataattagagtctaatctgccgaaaagttcccgtaaagaattattttctcataactgattagttgcaactgttaatctgatgtatatgtttgaatctcttttgaacgtttgatgtttcccctataataagcgcacacagccaacaaccacgtggaactacaatgtttaaactttcctggatattcgggcgcaaaaaggataatgctgcctgttctgaatcggcgccggagaaagtcgcacaaatccctcaacacgatccgctcgaccccatgatcaagctgggaaggattcgcggctggaacgtcgagccggagaaagccccggtcattcgtagtgtgaaagatttcctggagccgggcctatctgtcgcaatggatagtgcgtatggtgatggaccaaccccggccgcgaaggctgctgcgggcggccagaatccctatgtcgtcccgactatgttgcaggactggtacaattcccaagggttcatcggataccaagcttgcgcaatcatttcccaacactggttggtggacaaagcttgttccatgtctggggaagacgcagcacggaacggatgggaactcaaatcggacggcaggaagctatccgatgaacaaagtgcgctgatcgcccggcgcgacatggagtttcgcgtcaaagacaacctcgtcgaactcaacagattcaagaacgttttcggcgttcgcatcgcgctgttcgttgtggagtctgacgatccggactactacgaaaaaccgttcaatccggatggaatcacgcccggctcctacaagggaatctcccagatcgatccatactgggcgatgccgcagctcactgccggctcgacggccgatccgtcttccgaacatttctatgagccggatttctggattatcagcgggaagaaatatcatcgcagccatctagtagtcgttcgcggaccgcagccgccagatatcctgaagcctacatacatcttcggcggtatcccgctcacccagagaatctatgagcgcgtgtatgcggcggaacggacggcgaacgaagccccgctgcttgccatgtcgaagcgaaccagcaccattcacgttgacgtggaaaaggccatcgcgaatgaagacgctttcaacgctcgcctggcgttctggatcgccaatcgcgataaccacggcgtgaaagtcttgggtactgatgaaagcatggagcagttcgacacgaaccttgccgacttcgacagcatcatcatgaaccaatatcagctggtcgctgccatcgccaagactccagctacgaagctcctcggcacttctccaaaaggattcaatgccactggtgagcacgaaacgatttcttatcacgaagaactggagtccattcaagagcacatattcgacccacttcttgaacgccactatttgcttctggcgaagtcggaagaaatcgatgtgcagctggaaatcgtctggaaccctgtggactccacgtccagccagcaacaagccgaattgaacaataagaaagccgcgaccgatgaaatctacatcaactctggcgttgtgtcgccggatgaagttcgcgagcgtctgcgcgacgatccgcgttccggctacaaccgactcaccgacgatcaggcagaaaccgaaccgggcatgtctccggaaaacctggccgaattcgagaaggccggtgcacagtcggccaaggcgaaaggcgaagccgagcgagccgaagcccaggcgggcgccgtagagggcgcaggcgccccggttcccgccgctccacgcgggactaagcctctcgcgaaagcggccgaggaaggggccagcgaggccgctgaaccgccgtcgcggccggaccccaaggccgagctgcggaacttgttggtcgatcttttgtcgaagctccaagacctggacgacattaaggcgccggacggcgtagacatagagcacaatgatgcgcctggcttaaagcgcacgtccaaacctggcgtgtctggcatggagccttcggtgttttcgtccaaccgcatcgtcgggcctcgtgatcattcggaactccagagaatcaaggttaatggaataaccaccttgatcgaaaatcctcgcggaagcattcggcaaggaaaggatgggagttggcgagttcagatgaaacaccactacggattcatcaagggaacgaaaggcgctgatggggatgaagtcgattgcttcgtcggtccgaatctgggatccaaacgggtcttcgtcgtcaaccaggtgaacaaggaaggtcagtttgacgagcacaagtgcatgctcggcttcaacaacatcaacgatgcgaagtctggatatctgtcctgcttccgcccaggttgggatggtctcggctccatccatgaagttgacctacccgctttccgtcgctggctggcgaacggcgacacaaccaaaccgtttggaggcgagtgatggcattcaaggcctccaaaaagcgcgaacgccgggcacctcttccggtcggaagagggaagcccataattccatcggcaggaatcgaggcctggtatcgaaagcagatgaaggatatttccaagctcatgatcgccgactatcgaagcgagattgagaaggcactgtcccagcctgcggccgaacggttcttcgccagcgacgaatccgttaacgccctgttcaagatgacccttcgaagcctacagcagcgatggaaccgcatttttgaaggcttcgcggccaagatcgccccggagtttgtcaaccggaccgaagaagcggccaccgccgcgaccctgcacagtttgtctttggccggcgtcgatcagccaagagctgcgtacaatgagagcgtcaggaataccctggaggcagcaactacttacaaccatactctcatcaccaggattcaagaggaagtccacgagaagatttacacatcagtaatgttgtctctgacttccccaaatccggaagagcaaggaacttccggcataacgaacgcacttcgcaaagtcgggaagttctctgaagatcgaatcgaactcatcgcaagagatcaaaccagcaagctttacagttcgctgagcgatgagagaatggcggaaaatggagtcgaggaattcgagtggatgcactcttctgccggcaagactcctcgccatacccacctggagaaagatgggaaaaggttcaagctgaatgaccccagactttgggagggtccgaaggccgaccaggggccgccaggatgggcgattaactgtaggtgcagaaagataccagtcatttgacatcgataggagcgctatatgccgttagttcatggcacttccaatgaggctcgttctgaaaacatcaagcgggaaatcgaagccggtaaagacccaaagcaggctgcggccatcgcttattccatccagcgcagtgagaaagggaagacggcgaaagattgttcgcctgagctcgtcgccgatcttcgcgccatggtggacgctctgtcgaggctcgtgaaatgaaccgcaagacgtgccggcgccgactcgtggtcgatgtaatcagggccaatattcacggcggattcttcagcctgaagtttgccgccatcgatttggcaatcatcggcgtcgccatcttgatgacttttggccgataatgctgagaaaatctggattctgactaaaaattctagtccggatagccgcaagttaccgtttacggaaaatagcagtaatttggaaagcctactgccgcgaggctttaacagagccagttcctaatttccgatttagccgcatgcttcaaaagtatatagcctgggaaattagaagtaacgttacaatagaattcatctataagtaacgttataatataacgtcaatctatatgctctagacgtattgaaattcaatttttaatcgggaaattggtaatttgaattagtttaggagttgaaagcctcgcggcagtaggcttggacaaatcccgtcaagtttccatggtcaaattactggattttcgcggctgaggggctggtaattagatcataatacaaattataatgtaagataacagtcgcggctacatctaattattgttccgcttatttacccttagatgtcctgcgtatataatacagccatagtccacgactcttcgaattaacgatgacaaagtcgaaaagaaaaattgacgaaaatggatatatgaccatcgagggctgcccgatcagctcttatggcgttttccagtattctgctggtcaactcggtcttccgggcgatccgacgcggattgtcaacgtatatcgcccggagtctgccgtcagcgatcctgagtacatcgaatctctgaagaatctcccgttgatcgacgagcacgaaatgctgtcgggattcgacgacgatgacgacagcgtggcccccgaagacaaaggggtggagggtatcatcacctccaacgcttactacgaagccccatgggctcgcggcgatatccgcatctattcccgcaacatgcagaatcagctggaaaggggcaaagaagacctgtccctaggctatagttgccgctacactgagcaacccggcatctggaacggaacgccttatgaagtcgtccaggacaagatgcgcggcaaccacatcgccctggtaaaagagggtcgtgtgccgggggccagagtattggatggtctgtgttttgaccatctcagttttgatttcagaccatccgatgagggtaatgaaatgagtctcaagaaagccaagcggaagccccctgtccagcgcgtagggcaagctgctgactcggcggtcgaagagttgcgcaccctgtggccgaaactctctgcgtctgtccagaagttcctgggcgaagaagagcaggagccggagcatcaggaaggcgccgctccggccgaaccgaccgacagcgagcacctgaccgagcatccgactctggaaggcgcccagaaggacgacgaagagcaggaagaggagccttccgttgtcgatccggccgtggccgccgtcgagccggagcatcaagaaagcgccgcatccgaaatgtccggtgaaggcgaagtcgccgaactgatctctcaggtcaaagccattctggctcgactggagggaacggtagccgaaggggcagacgaagagcatggcgaaggtcaagatgtcgtcgagggtttggaggagcagagcagcctcagcggctcgcaaaccgccagcgacgatggtggtgagagcaaggataacagcgaggaacttcctgaaatggcacagaagaacgcgcaagatgctgcaattcgcggtctctatcgcgacattgctgctaaagatcgcctctacaagcgtcttagctccgtggttggtgcgttcgatcaccgagctatggactcggctgaagtcgctgtttacggcgtgaaaaagctgaacatcagctgtgcgaagggccaggaagctctggcgctcgacatgtacctgaaaggcgtcgaagcctcgcgcggcgcggccagccgtcaatcgaaagcccaggattcggccggttctgctccgcagtgcgccgagctggacagctacctgaagggggagtaactcatgttccagaaacaagtttaccgccagtacactcctggttttccgggcgatctgatcgaggacggcccgaagcgggcgcggccgggtcgaatcatgtctctgtctgccgtaaatccggctgccaccgccaccggccccaaccgcatcagtcgcgctttcggttacgccggtgacgtcagcgccctcggcgaaggtcagccgaagaccatcgcggctcgcgcttctgaagtcgtgatcggcggcgccaacttctttggtgtcctcggtcatccgaagcactatgcgctgttcggttcggccggagactccctggctcccagctatgatctgcccgatggcgccgaaggcgagttcttcgacatggccaccggcctggtcgtcgaaattttcaacggcgccgcaaccgccctggacctggactatggtgacctggtcgcctatgtaccaaacaacctgcctaccgccgacaacgcgcttggcctgccggccggcgccctggttggcttcaaggctggctccatgccgaccggcttggtccagattcccaacgcacgcatcgttaacgccatcagtctgccggcccagtcggcggggaatctggttgctggcgttaccatcgtccagctcacgcagtaaggaggcgtcatgagccagatcagcaagacccattcgcgcctcgcaggccgcaatgcgaaacctttcgacctgaaaaacatcaccaatgacgccgtggcgtctctgcgccgcatcggcctggtattcgatcacgccgtcgtccaggaccagatcaaggccttggcgaaggccggcgcgttccgctccggctcggccatggacagcaacttcaccgccccggtgaccacgccgtccatcccgactcccatccagttcctgcagacctggttgccgggcttcgtgaaggtcatgaccgctgcacggaagatcgacgaaatcatcggcatcgataccgttggctcctgggaagatcaagaaatcgtccagggcatcgtggagccggccggcactgcggtggaatacggcgaccacaccaacatcccgctgaccagctggaacgccaacttcgaacgtcgcaccatcgttcgtggcgagctgggtatgatggtgggcaccctggaagagggtcgtgcctcggccatccggctgaacagcgccgaaaccaaacgccaacaggcggccatcggtctggaaatcttccgcaacgccatcggcttttatggctggcagagcggcctgggcaaccgcacctatggtttcctgaacgatcccaacctgccgccgttccagaccccgccgagccagggctggtccactgccgactgggcaggcatcatcggcgatatccgcgaggccgttcgccagctgcgtattcagagtcaagatcagatcgatccgaaggcggaaaagatcaccctggccctggccaccagcaaggtggactacctgtcggtcaccacgccatacggcatttcggtttctgactggatcgaacagacctatccgaaaatgcggatcgtgtctgctccggaactgtcaggcgtccagatgaaagcccaagagccggaagatgctctggtgctcttcgtcgaagacgtgaacgcggccgtcgatggaagcaccgatggcggcagcgtgttcagccagctggtacagagcaagttcatcaccctgggtgtcgaaaagcgggcgaagtcgtatgtggaagacttctccaacggcaccgctggtgcgctgtgtaagcgtccgtgggccgtggtgcgctacctcggcatctaaccgatgcctattcaccaaaggccgggtttccggcctttgttcactctgactctgactcggttgtaggggccggttagggcataattactaggactacgccaatgactgtttacatcgtttccgccatgactcaatccgtgtcttacaatgcgtatgacacctctgatccgtccaatcctcgccttcagcggaagattctgattcgtggccgcgccggcatcgcatcagaaacttccggcttcggcgacatgatttccgacgcggccgggcgtccgatctggaccccgcagggcgattgtactgccgtgagcgattcggatttcgagctgctccaggccaacaagattttcatgcgtcacatggataagggttatctgcgagtcgtgaagaccgacatcaccagtgaccaccagcggatttccaaagagactcgcaccatggagcgcgatggattccagcctctggacgctgctcgtctgcagcagaaaatcaaggtgactaccgccagcgcttcccaggaacaagagttccggatttaaccgagggtttcggtatggtgattttcgacgaacataagtttcgcacgctgtttccggagtttgctgatccagccgcttatccggacgtgcgcctgcagatgtatttcgacatcgcgtgcgaattcatttctgatcgcgattcgccataccggattctcaacggcaaagccctggaagcgtgcctgtatcttctgaccgcccacctcctgtcgctgtccacgatgcaagttcagggcgcggctggaggtggcgtcactgccggtgggacccagggcggtttcatcaccagcgccacggtcggcgaggtcagcgtggccaagctcgcgcccccggccaagaatggttggcagtggtggctttccgggacgccttatggtcaagagttgtgggcgctcctcagcgtcaaagcggtgggcggattctacatcggcggtcttccagagcgccgaggcttccggaaggttggagggacgttctggtgatccctggtgcgaatcttctgcgaatggccttcggggtcatcggtactcaaattgtgaaatatcgcaagtttgagcagcgagtgaagaatgatcaagctcagtacgtttccatgttcgaggagcctttcgacctggcagcgtctgttcagcgagtccgacgcgatcagtatgtccagtttaatctggagttccaacggaattacgttatgatcttcgccaactttgagatggttgacttggatcgcgatgtggccggtgaccagttcctctggaccggaagagtctttcagctggagtctcaaggctcctggttttatcaggacggctggggagtttgcctggccgtggatatcggtgcggccaagctcactgatgacgggaaaccgactttctaggtgatgtatgtttgacggcgaactgatagcgaaactggttgtcgagttgaatgcggcgatgacatctgctcaagaggctttgcagttcccggattttgaagtcgtccagaaagctcagccgacccaacagggaacgtcaaccaggccgaccatctttttccagaaactgtttgacattcctcgcggctggcctgccaccgattggcacctggacaacacggcccgcaaatatgtagaaataactcgacagcatgtagagacgactttccagatcagttcccttcattggcagaatcctgaaataactcacgtggttacggcttctgatatcgccaactatgtgagggcttatttccaagctcgatccacgattgagcgcgtaaaggaactggacttcctcattcttcgcgtgtctcaaatttccaacgaagcattcgagaacgacaatcaccagttcgaattccacccaagttttgacatggttgtaacttacaaccaatatattcgcctgtacgaaaacgcagcatattcggccgatggggtattaataggcatatgagtctgaggcgcgattcagagctaatcgccgcgcacctccagatgttaagagccatgcgcggcaggtccgtttcagccggatggtattccacggctcgatatcctgacaaggcaggcggatcggtcggaatacaagtcgcgagaatcgcacgtctcaatgagtacggcggaactatcgaccatccgggcgggaccaggtatattagggacgccattgttcggggccggtttgttggcgttcggttcgtcagaaacgactttccgggagaaaccgaggtaactaagcctcacagaattaccatcccggctagaccgtttatgcgatatgcttggaacttgttttccgcagatcgcgccgcaatccagaaccggatagccatgaggctggccagaggacagatcactccagatcaagctcttgcccagatcggcctggcgttggaaggatacatagccagaagcatcaggaccgggccatgggtggctaactcagcatctacggtcaggagaaagggattcaacagaccgctggtcgatacggcgcacatgcttcaatcgattagcagcagagtaacataaccaggagatcatccagtgatcagtcagagccgttatatccggatcatttcgggcgtaggcgcaggcgctccggtcgcaggccgaaagctgattctgcgcgtcatgactaccaacaacgtcattccgcctggaatcgtcatcgagttcgacaacgccagcgcagtcttgtcatacttcggcgcgcagtcggaagagtatcagcgggctgcggcttatttcaagttcatcagtaaaagcgtgaattcgccgtccagcatcagcttcgctcgctgggtaaacaccgccatcgcgccgatggttgttggtgacaatctgccgaagaccatcgccgatttcgccggcttctcagcaggggttctgaccatcatggtcggcgcggcagaacagaacatcaccgccatcgatacgtccgccgcgacttctatggacaacgtggcgtcgatcatccagaccgaaatccgcaagaacgccgacccgcagctggcccaggctaccgttacctggaatcagaacaccaaccagttcaccttggtcggcgccaccatcggcaccggcgtcctggccgtggcgaaatctgccgatccccaggacatgtccactgccctcggctggtccacctccaacgtcgtcaacgtcgccggccaagctgccgatcttcccgacgcggccgttgccaagagcaccaatgtcagtaacaacttcggttcgttcctgtttgccggcgcgtcgctcgacaatgaccagatcaaggccgtgtcggcctggaacgctgctcagaacaaccagttcatctacacggtcgcaacttccctggcgaacctcggcactcttttcaccttggtgaatggcaacgccgggaccgccctgaacgtgctgtcggcgactgctgccaacgacttcgtggagcagtgccccagcgagattctggccgccaccaactacgatgagccgggtgcttcgcaaaactacatgtactaccaattccctggccgcaacatcaccgtttccgacgataccgttgcgaacaccgtcgacaagagccggggcaactacatcggcgtcacccaggccaatggccagcaactcgcgttctaccagcgcggcattctgtgcggcggtccgaccgatgctgtggacatgaacgtctatgccaacgaaatctggctgaagtcggctatcgctcaagcgctcctggacttgttcctgaacgtcaatgcggttccggcgagcagcactggcgaggcgatgaccctggcggtgctgcagccggttctggacaaggcgaccgccaacggcacgttcacctacggcaaggaaatcagcgccgtccagcagcagtacatcacccaagtcaccggtgatcgccgcgcctggcgtcaagtccaaaccctgggttactggatcaacatcaccttctccagctataccaacagcaacacaggcttgaccgagtggaaggccaattacacgctgatctattcgaagggcgatgccatccgcttcgtcgaaggatcggatgtgatgatctaatggtttgcggcggactcgatccgccgcgaccttccataaatggagtgaggaataaacaatgatcaacatttctgcgttcggctcgatctgccagttcacggcaagcagaactttcccgaacggattcaccgtcaccgagtttgccgacgatgcggaccccatcgacagcccgccgttcactgcggccgataccggcgtcggcctcaacggtgacatggtagtctggaaccgggcgaacatcctggaagtcgtcgtcaacgtcatcccgaacaccgagggcgagcgcaacctggcagtcctgctggatgccaaccgcaccgggaaagacaagtcgggcgctcgtgatgtcgtcggtttggtcgtggcgatgccggacggcagcaaaatcacctgcaccaacggcacccccatcgacggcgttctgatcaacgcggtggcaagcgtcggccgtctgaagaccaagccgtatcggttccgattcgaaaaagtgatcaaagccggtactagctgatgaagaaaattccgctgacagcagtccccaaccaggcgatctcattcaacgccggtagcagctattggaagattcgcctgtaccagaacatggacatgatgaatgccgatatcagccgcgacggcgtgatcgtttgccatggggtccgctgcttcggcgggattcctcttctccaatacagccatcagtaccgacctgactatggaaatttcgtcttcgaccgcgacgccgattggacattgttcggcgacggcatcaacctgttctatctggacggcgccgaattcgccgagtatcaggcgcttgccacgaggaaagaatgagcacatcaacgatcagaaccgggacgaacaacgatatccttttggacgacaatggaaacatggttatcctcagggatgtcgaagcgtgcgcccaggacgttcgggcggcgatgctcatgcgcaccggcgaaaacattttcgatgtgaactccggtgtgggatatttcgaatacatcttctcgccgcagaaaagctatgatgacgctcgcaaatccatcgcggatgcaattttatcctcaccggatgtgaccggcatcgagcagcttgacatcgacataaccggggaagtcttcggcgtcgatgcgaaagttatcaccatccacgggcctgttaccacaggagtttgaaatgagtaccatccgcatccaatacgccaacggcacccaactgttcctggacggcaaaaatccgccgcccctggacccgctgccctcgtttaacccgtctgtcgaagatctggaaggcctggaccgcgaaaagaacaccgacaagggcgactcctcgccggccggtcttcccgttcccccggtaaacgtcgattccaatgtcgacaacggcggaaccatcccggctccggtatcgaccgacgctcctgcggccgaatcggccccggaaggcgcccaggaagctcctgcagcgggccaaggcgacgagaaaggcgccgaggaagccccgactaccgccccagtagaaaaggccgaggaaacggcctcgccggccgctgaagaggaagccccggctcccgccaaggccacctctcgcaaaaccaccagcaagtaaggactcgacatgatcaacgtcagcggcttcggcacaggaattgtaatagtttccgcctcatcgttcccgatggggttttccttgtcgaagttcgctgatgatgagagtccgatatcctccaaagagctggagccgttcggatatgagatgctttatgacggcggcctattcgcctttgacaaggctgctcctctggaagtatctgtatccgtcatcgcagggagcgaggatgatattaaccttcgcacccttctcaattccaaaaagggatcattcagatttcttccgggaattatcccggacatgacgactctcgtggctactcttcctgatggcggccgcaccgttctgtccaatgggaccatcctcaagggtccggccatcgacaccatacagaacaccggacggcgcaaaggcaacacgtacactttcgttttcggtagctatcttggcgcccagactgcgcgtcaagccatttctaacgttatccaatcggtactggaggtggtctgatgttagggattttcaccagcctcctaagttcgcgatctttttcgattgtggaccaaaacacaaaccagctagttgctgcggatttgaggataagccgggtcaacacccggttttcttctgtagggcaacgccacatgctggaagatggtacgaccaagatggattccagaacgatccaccctatggaaatcatcgtcgaagtattttgcccttcaattgatgtcgtcgatcagatcaatcaattgctcctggatcgcgacacgctgtacaaagtcatcactcgcggcatggtattcgaacggatgatgtgtaccagcgaagcgctcaatcagactccggatatgatatcggcgactcctgcgcggctgacattctcccaagttctcgtccagaatcccaagcctataatgttcagaaatgcaggggactcttctatgatcgaccgagggctggccctagctgaagacgtggttggctcggccggcgatctgttcgactacgcagtaaacggcgtccagaacgccgcagacttgttctgaggtgccaattgaactctttcctcaagtctattctcaacacgcctactctcaccatacgcgatgatgtcaccaaacttcctgtctggaagagtcttcaagtcaagaaagtggaaatttactcgccggcttccgtagtgtcgaaacctctggcgacgaaagaccagacggaagctcaagtgtacaccgaagctctggacattgatgtgaagaatggaaagatcatccaaccggtgcgactccgcatcaatgctatctgtccggacctgtccaccgttgaaagtatcatgaacgctttcaatgataacacctcgactttcgctatcacttctaagtcgatattggccgataaaatggccatcatgacgctcgatgtagatcagtcgccagacatgttgaacgcggctgagatcaatatggaattcgagcaggttgagcctccagtattgaatgaattcgatcctgcgttccctcaagatagtccgacttatggggtacagattcaatctctttctgatgctaatttgctggatttgggcgccatcggcgattcgatatcttcggccgcaaaatcgctatataatcgcgtgaccagctacttctgaggatgtatcatgcttgaaatcaatcttcccgatggccgtcaaactcgcgtacaaatcgaggcgtggtcggcattggatggctgggaactccagcgccgtttcgtcgaattcgctgtcagccaagattccgacttccgccgctctttcaccatggaaatcctgggctatgcgaaagtgctgcttggcgacgatgacgccggcattccgctgaccaccgcggcagtcatcaacaaccacctcggccactggaagaacgtggaactggttttcaactctgttctcaagcacaatggcatcgacccggccacgcacgccgaccggccggactattgggaacaagtcggatcgcagatggccatcgcatttctggccgaggcgtccaagctcattggtccagcaatgaagatcgccgaaggactcgccaacaagccggagtgattcatgtctagtgatttggatgaattcatacttcggtatgaggccgatactgccagagccgagcgcaatctggagcgcctccagaaccagatcaggcgcgtgaacagcgcatcgacgagtggccttcaggatttgcgccacttcgcagacggcgcggccaccgaactcggcagagtcgttccgcagattgattctgtgacgagcgcaattcgcggaatgaacgcgcaactggcaataggcgccactggcgtggccctggtcgcggccggcgtcaaggcgttcatgaacaccagggaccagtacaatcagcagcgcatccaggcgatggacatcggcatcgccccggcacgcttggaagagtaccagagaaaattcgttcgccagtccggtggaaccatcagccgcgagcagggcgcggagatgaccaaaaatctggcagacactttccggcgtgcttatcgcgatatcgggcgagtcggcccggaagcgcgaattctgcgtatggccggcgtcgatgtcgggagcttccaaaagggcatgcggccgctcaacgacatcatcaccgatctggccacgaaaatggccaagctgaagccggacgaaatttctgcctacgctgatgcccttggcgtctcgcgagattacctgagcaccctggcgaagatcggcccggccatgggaaaagtcactgagatgacgactgcggaactccagtccagggtccagggcgagtccaacatccagaaattcaacgatgccctggcgaatctcaaccagacgttcactaccctggaaaaccgagtcggcgaaaagctcgcgcctgcgttcaccaagctgatcgaaatcatcgacaagatagtccaggctattcccaatgaagtggaaagcttcgcgaaggacaccaaatcccgttgggaagatggagtgctcgggaaggcgaccgttggcagtgatatcctatccctcctcagccccggcgccctgctcggtcgcctggcagcgtgggggactcgtcgcggcatggaagaatcagggctcatcgacaaggacaaggttcccggcgctcaaaccagcgaagacctggccaagaaacaagaagaccaggacaaggctactaagtccatgaaagagctagagaagctggctgaccagaccacgaagtctaccaatgattttgcggtggcgatcaacatgttcagtggcgcggtatcgtcgttcgcgaatgccgttgacgagcgccaagcttgggcagcctgggcgggggaaattggtcgggcggtcggcatgggaagcaccgcgccgacttcgcgggccaccggcgtctatccgcacgcgatctatgatcagtcgaagagtggcgcggccggacaagtcttcggcgagccaatcggcgcccagtctcttcgcaatcgcatgttctcgccgcagcgcaaggcagagccggtcaccgttccatcgtacatcaacgatatcatcaaagatgcttcgaagatgtacaacattcctgagctggacatcaagaaactcatatacaccgaaagccgattcaacgccagggccaccagcgaagccggagcgaaaggcctcatgcaactgatgccggaaatcgccaaggcgtatggtatcactgacgtatatgaccctcgccagaacatcctcggcggaacgcgcctactgcgtgaaaacctagatcgagcaaatggcgacatgcggttggccttgacatactatcatggcggactcgatccgaagaactggggcccaaggactcgcgcatatccgggtttggtaatgagcgctccaatcgagctgatggaagaggctcagcgcaagcagaaggctgcggccatgaccgtcgccaacgagacgttcgccccggaaggcggcgacatggacattcgtccctatgatggcgggcgactggaaaccccagaccagggcaagaaggaagatgagcgccgcgaagcccgtcgatatgacgacagggttgtgcgaccggaaattcgcatcatcgaccgcatgccagaccgcagcgacggcgaaatcctcaagatgtctaggcgtcaagaggccgaccgggcagactctggattccggaagttcccgaatcaggttcgcggcgagaccaagcagaacatccaggcccaactcactgccggagccatcgcgcaagtgatcggcgttaaccccaaccagatcatgcgccgcgaaatcagccgttctgacttgctattcggatacaaccaagccatcctgggcaagcagcaggagatcaaggccgccgcgaccgaagccaacaacgtattcctgtctccagccaagctcgccgaagccactgccaaggtgaacgccgcatcgcgagaaatggatattctcaggacgtacggcgagcaacttctgaagagcgctccagagcgcggccaggagctgaccatcggtcgaatcgatatgttggtcaacgttaccggcgcgaattctccggaagaggctcgcgagatattcagcaagcagactgcagaccagctgactacggcaatccaagatgcccaaaacgattccgcaactaagatactctactgatgaaaaagagaattctgcgagtaacattcaacatgccttatggacccgaagtcatccgagaggatttggatgttcgggtccggatcatgaaggctgcgttgcggattcagaaccgggcgactatggaaattttcggcctaaccactcagctgcgtgagtctcttctgtcacagttcaccgcgtggaagcaccggcaacgtcaagtcggcagggaagacgaattgatgatcaaagtgtcggtggaagccggctactctgaccaggggcgcgagcaagtttccagagtctttgtcggcgaagtggccattgtcgatatcatttcgccgccaccggacattggaatccgcatccagtgctacaccaggcaaatcgacaggacgaagaccattcgaaatatgccgcccgccaacacgacgttcgtcaagttcgtcgagtggggcgcgaacgaaatgggattgaacttcatctgcgataccagttacaacgatcaagttctgaagaatccgggccggtctatcactgtcgcgtcggcaatcctggcgtcgattcaggatatgtacatgccggacgtggccgcgttcgttgatgatgacatcttgatcgtgaaggatcgcgataaagtcattcgccctgatgaggtgaccaacgtcaattcgttcgttggaattccatcttggtctgaatggggcgttgaattccagtgtctgtttgagccatcgattcgcgtggctggaggcgtggcggtcgaatcgctcatgaacccgagcgtcaatggcaactatgtaatcactgctctggaatacgatttggccagtcgggatcggccgttctatatcaaagtcatggggagcccagcagcataatggccagggaaatcaaaccgttcaacatgttcggcgttcactatacttcgcggcaattctctgctgccgatgggctcagcatgatgtcggaaattcagagtgtgccgccagaagaactgctcaagggaaccagtgtattggcgcatccggaagatcatccggaaggcatctggcttcccttgaccgctgcgaacatcaatctttatgtagttgatcgggcgaaagtaatagctcccgtacaagttcttgcacttctgtccgaagtggtaattgactggaactttggtttcctcaaagactggaccggagtcaagattccatccagatttgtcgaagatatcaaaagcgtgaagacggcacattcgccttctgtagttgcgagtttggtagcgaacggctcagcctctatgcgcgagttggaagagtattattcgactcaagatgcatttaagatgatagacatcatgacggcgaagagcgtgaacgaggccttggcgtcagaggcatcgcacaacagaatcaaaaagggataattcctaaccgggcctgggaaggctatactagacctgccaaatcagaggctttcccatgtccaatatttctctaacatcagcaaaagctcccgacagaacgcgactgatcgccgctcttgacgctcggtcgcgacgggatgctctagatttcgaagtaatgataccggctcaggttgttcaatatgaccggaccgagaatatcgcgacgattcaacctctcatcacctgggttgacacggaacacaatgccgtccaaaggcaccagctggtggatattcctgtaatttccatgggggctggcggcttccacataagtttcccgattcagcaaggtgacataggctggatttatgcggccgaccgcgacacgtctcagttcctggagtcgttgtcaatgtcgaagccgaacaccggccgcatccataagttcgagcacggcctgttcatcccggacgtattccgtcgatacaccatcaattccgaagattcggccgctatggtcatacaatcgacttctggagcgaccagaatttcgattcgcggcgataacatcaagataactgcgccgtcgaacgttactgtggatactccgcaggcgaacttcaccggcaatgtgactatcgctaacaccctggtcgtaaacggcatcaacgtgaacaaccacggccacctcgaaaacaacccgcctgatgcccggacgaaaggcggcatggttgcttaaggagattttcatggcaagttttgatttttctgatttaacagcggggggggttgtaatggctaactacaactacatcgtcgatactggtgtgatagtcgcagataccgccgacgttctgagcgacgttgaggccgagttccgcgccgccctcggtgccaatatcaacttggccgcgagcactccgcagggatcgcttgtcgcggccgaggccatcgcccgttccagtgtcatgcggaatgaagcgcgaattgccaataccataaacccgaacgtttcattcggaacgttcctggacgcgatctgtgccttgatggggatcgagcgcggttctgatctgtcaaccttcggctatggagttcaagtcaccggccgcagccaaacccgcatttccaccgggtctagggtccagactccggccggcgcgatcttcacagtgatgagcgatgtcacgatccctgctggtggtgtcgcgaccatcgatatcaaatcgcaggagtatggcaacattcctctgccggtcgggaatctcatcatcatcgacggaacaattggatggtccggagcaaaagtcatcgcctccactcgcgtcgatccgggcagccgccaaatgagcgatgcagagttgaagaatgcccgcgttaatcgattggccatccaaggtcgcaactcgactatggccatcaaggcgtatgtgagcgccgttccaaacgtcacgtcggtgaacgtaatcgagaacaacaccggcgccgttcaagtggtgaatggagtctcgtttacccttccgtatgctgtttgggtctgcgtcgccggaaacccggataaacaagcagtcgccgatgcgttgtgggccgcccataacggcggaactccatgggactatggtgcgacgaacaacggcgtcccggtggacggtccgaatggcgttcctgtgcgcgatccggcgtccggtcgaaagtatgtcgtgaagtggaccactccaattatgtacgatggatatgttaacgtaacagtccagcaaggttcctcctctgtagctccggaagccattcagaacgcagtggtcaattacgcccaggggaaagtggaaggggaagaggggctggtggtgggcgcgagcctgtcggcattcgaagtcgccggcgccatcgctcgcgaaattcccggcatctacatcaaactctgccaggtcgcgtgcgtcgcggctggctcgccggctccggctccgggcgatttcacttcggaatacgtcatgagcgcattcggccaggctaccatttccgttggtaacgttcgggtgactttcgtatgactctgcctgcgtacaattcggacatccaacaagctctgaaatggctccataaccaggcgcctggaatcaccggcctgatccagagaaaggcgcaatggtatgacagattcagccgccaattctgggccaactgggagcgcgacgttttccacttgaaaactgccaacccgttcggccttatggtttggtgcatcatcctcggcacgccttcgaaagggttcggcctttatccaaaaaacagttcttgggcattcggtcggctacgccagaacttcatctatagcggtacacaagttccgccaccggcagacgcatcgcctggcggcaacttctacggtggcggcaatgccgaaattctcaacttggacgaaatcaggaaagtgcttcagctaagatatgtagcgctgatttctaacggctcgattgcatatgtcaatcgcatgcttcgttacatattcaatgatgatgagccatgggacgaggcgaccggtctgtacttctatctcatggactcaaccggcgagaatggccctgtggagaacttggcgatatatcggaaagattgggaaggtatggtgctgttgtccagttcgcccagagcgaaccacgtgctgacatcgacccctgccagcgacgccgattggccgggagtcgatccggccgcgagcggtattccggtaacggtcgaaacggcgtccgctacggccccggacggctccgctacggtgtgcaagcttactaagccggccgggagtaccgcttacgtctccgcgccgatagatgggccgctggggtccggtagcactgtaacgttctcgttcttcgcgaaagccggctccacccgtttcattgcaattcagtcggctgccgatttccccagtcgagccgatgccgttttcgacctggattccgggaacgtaatcagcgatcagatgctggacagcagcgtggtaagcgcccgaatgattcgtctggaaaatggctggtggcgttgcgttctcacgaccaagaccgtcagctcttcgttccgcgctgcttacgtcgctccggcagaaaccaacttcagctggattgattcgaattccagcgcggagattgacgtgcttatctggggcgctcagatcgaactgggtgatactccaactggatacttggaaactaccggggcgcccgtaaccatgaccgattatgttttgcagaacgcccagaccggaacagtcaagttcacacagccccttccgaccggagtagaagcgtattggactggagactggaaaggcgggactgcagcagaaccggccagattcgcagtcgggaatgggactcaggatacgtttactctgtcagaccccgcatacatcggcctacccaccagtggggcgttcaagctagaatacagggttggtccggcgcttaatctgtcgccgcaattgatcaacctcatgaatgaccgggcagttggtattatgccgacttgcgccggttgcgatgtcaaagtcattcaggagtaatgacgtgatcacacccgaactgatccccagtccgtttgccgctcagggcgataaagacccgattccacaaacctcctccactggcttcgcaaaccttcgcgacggctatacgccggactacgaaatcagcctggcgtcgaacaacccgcaggccaaagcggtcgagcggaagattcaaaaccaactcttcttcatcgctacccagaacgcacaggcgtggcagcgacaaatggcgccgccgtggtttcagggcatgcctggcggctacgaacagaatgcagaagtcgtgcgcgtcggaaatgacggcataatgcggcgctatcgttccatggtgaatgccaatgcgagcgaccctctcagcagcacgacttgggaagaacaacccgcatggtcggcgatgcgctccaacatcccgatgccggccggaggcccaggcctatcttctggcggagaagtcatcacgaccggccgcaacttcaacgacctgttaaatgggacgtgggagttcttctctgattcagtggttatcgcttctcagaatgcccccgtatatccggcttccgctggtgccgctgctggcatgttggaggcgaaatcttgggtgtccggagccaatacgttctgcgtccaacgctacactgatcgcgtcgggaacgtcgctgtgcgcgggcttaatgccggagcgtggaccaactggatgtatgcggtaaacgtcatggcccttcaacaaggtcgggtcacctatggagtcgcggccggatcggcgaacgcttacacgttgacgctagttccgcagctccaaggcggcctggtggatggcatgattcttcgggtcaagttcaacaccatgaacaccggcgcctccaccatcaacgtctccggactcggcgccaaagccatcgtcggcgcggccaacttccctctcaccggcggcgaacttggccaaggactcatcgctgagcttgtattcgacgcagcaggcgaccgctggagaatcctcgcaggcgcgccacgcatccaagttggcaacgccgatcaagattaccaggcccccagctggaaacaggtgaaggattacgtcgcgtcccaaaagctgactgaagtggactgggctgacgtcgtcaacaagccgaacgtcgctatccaagacactacgccgtggttcgccaatctggagttgtctgacgctcggcctttcatcgatttccacttcaacaacaaccgcgccaaagacttcgactatcgctttatctctgaagctgatgggtcgatggcgttctactctcgccaggggtcagctggtcctacccaggatatcctgttcagcaggtcgaatgttacattcctccagccgcgactggatgttgcgaaaaacctcgcgtacatcgcgaactctggccccctttggcagaacaccactgccgatcagcctggttggaaattcaccttcgcacaaggtgtggacgccaacaacaacgcggttatcgcagtcaataccaccaatccggacggctcctatcgctcacagatcatgcgatgggactgggcgtccacgaacgtcatattcaacaatcgtccgctctttgccggtcaatacactccttgggattctggaaactttgatccctccaccaagttgactgtgaatgccacgaaccaaatcgccggcccgaccgggattcggaatacaaacggcaacaccggcaacatgaacacatggggctccagttccacgacggcttcatacggaaacgctgctcttcaaatcttcgggaaaggtggtggcgagcctgccgcgctttatttcgacaactcccagacaggatggtatctggggatggacaaggatggacagctcaagcgggccggctggtcgctcggcaataacgcctacgtgattaccgacgaatccaacattcgtttccacgtgaattccatggctggcactcctgtttggggcggaaacgaattctgggggccgtggaactttaatccgaacaccaagctgaccatcaaagccggcacccaggaaactagcagcactgcgatattcagcggaactatgccattcgctccaatcgcatcgctgtccgattattctcaggcccctttgacggtttacaacgcgccaaccggtccgtctgcaaaaccggccgtcatcgcgttcattcgtcctggcaactggggcgcgttcttcggcatcgataccgacaacaagctgaaatggggcggcggatcgctcggcaacagttccagggaaatcgccgattccagcaacatcatgaatctttgggcggccaacccgaccgcgccgtcctggaacggccaaaccgtttggcgatccggaaactttgatccggcgacgaaagtggatttgaacgccgcgaacgccaccaacggcaacatggtcttcaaccgcatttctggaactggtagcggcatagcttcgtcaggtcgagttggcgccatcaacctgcagaatggggcgcattcggggcaagcggcagcagtcactttcgagcggggcggcagtatcttcgtcaacttcggcttggataccgacaacgttctcaaagtaggtggcggaaacctgggggcaaatgcctatccggtcatccacgccgggaactacaataactacatcaaccaggcgctggttcaggtgggtcttggcggagtcggttcctatggcatctttgcggttctggacaatgccgctccaaccgcgaccgttcgaccgggagtggttgtggacggttccattctcatctactcgtcttgcgccgcaaactacaatagcggtcaaaggcctgccggaacttggcgctgcatgggatatgtagtcaaccgggatgccaacactcctgactccgcgacccttttccagcgagtgacgtaaaatgaaatggacgcggatcagaaaccctcgttggctggatgaaacaaacatccacgccatggtgactttcgaggggatcggggaagttcctttcactgccaatccgcacgacgtggaggcccatggaagggccatccacgctgcgatcctgtccggggagcacggacctatcgccccggtagattcgacgcgggagaaggccttgcaggacgctatacgagcaagggaaaagcgggctatccttcgcgatacccgctggcccatagatcgtcacgacgagcagaggcggctgggtatcgaaaccactgacggacctgggctgatagcagctcttgtttcctggaggcagcagattcgcgattggaatagcggggatcggccgcgacttcccatggctctgaaaacgatgtttaaaaatcaggagtattgatgaaaatcacgaaggatattctgatcaccggaaccggttgcaccacggatcgggcgatcaagtggctggatgatgtccaggcggctatggacaagttccacatcgagtcgccgcgagccattgcggcctacctagccaacatcggcgtcgagtccggtggactggtgagtctggtggagaatctcaactacagcgcccaaggattggccaacacatggccgcgccggtacgcagtagacccgcgagtccgcccgtatgtcccgaatgctctggcgaatcgtctggcccgaaacccggttgccatcgccaacaacgtgtacgcggatcgcatgggcaatggatgcgagcaggatggcgatggttggaagtatcgcgggcgcggcttaatccagctgaccgggaagtcgaactattctctgttcgccgaagactccggcatggacgttctggagaagccggagcttctggaaactccggccggcgcgtcgatgtcttcggcctggttcttctggcgcaatcgctgcatccccatggcggaatccaacaacttctccatggtcgtgaaaaccatcaacggcgccgcgccgaacgatgcgaaccatggccagctccggatcaaccgttatatgaagaccatcgccgcgatcaatcaaggctcctgatattcgcccaaaagaaaaggccgcttattcagcggcctttttgctttccggctttgcctcttcaaccatcttgacttcaaccggcgcggcggactcttcctgagtgaccgaatccacatagttccctagtgaactcagaacgccgattaacagcgctcttactaccttgtccttgactgtctcgcctatgatcttggtcagaacggatattaactcttcccggagtctggggctgattcttggccgaaagcgcttgcgatgctctttgcgtttcatgtttagtcctctgtctgcggtcttctcctcaccccgataatggcttggggatgcgctgtgttaatcggaaggttcgggcgctattataactcgtcgaaaatgctcgcgcttaactgtttaacgatacgcaccgcgatattaaatcgccttctttctggccaaggaactctggcggccgggtccggtctaaggcctaatttgtcgacattaaaacgagaaaacccggatcgcctgtagggcaatgcgtccgggtttatttctatctagtgtacgctaggatcagtgacttccgccccacccgtccagccagcaatcgaagacggcgtgcctcggcttgtccttggcgccatgggagaagtgcttgaaccggatgacctggcccttgagatactccctgtcattccagcggcgctgtttctcgtcgtgggtcaggctggaggccgacacgttgaaagtgactccaggccacagacgttcgttgcggcagactaacgcaccgaccattccggacggcgacaggttttctgcgtggctggagcgggccgtgtggccaagttcattgatgaaagcttcattgttgttgtgcatcaactcttccacgtcgatgatctcagcttcatcgtagtcgtatcgcttgactttcacacagtgcccttccttggcagtcgagcgaccgaacttgtacagcccatcagcgcgcttgcccatggaaccttcgaatcccagcattgtgtggcggcgctcgacttcgctgaactgttcgatggaagtcaccagttcctgctcgaccaggtgaatcctctcatagccgaggcagtgacgaaggaagttcacgcgctcggccgccctggctaggcgatcttcggtcggtgcgcgaggatcggtgaaatcatcgaacacatggaaagaccagtccggctcaccgctgtggcggcgaagatcgccggacgacttctggaaaactttcgggtcgctgatgtcgccgcagaccagctcgccgtccaggccgttgaacagtttatcgctgaggtattcgtagatcgattgattgttctgccgcttgagttgacgagtcagcgcctcgccttcgaatacgaagcagcgaaatccatcgatcttcggcgagaaatacatcggcagttggccttccagcagcttcgggtcaaaattcgatgcgagcatgggtttcatacagttctccagaaaagaagcccggcgaaccgggctaaatggcggtaagccggctcagatggtttcgttggcgtggttcagttcggccatgatcgacgcatagcgctcgtccgactccttgatgaacacgccgtcgtacatgacgcctttgcgatccttgatggtgtcgtaggccgcagcgtagcaggcgagcatggtagtgtcgtgctcttccgtcacatcgaacagagtcatgacggccaataccaggctcttgatggctaatccatgatttccgcgtgccagcgcgccggccagatgtccgaggtgctgcaaatcgtcgccgtaggtgggatgaacttcgacagtctcgctgaagaccgatagatgatcgaacagattttcaccgagttgcgcggccatgatcgtggcaaccaccattacgtcgccgatgccgtctttcacctcgactggtttgttataaacccaggcttcgcaaacttctgcgaactcttcgaccaacttcaggaattgatccttggccgaagagcctttgatcaggttccggtcggaaccccatttaacaaccaggtcgtgaagttcgcgactcatgatttgttcgatattcattctttcgattccttttggatttgggattttactgcgttgattatggacgccgtgctctggcgcgatccatccttggtggtgccgaagtagaaggccattaccgacttcagctcggcgaaccaatagccgatgatggtgccgatggcgaccgaggatgttgggtccatcagagcctcgcggccgaatgtgaagattgcgatgatgatgagaatggagcctgtcagaagagcgaatgtaatcgccgggcgaacgaaatcgttctgctgcgccgcaagcctcctcgcagaatccctgtcggccgcctctgcggcgaactggctaagctcggcctggagctggttctgctcagactgaaggcgattttgttcggcttgaatcgcaagctcctggagacgaacgcgctcggcgctctggagttcggcgagacgcgctagagcttccggattcgcgtctagagcgctagcgaccgaggctgggtcggccttcgaccccagcgccgtcgcgacgatagcacccacggcggcgcctgcaggcccacccaggagcgaccccagagccggggcagccgcgccgatcttactacctatgtctttccagtccatttcgactcctcaaaagaaaggcgccattacagcgcctttctccggccggtgattcagaactcttcggcttcggtcgcatcgccgacgccaccggcgtcactgcgaggctgttcctgcttgctgtagtccaccttcacctcgccgccgacgaacgacttgtacaggtcggccgcagccttgaagtgatccgggttcttcaccaggccttccagctcgaactggacgccggaccagctacccttgtcgttcgacatgcctacggtggtcatgcggaccaggttggcgaaagtcggcggggtgcgcaggccctgcggggtctgaacctttttctgggacagcgcggtcatgagcttcttcgaggccttgatctgcgaagacgacagggagatcagagcctggccgaaatcgccggtgtccggatcgatgacgatgacgtaatgaccacgggtgtcggcgaagtagtcagacttcttgtcgctgaccgaaccgtcttcgttcggcgcgtacaggcgtccttcgacttccttcaccttggtcgggtctttcatcatttccttgaagtcttcgacgctgatggcgcccttgaaaccgccctcggcctcgcgaccggcccagcggatgaactcgcggcggtacgcggccggaatgatcagcaggccggtcttgccgtcgtaaatcttgccggtgacggtgttcaggaacatgccggccttcgcgccttcgatgtacttcgggtcatcttcatcgacctggggagacatcttctgcagaacctggatgaaggggatggcataggactcggcatcggcgccttcgaagcctgcgccgtcatacgatcccaaatccatgaagtcgggaacttcggtagttgcgacggcgccgccaccggtggcaactgctacggccttggtttcttcggttgcttcggaagtttcggttttcttaccagccatgttaggctccttgtttgtcgaatttcagttatcgctaactgtgggtttataataacggaagttgcaactaagtaaagcaaattacatattaagatttgctctttttcatcttcggtttcgtgatcttggcctctttgtattcgtgcacgccgatgaaatctggcagctcttcgcccttctccagatactcgcggccgaacgcctggagggtctggtaatggacatcgcggttgatggtggcgtcatagccggcttcgatgatggcctcggccgccttcttcgcatcttccatttcgccgcgaccgaactcggccagaaccttggtcttgatgatgccgtcgttgtctgtgtcttccagccacttccagaacttcgatttgttctcttccttgacggaaatgatggccttcggctcgactttgaccgtgcgaccgtccgccagagtagtggtcttttgaccaagctcctccaacagctccggaatggtgttgcgcttgagggttttcagctcctcttccttttcggccagcgccttttgaagatcgaggatttcgacgtccagctgcgaagccttgtccaccaggttcagcagtcgatggccgatgtcggtagcttcgaccgccatttcatccatgacgccaaaatagtcgatttcgcccggtgcgttctctttcaggtattccgggatttcaagctcttgctctttcatgtccgcctccaacttagtgatgttcccttacttgaactaagtattgagtagatattatgccgcatcttccttgatacggctactgatttacatattaaatttcgtcgcgagtgctaacgtcagcctcaaacactccatcaacgacataacttgccaggttgcgcttccactccaagctgacctggattttctcgtcgatggaatccagacagatcaggtcgaagtacaaaaccgagttgacggtgccgattcggtgatttcggtcttcggactgcatccgcaactcgttgtcttcgtcggtcgtgtagtaaatggccacgtctgcggcggtgagcgtgatcccgatccctgctgcggccgggttgcccaggaacacctggacgcgcttggcctggaaatcgtcgatcaatttttcccgctcggcctctttggtctcgccgtagtatgtgccaaacgaaattccttgggcctccagatacgccttgatctggtcgatttcctgaatgcgcatggcccagatgatgatggagcgctccgggtcttcctccagcagaccctccagaagatcagtaaacacggcgaatcgcgggttgtcttcgggcggcaggatcaccggctcgccatagacgttgatatagccggatgcaacttgcttgagcttcgaacgcgctgccgcagcatcgaaagatacgtccagcatgaagtcttcgttcttgagaacgaagtggtagtcttcttccacgcgctggtaaacttttcgttgctccggcgacatttcgaagtatatgcgcttgtacaccttgtccggcaggaatgggagtgcttccttcttcgtgacccggaaactgtgcggctcgatcagggaccgcagcttgtccaggttccggaataccgggcgcccacgctcgtctttttcgaccagttgcggcggcatggtttgcttcccttccagcttgcgcatgatagcgatcattcgaggatcgtcactgggaaccaaaacggaaaattcggccacgaacgcccgataggatttcgttccaagaattccatcgcgcaagaattggaactgcatgaacaaatcggtaggcgcccgcgttagaggagttccggaaaggatgcgacgggccacggccttctcacccagctttacgatctttttcgcacgcttggcttgcgggtttttgatcctcgtggactcgtcaacaattgcgcaaaccttgaaagtttcaaggaatcgcaagacttcatcatagccagcctggtgattgatggcgtcaacgttgatggcgaagacgcgaagaactttttcatctgcgaacgtctcggcatacagacgatccaagcgcgccctggcctttttggaagtcggtcggccgcgccaatccacgctcaaagtcttgatcgcgacgtgggtgggaatctcgcgcagaatccagttggtgtggacgcccttgggggcgacgatgagcagcgcgtccacgcgcccctgtaggaagaggcgaacggcatcggccaaagtcgtccaagtcttcccggtgccctgctccatcaggtatgcgaaattccgtttgttcagggacgcggccagggcattgaactggtgctgcatggcctcggtcttcatgcccttgacgggatatgttttggctttcatttgttctccaaatcggcgaggaactgaacaatgttatccagtccttctgcatagctcgcaatttccaccaagtcgcggctgttaagctcgaacaaatcgagcatgggattcagcagcagccaatcggtcccgatcttggccaggacgaagccccggccgccccagccgatccgttcccgaaggaaagggatttgcccaggctcgaaacatctggccattgggcaggtggaggcgcgtttcggccactcctccaacgccttgaactcgacccagaactggacacctcgacgattcaggcaaatcgaatcggacataccagaccgccgcgtctccagaaagtcgatcaggattcggccgagtgagcgttgcttaaacgcattcgccgctttcgtttcgcgatcattcatcgccttcgccctctttggaaactttctctgcttgcgctgccagctttgctttttcgcgttcggtcaaaatcctcttgacggccttcacgatgaacatatcgattccgctgagcttccagcctttgatgaggaaccaagagcctgtcggcgttccttcggcaatctgctttccgtattgcagatatttttcaggcctaattctgaaacgtatcggctgatcaaccgagtcgtcaacacacatgatgtcgaggaactgcgactggcccttgtacaccgggtttttcccttgatctgccctcttcttctggcgaatcggttcgttctcatcagacagaacttttttcaccatcttgacaatgaccaggccatcgtctccatcgcggatatcccgaatgttctggatggggtttccggaagttactccaaccaactccggattgtcataagcatgaccccagagcgtgtgagcttcgttcaaatctgcgaattgaacttcagaattcgacagactcgcggcgactttctcccaatcctgaagcgtcttcaggtgggttccggccagctctttatattgagctttcagctccctaagatcggcctttaactccttcagatcggccttcaacagtttttccagttctttgtcttggctgattttcgccgaaagaatctgggcttccagcgctgctacatcagcagccttgtcctcaacatcctgtgccgatatcgggcaattggccagggcgatcctcgcggccttgacgtcatcacgaaggcgcaggaacttctctgccttcgccgggccgaagcctttggcgttcatgatgccgccgatcaggcgcccgtccgccactacccagttaagttcggaatgctccgggtccagggccgtatattctacgccttccttggccaattcgcgaaggatggacacagtttgctggtcgtctttcgccgcccgaagacacgctgccgcgtattccaggcgatgataccgcttcatgtagcaggtccagtacgtcaccacagcgtagctgaccgagtgggagcggttgaatccccaggcgccgaatgtcaccatttcctgccacacacggtgagcatcgtccggggcgacgcctatggtcttggcaccctcgatgaacaattcccggcgcttgttgaagaactcttcaccctttcgcgcagacatggctttccggattgccgatgtctgctcccagtcgaactgtccgatgtccttgacgatggacatgatctgttcctgatataggaagacgccgtacgtccctgacagatattgctcgacctgcggaatggtataggtcacaggctcgcggccggccacgcgctcgatatacttggtggccataccagaagacaacggacccggacgggctagcgccgtgatgtggtcgatgttttcgaacgcggtgatattgatcgcgtttgcgaccgaacgaactgcctgcccttcgaactggaaaatgccggacattttgtcttcgttgagaacatccaggaccgccttgtcgttcaaaggcaagtcgtacaactcctgcgcagtcacacagttcgcgtcctggatgacgcccagagttcgaaggccgagcgcatcgatcttgaggagattcaaatattccgaatccggcttatcgagctgcgcgacgccttcagaagttaccgtacagaagtcgataacttcatcgttgcagaccaggatgcctgccgcgtgtacgccagagtgggatgggtgaatttcgaggtcgcccatgcaggcggacgcgatctcatacttttcgcggaagtcgcggccgggctgagttttctcgaaagtgtcctccaatccttttccatatcgttcgtccgccgacgtatattcaatgatcgagtttttgatgttgtctgtatcgtggaaggggatgccgaagcgctttccgacgtgagcgataaccgacgcggccttgagcgtgttgatgttgcccaacttcaccacgttccaagtgccatacttctgctggagatattcgaacactagatagcgatgggtatcggcgaagtcgatatctatatcgggaagatcggaccgggaaatgtcgataaagcgctggaagagaaggcgatgagggagcgggtcaacctcggtaatgccaaggagatagcagaccaaagagccggccgaagagccgcgagctgggccgaccagcatatgcttcttggcgaacgcgaccagatctgccacgaccaggaagtagctgtcgaaatctttcagctgaatctgcttgatctcttcttggaatcgatcctcatactcctgggtccattccttgatgtggccgcgactgagacggtaggcttgcccctcgcgagccagcgcgacgatatccccatccaggtggatcataggcgccttcgccagtttcacatccgccaattgttcgactaccgcacgagtattggcggcggcggcatcgaactcttcgcgagtcatgatgtggcgtaaacggctccacaactcctcttcggtggcgatgtggcgaaggccgaccgattcccgcaccttccaggccgacgcgaaatcagcatggtcgatggacggcatgtcgttgtaagaggtaattaccaccggctttccgaatgccctggccgtctccatagcgccgtgcgcggcgaccatcgacgcgggattgatgtcaatgtagtcgattccggccagatccagatgggcataggcctcgccagcgaatttgatgacgccgtcagcttcctggaattcttgcggagtcaatccttgattctggaccgacttggaagtcaagcggtagaacttctttgtgtccttggcgagcacccaggctttgagcttcagctctttctcgccatcgtcggcgcatttgatcgggatttccatgccgaatccgcgaggcagttctgccttggtagcggcttgctcccaacggacgtggccccatgttccatcatcgacgatggcgacgaatggggattcgatctctttggcgcgctcgatgatctccgggaatcgaccatatgcggcgccgtaggagtaaccagagcgaacgcggagctgagggaaagacatcatgcggcctccattgcttgatacgcccgatacactcccatgcgcttgcagacttcgtggagcagccgcacgtcgtcgagcgcccggtgtttctgtacatatgggccgcagtagtgctcataaagatgttgcagccgcatgcggtggccgaacaacggcgccgactcttccacagtacagatatcgagcgatgggaaattgacttcgtccaggccgaacttgccgcgagccagatcgcaggtcagcatgaacttatcgaatggcaggttgtgggcaatattcgcgtcggctctggaaaagaagtcgcgaactttctggcgctgatcgaggaaagatgggtgcttgaccaggtcttcgttcttcaacccggtgatcttggtgatgatttcctcgataacgattccaggattgcagatgaactctacttcatccaaaatcttttcgccatcagttatcacgccggcgaattcgatgattctcggctgctttctcagactcaccctttggtggaacgggagtcctgtggtctcagtatcccatacagcgaatatcatgtttgttccctcttatgtcgaaaggccggctgctttcgcgaccggcctgaggagtataccgcgacggctgaagatttacgccttctgtccgtctttcggcgtgatgcggccggagcgcatggtggcgtgaacaaacgccgaatagttgatcgagtccaaggccgaatcggcatccttgaacccgctattcgccaggcgagtgagtttacccaccatgtgcatcacgaacagggcgagtcgatgatcatcggcggtcttcgccaccaggccgttcgggaagaggatttccatgatctttccgtacatcagatcattgcgaccataggtgctctggcgggcgcggaagacttctgctgcggcgtacagattgttgagaacatcttccgcgaaatcatctggatgggaatcatcttcgcccggccagacggattccatggcgaacggcgcggcgtcttcggtcgggtctttggactgagccgtttcagcgagcggagacggggctttcgcaaacgcctcgtcgagggtaggggcggagttcggggcggccgggaacggctcgcctgccatgtcgttgggcgcgctatcggggtcgctatcggccgcgacggcgaagaacggcgcatcgcaaccttccaggttcaggatgtaggagtcgatccccaggctattgtaggcatcgatgatgtcctggcgatcatcgaacgccgcgacgatcttggtgacgccttcgattttcttcaggatgtcgagcgcgactgcccgcttgaactgaggcgccggctcggtgttaccatacggccgcatgatgagttcatactcgcgatgttcggcgatgccgagttcgcggtggagcttggccctggtctggaaaaagtggttgtcggttcggccggtgacgaagaaaatcatgaggtcggcgtcgatggcattcctgatgcgacctacagcgtgcgggttgagagtgtccttgtcgagacgagaatgatactcgtcccattgccgttccaaggcgaagctcttgcggtggctatcgtcgaatacgcagccgtccagatcgaagatgatgatgccattcttgggtttgcgttccatattcagatttccttgatggttgctttctgggtgacggttttatcgatgaacgtcccatcagaagtgaggcggaaaacttcgccattctggctgaaatcgaacgattgcacgttcatcgtgatgcgaatggattcgctgccgttggtcacttcgacttgtgcgatgtcgccaactttctcgacaatgatcttcatgttacatggacttcccattaacggccacagggctggcctcttgtttttccgatccccagaaatcgcggcgcagttcttcctgctcggccgagcgatccatccaggggcgatagaacttgcactggtaaatcggctctaccggcaaattaaccacaggaatctgaccgggcttcgtctccagagcggacatgaagcggtcataggatttctgctggatttcctcttcattcatcaccttcgatccataacgcgggaaggcgcaggagccggtggcgacgcagtgcggctggagcaggctgtcgaacatcggatagacttccagcaccagccggcgcatttcgcggaacgcttcctgatattcaccctgggtccgaacgcacaggcgaaccttcgccatgtcgctgagagtccgcaggttgaacttggccgcgatcttcgtttccatgttggaagggatgatggcacgagcatcctgaagcgatgcgccggcctccaagagcttctggtaactggtctgcgcgtcggcgatggcatcgtgccacaggcggttcagctcttctcgggcgtgataggtcgggtccggctcgccattggccgtcgccggctcatcgaaatcccagcggaatgcttccggttgaactacggcgctcacctccagggcgcgactggtttcctgctggtaagccccggtgcgagtccgaacgagttgatgggtgaaattcttgctgacgccctcgatctggaaaatgaagtccacgaactcgaacggcgagcggatggtgtccagcatgtacttccagtggtcgagcttttcggcctcggtcatggtcgccgggtcttggccgcgcatgcgggtggacttcgtgcccaagagcaattcccaggcgttctgggtgtaactaatcagagaaatcttcatcagaaatcttccggaattggcgtgaagtggaatttttcggtgagagccagggccaggccttgggcttgctccctgttaaggccatactgctctatctcttccttgagcagttcgcaggcctccaggcgcgcctcatactcttcagcctcatggacggatgagaagacggctccatcagaggttcggtacacaagttcgatcgccatggtgacctcagtagcagcggatgatttcggcgcggatgtcgcgacggtcgaggtagtgctcacgaatcttgtcgcgggcacgctcggcctcttcgcggctgccgaacgacaggttgaacgacgtgaaaggcttatcatccagttcagcgccggtctgatacaggattcctaccagaacgaaagacggcgcggtcttcggctgctggtcggtttgcagttcgagaaaggacatagggagacctcttcaggatgatctggtgcgtacattaatagcgctcctgctgagcagctacggtttccggctcatagatgagcatgtcaacgatttccgggcactggcctttcacccagtcgatggccgcgaccagtgcggtggaagcggagaaagagaaagtgcggtaagactcatggatgtacggcgaccccatggaatcgcgctcggtggtgcgcgaaatgactgctttgatattaacgatccggcccatcttcggcctccactttagcgattatatcggacaggcttaacttctcgccattcaggaaataactggcgcgaaacttcctgtcgccctctggcccgacgattcgggccgttattgtgagactcccgccgccaagggcatcggtgtcccggaagaaagctagcagcgcccgcttgagcgctgcttcgcgaggatcgacggccattaacctaccacgttccagccgtgctgagcgcaccacacggcaccggtccctgcaggaagactattcagaaggaacacaggagtcaggcggccatcctcggtcatatggacgaagtagcgggcgccttcaccgagccactcggccttggcgatggcgcgttcgagattggccttggtggcgtaggtcttggtgtggttcttgtcggtggagaaggttacttcgcgggccatttgtcgattccttttggttgaagggtttcgcgtttcgatgagggaatattacgcccacctgatccagaagtaaagcacttttgtaaattacttcacgaacattttcttggccttctgataagacgaagaagtcatcaggcgctcgatgacgtccatgtcagaaaccagatcgtccagaaggacgttgcgccaggtagcgaaccggccgagcgagaagatgccggcttcatgggtgagattccagatcatggattcgcgctcgtcgcggccgagcggaacgattttgcctttggtctggatggtcggctcgccgtcctcgatgagatgccttttccttatgccgaaggccgcgcaaacgtaatccacatcccagtcgctgtcccattcgatggtttcgattttaccatctaaagtctccactatccccttagtgatggattcgacgatcagagtatcaccggtgatggacgctcgaaacgttcccactttaggaccagggaaatacacggtctggaagacatcacaggggatggaaagcttgtatcgactcacgatgatggaggttccttcaccgaatgacgggtcgattcccaggtccagccctgccgcagccagattggcgcggaacggcgcggtgctgatgatattcacgtggtcatcttgccggcgaagatactggaagaaagaggcgtcgaaaggacggctccaagtgatacgattcgcaagcttagccaccagctgctcatagtagtcggccggtgcgatccaacgcttttcagtcgccagattccagatggaccggtccgacaggccgcccgttactttcctggagtacatgttgcagtggtcgatgcgcggctgggaaatgaactcgccgtcgatgtagatagctttgtgtacagtgacttcgcggaacgggatgccggtgagttggccaatcactggcgagcggaatcgcagaagtgcgttgtggcgctccttattctccggcgtcgccgcgtcgatgatttgggcttgaggaaagcgatgcgcggcgatcagtccggcgagtccggcacctacgatgattactttctgatcaggaatcatgatgtgtcccttatgagtgtacaaaacttgagaggataaaaaagggacccattttcatgagtcccttgaagagctagacgattcaggctcagaggagcggcggcttactcctcctcaccttcggaaccatcggcgccctgatcttcaccgtcgtgctcctggccttcgtcatcggccttctcgtcatcgccctggccagcttcgtcttccttcgaagcgatggcaaccagatcgacccagcccatgatttccagcttgctcaggtagctgcgaaccgaagtgccatagagcagatgggccaacttctcgccgaaggattcgatttcgaccggctcaccaacggtgcagtgctcgttgatgtatgcgaacaccttgccgcgagtcgagaaggcctgcggagtgccatggccgtcgccggtcgggatgaagtgggtggcgcgcggacggcgggagccattggacttcaggtcttcgcggcgggcttcggccttcttgcggcgctcttcctgctcttccttgcggcgctgcttctcggcttcgcgctcagccttcttctgctcggccaggcgcttgcgctcttcttcgcgagcgactttctgagcttcctgggcggccttcttctcttcggcctttttggctcgctcggcttccttctcggccttcttctgctcgcgctcggcttccttggccttcgccttctcggcctgctcggcttccttcgccttggccttttcagcacgctcggcttctttggcggcggccttttccttcgccttctcggcgcgctcggcttccttcttctcgcgctcggccttgcgcttctcttcgcgctcggctttcttctgctcggcttccttggccttggcttcggccttctcggcgcgctcgcgctctttacgttggcgctcagcggccttctcggccttgcgcagggcagcggcttgttccttggtcagctcttcgccttgggtctgttcgttctggtccttctgttccatgttcttactccgggaatgtttaaagggatggcttattggcctgtgagaggattatctctaaactaattgaagaagggaatacccttagcctgaactttcctaaatattttctttcgggaaagtccaaactctagggaacttatttatgttcgagaagttcctagcttttacgcaagaacagtaagtattcgattgcgcgagttatcccagtatacatcaactgactataagggatggacggcaagttttcttccaacatggcgacccgtttccattccgatccctgcgacttatggaacgtcatcgcccagccgaagtcgaatccgccaatggccttctgcgcctccagccgcacatcttcctcgaccgaaaagctcaagggattgaacttcacccagcgctcatagttcgtgccgataatgcgaactttggcaaacagcatttcatccggctcgtcatcatcttcttggccttcggggaccggcttgaagtccagcagaattgcttgctcgccgttcatgatgccatattcgtgctggttcccggtgcacaccagcttctcgccgatttccggttgtacacccttgtagccgaggatgcggcgcgccctggcgttcaaacggcggcgagtattgttgtaggcgcaaaggatcacgccatcatcgtccaagaacgtccgcatttcgtcatccgacatgtcgaatccggcccgtaccagaatgtcgtcatactcgcggcagggtaggcgcttgccctggcggacgaacatcgacgctcgaacgatattgccggcgttgcgctcgatttcggtcatgatggtgtcacagctgttctcatggaaaatctggacgccgcgcacaggaggaacttggccaaagtcaccaatctccagaaccggaattcggtgcgacagcaagcgctcttcatcccactcgccgatcatggacgactcgtcgagcacgaccaacttcggcttctcgtcgagcgagtctttgttggcaaacatgatttcgccgtcttcatcttcgccaatcggccgatagatgaagctgtggagggtccgggcattggtgcaacccttctcgcgaagccgcgctgctgctttcccggttggcgcgacgaagaccgtccagtccatcgagcagcaaagttcggcgatgatcttcgcgatggaagtcttaccagttccggcgaaaccagcgagtcgatagacctggcggcggtgcgctcgatcacaccaaccgcgataccagtccacaacggaattgatcgcgtcgatctgctgactgtttggtcgaaagccgaatcgctcttcgatctgatcgacggtgaagttagatgctgacatatttgcgttctccaacgctaggtttaattgaatcgaggctcagtttaagcacgccgtccacagaccagccagtatcacgacgatacttgcggccttgcggatcgacatagaagttcttcgtgcgccgcagcagaacataatgccaagcagctccaagtgcgtggacccttcctttatacgggaaagccttcgcctgctctgcggcctctttggccccagggagccagcggacggtcgaaaggaccaggaccgcacccttaatagcctgggaagcggcgcggccgtcctgtgggctatagcgatgtctatcgaagtctacccagtggtggttgccgcgccggagcttgaccgttcgggatcgcccctcgaacaccaccgtgccttcatgagtaaaaatatgttccgccatcgaatgttcctttataacatacagttatgctttacctctgcgcaggaagagtatactatcagctgactcgccaaagcgagcgaatttaatccaactttacttcggcaggaaagtggccgatactagcgccgccgcctgtactgccctccaaaacagaggatacattaaatgcaagaatgcaagatttcccgcgaccaactcccggtcggtaatccgaatcccaatgtcgacaagacccgcgacccgaacctgaagcccggcttccttcgccgaagccgcgagctggacccggcgctggccgttcgcattcgtcgcgagctgatccacgccgaagcatccgacttggccaaggccggatgggtcaattcacagtccagcctttatggatcgaaagccttcccgcgccattccgtcgttcgcgtgaccggagttccggaagatggagctttcatcggcatgctgatcggcttcatcgagcatcgcgagcatggcgaatgggcggtcatggaagccggaacgaaagaaggcggcgccgtcatcatcccggtcgatcacatcatgcgagcgtcattcgccgaagccgaagagttcgccgaaaagtgggagcggaacttgggatggcgcctcctgcgccagctccgcgagtgcggcgccctggccgggactgaagacgagttcctgcggcggatcatcaatcgatacgttcgtgatcgcacgatcctcgaccaccacaaagtcggcgctgacaaaatctacactgatgcagtgctcaaaagcatcggcgaaacatggccgaagattccttcggggaaattcgtcggacaccgagtcgcgcaactcctgatcgaccacaagctaggtcgagcgggaaccattctgaatgacctggtggacttcctggagaagttcgcggccgggcgcgataaagttctcaacatcgccatctgtaattgaggtgaagggatgaacaataaaccgacgctgaatcaccaccatcaaactgcattgttgtatctgtataacaatccaaatcagccggccttcacaggtcccaacaatcaggcgctcaatgaacttcggcagatggggtatgtaaaggcgaaagaattcgaaaactgggcaggcaccggccatcttaggatggaatggacgctcaccaaagccgggattgagcgcgtcgaagtcgggcttctggggaagtgcgacgcttgcaagggaatcggtcagactttgcttcgggggaagtgtactgtttgcaatggccgcggccaggggtggatcagagaatggtcgcagaagccaatcgaagataatcctcaaattgtccctaagttcgaaaagaccgatgcgaatagacttgcagacgccattgaagaaatcggccggctggaaaaggcactggccgaatccgaaaagcgcgggagcgagctggccgcgagctattgtgacggcgtagtcggcgatgaatacggccatccttattgtcgttataaagtggaacgcgacgccgccttggccgaagtagagcgcctgcgagaatcaaaaggcgatccctctggcagcttcgacagttgtatgaagatgatgtacgagcgcgacgagaatgcaaaacgactcgacgccgccttggccagggtcgcggagctggaagggaagttgacggactgggtgcacgaagggttccggctcaacgaggcgctagcggtcgccaaggctcaacccagcgtgccggaggggtggaagctcgtaccgatggacccgacatcgcagatgacctctgtcggtcagtccctgcgttatgacgcggtaaacagcatcggcgagatttaccggcaaatgctcgccgtagctccctcacccatcgatccggccgcgcatcctcagccgtgccagcaaccacaggcccatcctgcccgctgcgggtgcgagcggtaagtgccaagcaaggagttcatgtaatggaacagcagaaaccttcgaaagtagatggagccatcgccatgaccgatctcgatattcgcattcttcgaaaggcgaagcccgaagcgcaggacgagtgcgccgtgtccatgttcgcaacggcgatccgccagaaactgcagcgctcccgcgataaaggccgaggcggctggatcgactgcgacgaagatgttctgatcaacggattcgccgaacatgcgctgaagggtaatgagaacaacctcttggacctggcgacgttcctgatgttcatgtgggtgcgcggcatcgacgatgcgaagattcccccggcgctcgaaaaggcgcggcagcacaagatcatggaagcatggagtcgggtccacgaagatggactaaactccgccagaaaggcgagtgctgcgcgacagttcgtggaagtgcctcgacgcaaggggcgcccggagcgacttgcatgaagcctcacgaaataagactggcacaggccgaagagttcctgcgcgaactcggccgagggattccggacgacgagagggtgatggtcggctacgctgaagaggccacagtccagaccgacgagaacggccgcaagctcaacgccggctggtggcctgtgccctggaaggaagggaaatacatcaactccagatccaacgcctacgcgtgcatctcgtcgtccatcaagacgcccaacccgaagaccggccagatgcgatactggcgcggcgaagcctctttcggccacggcctggcgttgatggtcgatgacatcggctcaggcaaagggtccaagggtgacttcgaccgcgacgagttccgcgagcgactggagccgaccgcgattgtggagacttcgccgaacaactaccagttctggtatttcttcaaagagccgatgtcccacatgctccagttcaaggcgctgctctattcgttcgtggaccaggtgctaaagaaaggcggcgacaacaccgtcaaggacgtcagccgttacggccggatgcccttcggcttcaacaacaagcgcgggaaagacggcaagttcaaatatgccgacgaaaacggcaagcccgaactcgtgcgactgttcagcgccgactattccaagcgctactcgccagaagagatcgcccaggcattcggcgtccgcatcatcatgccacagatgaagaaggtggagataaaccgcgacgattgggtgtatgaccaagtatggctgaagtatgccgagcacatctgcacgaaatacaagatgggcgaagcggcaggcggccaggtccagcagaatatgtccggcaaataccgcatccgctgtccctggggcgacgagcacaccaacggcgatcctttcggcgcatactttcgcggaccgatacctggcgccgagcacgaatatgtgttcggatgcgggcacgatacttgccgcaaagagcatcgacggacatgggcggccttcactgatgaagtcgtcctgccctatatcgtagaacaattggaacgcattaaccgccgtcacatcggcgaggagtagtaactatgcaaaatgatcctggaattctgattaccgccatcggctcattgctgctcggccttctcgtcttcttcgaaggcctgaatggctggaaaataccagtgtcaaactttctcgcgtcgctcttgtgcttcttcgtcggcctttctgctttgacgttctggttcgtcgttgcgtttgacgtattttaatcgacgaacggtacagaaattttcggatggggacggaacttattagctatgccggtttaggtaggagataatagccgtccctttcgcctcaatgtgtagaggcaatgttgaatccgatcatgtaaagcagaaggcggcaaacctaacatgattatcgacgaagataatatttttgatgatggcgaatcagggtccagtgagtttgatctcacgcagatagaagatgctggaatggaccctttgatgaccgccgcgagcaaggcggccgatgatgcgattgcgaggaacgaaacgcatcgcgcgcaaaaggcggcaagatacgccgaggcgtatgctgaaccagacttgaggaagcgagcgcggttgttgatgctcgaccaggcgttcgatcttccggtcagccgggtggtgaaagggccgttcgatgacttcatcacgaaatacagctcgacgtcagacagcaactacctcgcggtctatgatacgttgttctgtaagggcgacggaaccgtcccacacccgcacttcgacgagtttcgcggccggctggtggaccatcgcggcgtggcgttcaacaacaagaccctcgatccgattgacctgatgggcgccctcgcggctgcggccttggacgatccctcgattaagaagacgattgagacttgctgcgtttgggcgcgtcgatatcgccgcaactcgctgatcgagacgtttgagaagaagataccggattgggacggcgaagagcgaattagcacgttgctgatcgatcttttcaagccgttcgacaccgaattgaaccggatggtaagcaagtatttctggctgagcttgtactgccgcatcaactaccctggaatctcggcgccgatctcgttggcgttgattggtgggcaggatgcggggaaatcatatttcggcttgctgatctgtaaggagctgtccggtgggcgcgatctggctccagttcagctcgacctgagccgacacgaccagacgccgttcctgcgcaacatcaccggcaactcggttattgcgaacgtcggcgaaatgtccggcttcaaaaagggcgacatggaacgcatcaaagaattcctggtgcgatcttcggatacattcgaccagaagtttgagccgggcgaaacgatcaagcggcaatggatcaccatcatggacggcaacggatacgatggactccagcgggacgactccggcaaccgtcgattctatccgatgttcgtggcacaacttcccgacgaagatggaaagccgaactgggttaagccgggcgatggtaatgaaccgttcaaggtggacttcaccgacttcggccgcaaattctggcaagcgatggctgaatgccgcgcatggatcgaagagcatggtgtcgatggatacctggatatggtgtcggaagcgaaccgcgaagtgcagaagttctctatttcggaaatggagaatgcgcgtggcgtggttcgtgatgacacgattgatatgtatctgatcaacgtgctgatcagttgcgagttcgaagagatcaagcctggcaggaattcaaagaatcctggatggagagtcaacaccatcgaaatcctgaaatggttcgatattctcgccaggaagaagccgatttctcgccacttaactccgcacctgaaggcgctaggatttgttccgaataagaatggcttgaatggatggtgcctgcctgtagataaggttgcacctggatgggcgaatgacatgcacacgacgctgccgccgttcaatgatgcgcttgtgtacttgctgaggaaggtggattctgaggtgactgatgaagaggcaatgattcaaatccgcaaagttaaggccgagcgcgcaaggatattgggcgaggatttctgatgtagtgatggagtgtacttggactaggccgccttcgggcggtcttttctttggtacggagtacattcgatttcggttgtggccgagtgagattcggaagctatctggtaattagggtttggtggcgatggcgcgttgtggaaagttcgtggacggtggatcgaggattttgtgtggtgattggatgaattgtggaaaatcgacgattctgactggattttttgggtcggccgcgtcgagcttaccggtaatttacgaaaccggtaattagggcctagccttagtgccgcgtgggtttgaagggcttaaccggatactttccggtttcggatgcagccgcaaaagtatactacagcgaaaatcgattgcac

SEQ ID NO: 10 - DNA, 66392 bp, Pbunavirus
  source 1..66392: mol_type = genomic DNA
aatcctaatagaaaaaatctatcacggacgttacctatctttaaaattaataaaattaatagtaatttggtaatttggtatactttagtatttgaaagccttgcggcactaagcctgtacacttcccgtcaagtttccgattccgctcaactcgcggcagggtcgccggaaacttccagacttacaatccatgggtcgcggcaacaccacggcggactaagcggcaagcgccaaaactcgacgaacggaaccggaaatttgggagcgcgacagaatcgctcagctggacatatttctaacattcgatttaacactcctcccaaacactcaccaccatcctcacccaccaaccgccgactcgatcctcacccaccagcaaacctcccatataacatcctataacaccacctaacactcattcaccatcaaacccacccagacctacaggccacccacaagcagcccatagacgcgatccctggccccatagtacaatcgcgccatactcagtgtcgcggcagagcaccaggggccatccgccaaccaagccaccacgacgactccagaatcgaactcagggacgcagcaccaaatgaccaaattctacagccccgacgatctagtcacgccacaggaattcgcagacccgcatttcgcggcgatcaaccaaaagcgattcgacctgtacatcgacctgcgcgtccaaggttacagctcctggcgggtcttccgggccatctggggcgaggagcatatggacggtcccgcgcaggcccgcatcttcgcgatggagtccaacccgtactatcgcaagcagttcaaggccaagttgaacgcgaccaaaacgtccgatttgtggaatccaaagacggcgctccatgaactcctccagatggttcgcgacccaaccgtcaaggattccagccgtctgtcggccatcaaggagttgaacgttctggctgaaatcacgttcgtggacgagtcgggcaagacccggatcggtcgcggtttggccgacttctacgcatcagaagccgaggctcagaccgcgaccgtcgctgctgcggccgaagccaatggctatgtgccggaaggtgaagagggagatttcccgtctccgtctccggaaccgaccgaggaagaccgcgccaaccccatttagacataaaataacatcgttctaggcccgaatcggaccgaactaaggcgaaggtagcgggaagggacgaaaaacgattctagggcggttctaggaagtcggagcctaaccctcagaaacgacaaagcccccggactctagctcagaatccgggggctttcttttgggcgccttattcgccagcttcgatgatttcgaagttgtatttgacgccttcgtgctcgaaagtcatcttgccagccgccttcagctgcatgcggaagcggatatgtttcgaagaaggcaggccgaactcgatgaatgctgcgttggtggaccggaactcgccgcgcttgcctttgacagtcacagccacgccatggcgctgagtgcgtttcttggaaacttccgggtctttccaggagttggcgatggctgccgacaggtctttggactctttggctttctccggagcgttcttggcctcttcgcgcatcttccggatttcttccagcgcttcctcttcggtgatctcttcttcaggcttcagattctcttcctcggccttctcttcttccttcttcttcttggaagtgcgggttttgtagactttggccggggcttcctcttcctgaaaggcttcttcctcggccggcagagcattcaggatggcgaggcagcgacgctcagcagtcttgcggtcagagaaacgcttgacggtcgcatcggcgttgtgagcgttgtagaaggcgaccagttctttcatttctgcgttctggatgtcgccgaaggttttgatggagttggtcattttgcgatcctctgttttggaagatttcgtttgggcttcagtttgtcgccccgttgaaagagattatgcctaggtcgatgctgcgtgtctacatttattttagcagaatgatggtgaacccgacgaacggttgtcgggtgtgaaaacaccgcaggacgaggctgcggtgttttctggacgatggtgcgacggtcagaaagtcgggatcggctcgacgggcagatcgccgggcttgtcgttgtccgacgcgggcgacggactggacgggatggccccggaccgaagccccagcggttcaggccgcctgcttacctgcggagctggaggcgcaggcggagcttttggtgcttgtggaactttcggaactggaggtgctggcggagacatcggcccttctggaagatctggaagatctggaaggctcgtcgccgcgtgatcgacgccaacgaatggctctggaaggtcgatgaggctcggcaccggatcgaagcctgtgaatggagtggtcacgcagcgcatgttcggatgggtcggcagattgttcaggacgatggagtccgcccagacatacgggtttttgtggttgccgggtccgtggctgatgatctcggcaggaatatggccgttcatggtaagccattccgccatcccttgccgagtcagcgggcttaccacgatctgaccagtggactctttggcgatggcgaacagatcaccgaattcgaatccgatgattgtgtagttggacctggactcgccgacgaaagccagggtttcgatgttgtggtggatatcttgttcttcccagatgtaaagcatgatgcgctcctcaataaggctgcttgctgtattcgaccagagacataccggccggaactttgaagcggacgtattcgatcatcatcgccgtgcgacgccgattcgtgcccgactcgtcattgacgaatagttcgcactggtgcggaatgactcgcgtcaccaggcactcacctttcgagctgtagaacttgctgtaggctgcgacgcctcgcgtcatgttcagacggatcgtttcgcagagtcgctgcgcggccgacgcgctggacagatcggtcggactgaccgtcacccagtaatggccactttgttctttatcggacataagctgccctccaatgagaaagcctctgcgactcggcagaggcttgttgttgttagtcgcgcttcaacagaacgactttgtcatatgcgcgatatttaccgcgccagtcttcccagtagtcgccggccgggcaggtaagctccaggttgatttcgtcgcgccagcattcgacagaaaggacaattgccttgttcctggctgcggaatccgccctgagcttaatcagaatttcgtcgccagttttcaactcatcaactcttacaacttttgccatggtgttctcctattgggcagcgccgcgagggcggatcgggtcgatgtcatgtaagcagatggtaggatagtccctggccaacttgagcttgaagtccacccagtcagcgccgatgagtgccgagacttcgatgcttactttgctgtgcggcgcagctccagatcgcaggactatggcccgacgccgaacgggatcgttgacgtcaacatgagtgagtatttcgtcgccgacgagcaactcacaggccatcaatattttggccatcatacactcctatgagaaggcgcggccaggacgatcccagccgcgccgatggattaacgtttgtgaaggatggacactgcgtccacgtcgaggatgctaatggtacggcgacggcgcggattgctgcgttcatggatgcgaatcaggttcgcagctggagcttcgtccaccacccatacgtcttccggtttctgcgtccggagcaggaccgtcacttcagtattctgggcgaggccgttgcagatgaaagtgaacttggacgagggagttctgtacatttcgagattcctttttggacttctggtccggcttctcagccggtgaagagattatgccctgattctcaccgccgagtaaagcatttgtgtaccaattctcccgtcaggtggaaccaaagtgcggtatcgcttatggctacgctaccgcgccatggcccttcttgctcgcacactgcgaaccacaggctgatttccatccttgccaggactcggccgaaagattcgaacctgcgccgactggacaggatgtcgacattcactcgtcgattgacctcataccggcgaccgttgatgacgaagaccagccgcagggtttgtccgtccagacattcccagtatctggtttcataccgaagccagtagcgctttccagccgggcctaccatggtcatttaatcgatgctcctggccgcgccacgcggtccggtcggcgggacgggatcgaaccgacccaggatgtagtcgggccggcgcgcttcctgaggacacacggcgagaaggcgccatcctgcgtccagggcagactggagttcgtccgtgcagcagtcttccttgagcagcagacggttgacgttctggagattcggaccaggtatggccgatcctgtgagtgagttccaaccctcgattccactcaccatctccggttggttgatgtagcttacggacataccggccaaccggctcgcggccagctccagacgctccagcatgggtcgcagagcagcttccgggtcaatgtcgtcccagagaaggaccaggctgatgatggtatacggatagtccttgtccagatcccaggctgaagcggtcaggcggcccaggccgatttcattacacataacgggaacgtcgttgctccaggtggacggctcccagttccgctcaccaggattcccgattgttacgccttccaggttccccagtagaacatggagcttgctgacatattccgcctccaaggctttccgctcttcgtcggtctggttgtggcgatagaaggatggagggctgactttggcatggtagagtttcataactgttcctcggttttggaagatttgaaagttagagaatggtgtcgcagtatttctcgaaaggactctggcgcttcttctcgcagatcgcgcaggtgatttccaggtcgggcagctcgctgtaagtcttgccgagatacagccagcgcttgcacagactgcgaccgtccgccatgaagaaatggactttgcgagcgttgccgggttgcgcccagccgcttggtgccggcttcctgctcataccatcaccatgtcgatttcgctggcgaagaagttaacgccgactccatctgcgtagccggtgtaacgcagccgaatagtaccatcgatgtgggcttcttcgacgccgatgacttccaggatggtttcgtcgcagtgcagcttgacgaacatcttgatgccggagccaatcgccgcgaaggcgatctgcttgtacaggtcttgcttgatcatgctttgcgctcctgtttgcggatgtattctgccctggcttcggcttcgaacttcgcccaaagcgcgttgtcgactggaccccagggaccggtctgagtcccgtccaccggcgcgaacttgccaccggcgcgacgatacttggacagcgttctcaggctgatgattttctcttcttgggaatcgaattggacgatcacttgacatacttcccgaagtagcaggtgtggaggatttccaggcccttggagatggccttcagcttgattccgaaattcttgatcgcccagtccagatcgtggtgatagaactcgatgatgttgacgatttgaccggcgctgtagtggatgacgcgaaccttgccgttccagcggaaatcttcgcggctgtttacggcctcgactgcgatggtgtcgtttctgccgatggtccattttgagctagtcatgtcgcaatcctctttttggagtgtttcgcgtttcgatgaggtaactatacctcagcaacttcattgagtaaagcacttttgaacagattgtctaaaatttctggaagacaaatcaatcggccgcgtcatcgatagcgaacgccgatcgcgccaggtcgatgatctctggccatgtcaaagtaaaggttttgccgtcatcacgaatgataattggagtctgcagcggctcgcccaccagcattgtgtaggtatgtttctcgccggatgcggagccgatgcgggtgcttaaggtgagcggggattctttgtgtacggtgccgatcatcgtttcgttcctcggtgatacccggagaatcgggcgcgttggattaggctttgccgcgacggattgttacgccgcattcagtagtcacttccttagcggcaggatcgcgaacaagataagcacaggcggctttgacattcaaagctcgggttgcgccgagtttgcaggaaagatcattcccctcttcgtcccacagatgggcaatgcgagagatacagcccttttctacttcagcttctacagttacggactggtcaatgttaaataccggcatcgctttctctccgagattgttccgtttcaatgaggtgactatacctcagcaacttcattgagtaaagcattttcttcagattatctgaaaccttttgaagtcaggaactgccgccagagccagtcgatgtgttcgttgcagtaacgctcgccatcggacgacatagccagagcaccatccttgatgccgaaccgggtgacggcgagccattcgaactcgaactggagcgttcctgggcgagggatatggggacatggcgtatttctgcacggtcagtgatcctcagaaggtttagcgtttgcgatagccgctactttctgcataccgaggcgatagaaatcggcttctttcctggcttttgtaagctgctccatggcgtcgcacgccgtcttgtgctgggcattggcgttcttgatgctgccttccaggctcttgtccagctcttcccggagcgccttctgcgatgctagctctgcctccaaatcctggattctgagctggagctggcgatttgtctcgccaacctggttttcgcgggcgatggagttctgaaggcattcgtcaaggcgagtattttcgcgcaccagctgatgcttttcgactttcgcctttctgcacgtctctcgcatttctgaaagctcaatcgcatgcagatcgtcatccgggtctttacgctcttccttcgactccatccgcaggtagtactggccggctgcgaaggcgagcactgcctggtcggcatacgctgcggcatcggtcatgtatctggatttgtagcgaggcagaaacttgcactcctctggatcccagaggagactatcggcaataggccagaatttgcggaagccatcaggatcgacttctacattgaccatttgcagctggccggcctccacttcgacttccagaggaacctgaatggcgccggtgatgtactggaagtacactatgctagacataacacaatcctcataagaagtcgcggccgggaccatcccagccgcatcgtaatcactcttcgccttcgtccgcgctcagccactcttcgaaggcgaaatttaccttagactcgacccaatcttgaagctcatcggcgaactcgtcactgtcgatgtccatcggaatgcccagagtctcttcgttccacagttcggcattcagttcgaactggatagccggttcgccatccacattcagcaggatgcggtctgcgacttcatattcgtcgacatcgaagaggaaaccgccgctgatgatgtgctggatgaaagcttcgtcgaagttgctgatgccgatattgatctgcttagtcattttttctggccccttatttggcgagtttgtactgagctttgagggtggtcagcttagctttcagggcgatcatagcctggccgcgcaggccttccatttctgcctcgctgatggcgatcttggcggagcggatttgatcgttgatctgggatttggtcatttctgcgttcctctgttttggagtgtttcgcgttcgatgaagagattatgacgctattcagaatggaagtaaagcagaattgtgaaatatttctcaaagtggacgaacggtatgccccgtcaggaatatttcctcccatggaaggcatttccgcatccgaatgttgattaggtatcccaaagcgcgcagtggcgaatgtgagtccgcacgtacatagggttgtattgtgcgaagtgctcgacggtcgcatccaaggctctgctattgccgcacccttccgctttgcgagccaggaagaatgcttctatttgctggtttgcgttcatcgtcttaccctccaggtgtttgttcgtttcgatgaagagattatgccgttggtcagaatggaagtaaagtgtattaacaataaaattatgttcaccgacgaacggttgtgctcgaccgtccgttgcggcgtcgatatactcgacctattgctgacaccggattgattagaatgtacaaactcaaccctgcactgcgagcggtctggcgaactcgcgcccgttacaaagtcatttatggcggccgggcgtcttcgaagtcacacgacgcaggcggtatcgccgttttcctcgcggccaactacaagctaaagttcctctgtgctcgccagtttcagaaccgcatcagcgaatcggtctacacgttgatcaaggacaagatcgaaaactcagagtataatggcgaattcatcttcaccaagaactctatcaagcacaagagtaccgggtcagagttcctattctatgggatcgcccgtaacctgtcggaaatcaagtccaccgaaggcatcgacattctctggcttgaggaagctcactatctgacccaggagcaatgggaagtcatcgagccgaccatccggaaagagaactcagaaatctggatcatcttcaacccgaacgaagtgaccgacttcgtgtatcagaacttcgtggtcaagccaccgaaagattcctgcgtcaagatgatcaactggaatgaaaatccgttcctcagtgagacgatgctcaaagtcattcacgaagcatatgagcgcgaccgggagcaggccgagcacatttatggcgggattccgaagactggtggcgacaaatccgtcatcaatctcaagttcattcttgcggccatcgacgcccacaagaaactcggctgggagccggccggatcgaagcgcatcggcttcgacgttgcggacgacggcgaggatgcgaacgcaactacgctcatgcacggcaacgtcattatggaagtggacgaatgggacggcctggaagatgaactgctcaagtcgtccagccgcgtttacaacctggcgaagatgaaaggcgcctcggtcacttatgactccatcggtgtcggcgctcacgtcggatcgaagttcgccgagttgaacgatgccagtcccgacttcaaactgatctatgatccattcaacgcgggcggcgctgtcgataagcctgatgatatctacatgaagctgccgcacacgacgatcaagaacaaagaccacttcagcaacatcaaggcgcagaagtgggaagaagtcgcgacccgattccggaagacttatgaagcggttgagcatggaaaggtttatcccttcgacgaattgatttcgatcaactctgaaacgattcacccggacaaactaaatcaactgtgtatcgaactttcgtcgccgcgcaaagacctggacatgaacggccggttcaaagtcgagtccaagaaggatatgcgcgagaaacgcaagatcaagtcgccgaacatcgctgactcggtgattatgtcggccattctgccgatccggaagcccaaaggtttcttcgacttctaaacacagaaaagcccggatcgctccgggcttcgggtcttactcggtgtggttcctggcgctgagtgtcgacgcaacggcctcgccgactcccagggcttcctggccggccgcgagcgcttcggcttccgactcgacgatgaagtcatcaccttggccgtcgcctggcggaacctcgaccagcacggcttcttcgccttcgaaccgcaggtcataagtcttttcgacggacagtccgtaacgggcattgagcgcatcccagagctgagcttcatagttgcgcaggtcttgcagagatttctggtggctgagcatcgccatatcgacggcccgttgcagggtttcgtccaggacgttgaatcgcatgcgaagagaacgaatccgctcgaccacttccgcatccactacatgtctttcgatcatcgcttttcacctttgctgaatgttacgttgtagccattgtcggccaggtaggtcagggcgccttcgaaggaagttccgacaagatgctttagctgcatttcgcgttgcgcggcgatccagaatgccgttccggagaactctgcgcggccttccgacaataccttgccatcaggcccgtcgatccgaacgtgaacggaagatagcttcagtaccatcaatgaatccctccactggcttgcgacggcatgctttcagcgcgagcggcttcacagtccgggcagggacaggcttggcggacgcgctccaactcgtcggcatccatgacatagagcttcccatcggaagtgtcgtgcgccatggcgatgttcgggaagtcggcagcgctcaggccggcgacagcgcggatttcgtcccagagcgccacatgctcggcattcaggcgagctgcgagcgcttcgtgctctttcgctacacgagccatgaactcgtccatccggaatgcgaattccgcatcgatggatcgggccgaggccatggagttgaggcgaatcggttctttcttcatggtaattctcttttggctgggggtttgtggtctacccaggcctattcaaagcctgggtagcatgatgctgaagatgaacaagaaggctgcaaacgccaatagcgttcctgtgagtattttggttcggctctgcagctcagcgtactccttggttgacagcccttgctgcgccgcctcggccgcgaaacgagctttcgcctcgataacttccgggcgcagcgacaggacatattctaaggcctcttcccgcgctttttcggcctcgaccgacctagggtcgcgggccgagacttcgctgtgccctggcctcgcgggatgggcctgcagcgatggaggaagttcagcagccacgactccatagtcggcgcaggcccaagcgatcccgatgaggatcgcgaggatggattggacgattcgcagcatcactttgtcgctagggaagttcataatcaatcctccaccgaccgaacgatttccatattgcgcccggcattggcccctgcattgaaggcgcgccgaccgtcgctatcgtccagacgcatgagcttcgtaacattggacttcttgtagccaggatcgccgaaatgttcgtgaaccgcagcttccttcaccaccaccagagacgttccggcagaagataccagctccatacgcttcctggtgatggactgaaggcgatagctgatttcctgggtcgcggcgagcttgaattgcgcggcaaccttgacgttgaaccgttcgaatccttgagctttctgatactcccggcacagacgatcaacggcctcgaccagggaattgaacatgttcaccgccagctccacgtccgacttgtagcctttaaagcgaacggcatggccccagcgtttggtggtgctgccgtcgcgggcgctcctggacgccttggccgatgctcggtgattgttgacgccaccggcgaaatccatgatgcagtcgttgtacgtcgcaacggccaccgagaagaatttcatccaattcgggattgcggaatagtaacgagtagcgatttgctcgtcgaactcttcgcgaatctcgccggccgcttcgaagtcgtgaagatcatatttgtccttcagcttcttcacgcgctcggcagcgatggccgcttcgtgcggactggaagagtcggccgccatggcggtcagcttgcggatgcggtctttcgctttctcgatggcttccggggtgaattcgttctggtcggtcatgttacgttccttttgtctgaagggtttcgctttcgatggagctattctgccttcatccagaatggaagtaaagcattttcttccattatttcggaagagcctggaaataattccaagcccagtcgcctgcggccaggacgaagatgatgaccgcgaagaacgcgattgcagcgaccagttgcgcgcccggcttcagcttgggatggctgagcttgggctctacgggagcgcccggagtgctggcgctggaaccggcgtctcctgggccgtagccgattccacgttcacgcgcctggagcgacaccagggatttcagatactcggtctgcttttgcgactcttcgtagatgccggcgacggcgaaccagagcgcgaacactacggccgtgcatatgacccaggcgccggtcagcaggagggccagcggaccgatgaggaagacggaagcggccaggacgatggcgccgccccagatgatgaagccggccagaccattggtgatgtcgatacagaactttttcatttttcagattccttcggttacgggatggaggggatttggaactctgcgccgccgagaacatcaatgacgacttcccagagcgtcggaacagaccactggtaacggtcgaagtcggtttcaggatcgacgcccagcgtcacataggaagtggcaggccatttatgaacactgcctttccgcatgagagtcgccacgcggccgtcaccgagcggattcgtcctgtgcggaacgtacgcagacatcgaatattgctgcccggcgtcgacaacaaatctttgcctctggcgcagacatacagagcccacaggattccagccgcgaccgccgcaagcctggcgagccgaagaatgctcataaccttcgtgagtcatttcgccgaggcaagccgagcgatcctcgtaatagttgatgttctccatcgatccaaccagcaccagagactcgaaatcgaatcgatgatcgtggatggccgagtgattgaagcaaagccgacgcggcagctccgggtgccaaacatggaggcgaccggccggaagttggacctgaatgaaccccaggccgtgcagagtgatcttgtccttcatcgggtcatggacggtgctcatggataatcctcagtagcagaaatgtattgtgagagttacgattgacaagccggtcgcccatagaagggcgaaccaggccatggctttgatggtcgtgtagatcatccgaagaattttccggcacagatcgggccaatgcccatttcgatggatgcgtggttggtcaactcgcgaccgcagcaggagcactgaccagtcttccgaccgtaggcgactgccgattccatcggcttttcgaacatcttcagaacgtcgtcgtgctcagtatcggtgcagtcgcgactcttgatgaatttgccattggtgatccggccgaggtagatgtcgcccaggacgtacaggctaccggcgttccggctgtgagcgctagcctctttcacaacaacgatgagcggctcctcgccttcgccagctaggcggattttcgggcgcttgataccagactctttcgccttctcaaacgctttctcgatgccggaaatgtccagagtcggcgcagcagcttcctgcgcggccactttctcgcgatacttggcgaggttttcgatggcgcgcttcgcagcagcgatctgattttctgtcaaggagccgtatttatacaacgactcctgaaggctctgagcgaagctgaaggaatttccagtccaccactcgatgatgtccgggtgcgcggcttcgaaggccttaattttgaggtcgcgctcttgcgcagcgctacagattttctcgatgcgcttttctaccgccttagcacggctcttggcgcgctgctccgggctggttttatactctttgtatccgacgccgccgcaggcaaagcaggcgcgaccataagacgaagggccacggtacaggccggtgcctgcgcatttggtgcacttgtcgcgatacagcttcacttccttccgggagttcgggcgggcacccatggacacgtcttccagggtcttcggcgcttcgttgttgatctctacggtagcgaagtcatcacccaggtcttcgaagccggtgaacagattctctgctgcgttcatgtcgattctcctgtttggaaagttcgtttcgatgagttgactatacgccagaaatggaaaaacggtagagatttctcactaccgttcgtcgggtcgaagacaatcaataaatgtcgctattgatcttgaacccatgctcagcgccgtcgttgtagtcgtactcagcatagctgtcgcagtagtcgttcaaatgctgaatgatgcctagaacgtcgttcgcggccttgtgccgtttcgcggcgatggtcttggcgatgctgtcgccgacttccagggtttcggccgtccggcgatggatcagcagacggctccaaagatagagccggacgcgacgaatgatgtctcgatggcgctccagtcgtccgtgcaactcttcaatttcttgctcgcgagatttcactactcgtcgaagctgctgaacttccagttccaaatcggccttagtagccatgttcacctcaaaaaggaaaatcgtctgggactccaggaagttcgacgattattgttgagcctgatcgatccagaatgcatccgaccgagccagccctgtggggatagggtctacacgaactataacaggtaacttccatgactattcgccaggtcgatcctccacaccatctacagactggtgggcgcttcgacttcagttttcgttcgtccaagacggcgcgtctgtcgcatgaaaggcagcgcgccttaaccgacgtaaccatgggtatagtcgatcattcggatgagaccatcatcctctgattccctcgacttcagaccgcccaaagagtccaactggccgttgcatttcgcatcgatatccatcgaagacaggaatcctgccgatactgcggtgatatcaactttgtcgccggccttcttgaagtcttcgcactcagcatcgagggccacaattgcactcgcggccatgttcacatgactgatgaggtcggggaagatcacaggaacttcacgcgacatgccacggaccgtcagcttcaggactacatacttcatactcactatcccttttgtatgtgaggaaagaacttgctgttttccggatggtgaaaacgctcggtcgcaggcggtctttcttccggacattgaatcgtcgaaggcgggaaaaccgcgccggcgataatcgccgcgaggagtgcagcggatgtcgacatccagagggcggtttccaggctcacccgaacttccggacggcgcggcttcattcgctccaccctcttcctggctcataggatggcagaccgccgccgcgaatccaattgtcccacatacggttcagaccagtcggtggctggggcggcggactgtagaatccgggagtctcagtgctgctcaggaaataaggcgtgcaaacggcctggacgaccaattggtgccgctcccacatcttatcaatcgctcttagcatgacgtcttcgcactgagccttactgtcgaaccgtctgctagtatggtccggcatctggacgcagccgtctccagtgcaaaggaaagcagtagcaatccatacggtgatactcgccatttcgtcaccctctttagttgatgagcagagtctattccatctgctcgccaggagtaaagcgcttttcgtcgggataaatgccgatgatgtctgcgtcaagcatccaaatctccacggacggatcgtcgctgctgatttgatataggttgtacagctcccgtccgccgacagcacgctcgcctcgtggctcaaccgccagaaccttgccgtgtccttctccgtgctcgtccaggtatatgacgtgatcaccgacttcatagctttctttcgtgacgaggcgtgaacgcgagctgttctgcgattccaccatccaggaatccagcacgccgcctttcatgtcgcgaaacaatcttgccgatttgtcgcaatcgaatacgcccagaacttcgccgtctttcaacacgatatgtacgattggcaaaagagtattcatgtttaatctccattggttgataattagagtctaatctgccgaaaagttcccgtaaagaattattttctcataactgattagttgcaactgttaatctgatgtatatgtttgaatctcttttgaacgtttgatgtttcccctataataagcgcacacagtcaacaaccacgtggaactacaatgtttaaactttcctggatattcgggcgcaaaaaggataatgctgcctgttcggaatcggcgccggagaaagtcgcacaaatccctcaacacgatccgctcgaccccatgatcaagctgggaaggattcgcggctggaacgtcgagccggagaaaaccccggtcattcgtagtgtgaaagatttcctggagccgggcctatctgtagcgatggatagtgcgtatggtgatggaccaactccggccgcgaaggctgctgcgggcggccagaatccctatgtcgtcccgactatgttgcaggactggtacaattcccaagggtttatcggataccaagcttgcgcaatcatttcccagcactggttggtggacaaagcttgttccatgtctggggaagacgcagcacggaacggatgggaactcaaatcggacggcaggaagctatccgatgaacaaagcgcgctgatcgcccggcgcgacatggagtttcgcgtcaaagacaaccttgtcgaactcaacagattcaagaacgttttcggcgttcgtatcgcgctgttcgtcgtggagtctgacgatccggactactacgaaaagccgttcaatccggatggaatcacgcccggctcctacaagggaatctcccagatcgatccatactgggcaatgccgcagctcactgctggctcgacggcagatccgtcttccgaacatttctatgagccggatttctggattatcagcggcaaaaaatatcaccgcagccacctagtggtggttcgtggaccgcagccgccagatatcctgaagcctacatacatcttcggcggtatcccgctcacccagagaatctatgagcgcgtgtatgcagcggaacggacggcgaacgaagccccgctgcttgccatgtcgaagcgaaccagcaccatccacgttgacgtggagaaggccatcgcgaacgaagaggccttcaacgctcgcctggcgttctggatcgccaaccgtgataaccacggcgtgaaagttctgggaattgacgaaggcatggagcagttcgacacgaacctggccgacttcgacagcatcatcatgaaccaatatcagctggtcgcggccatcgccaagactccagccacgaagctcctcggcacttctccaaaaggattcaatgccactggtgagcacgaaacgatttcttatcacgaagaactggagtccattcaagagcacatattcgacccacttcttgaacgccactatttgcttctggcgaagtcggaagaaatcgatgtgcagctggaaatcgtctggaatcctgtagactccacgtccagccagcaacaagccgaattgaacaacaagaaagccgctaccgacgaaatctacatcaactctggcgttgtgtctccggatgaagttcgcgagcgtctgcgcgacgatccgcgttccggctacaaccgactcaccgacgatcaggcagaaaccgaaccgggcatgtctccggaaaacctggccgaattcgagaaggccggtgcacagtcgacaaaggcgaaaggcgaagccgagcgagccgaagcccaggcgggcgccgtagagggcgcaggcggcccggttcccgccgctccacgcgggactaagcctctcgcgaaagcggccgaggaaggggccagcgaggccgctgaaccgccgtcgaggccggaccccaaggccgagctgcggaacttgttggtcgatcttttgtcgaagctccaagacctggacgacattaaggcgccggacggcgtagacatagagcacaatgatgcgcctggcttaaagcgcacatccaaacctggcgtgtctggtatggagccttcggtgttttcgtccaaccgcatcgtcgggcctcgtgatcattcggaactccagagaatcaaggtgaatggaataaccaccttgatcgaaaatccgcgcggaagcattcgacaaggcaaggatgggagttggcgagttcagatgaaacaccactacgggttcatcaagggaacgaaaggcgctgatggggatgaagtcgattgcttcgtcggtccgaatctgggatccaaacgggtcttcgtcgtcaaccaagtgaacaagggaggtcagtttgacgagcacaagtgtatgctcggcttcaacaacatcaacgatgcgaagtctggatatctgtcctgcttccgtccgggctgggatggtctcggctccatccatgaagttgacctgcccgctttccgtcgctggctggcgaacggcgacaccaccaaaccgttcgggggcgagtgatggcattcaaggcctccaaaaagcgcgagcgccgggcacctcttccagtcggaagagggaagcccataattccatcggcaggaatcgaggcctggtatcgaaagcagatgaaggatatgtccaagctcatgatctccgactatcgaaacgagattgagaaggcgctgtcccagcctgcggccgaacgtttcttcgccagagacgaatccgttaacgtcctgttcaagatgacccttcgaagcctacagcagcgatggagccgcatttttgaaggtttcgcggccaagatcgccccggagttcgtcaaccggaccgaagaagccgctaccgccgcgacccttcacagcttgtcggtggccggcgtcgatcagccacgagctgcgtataatgagagcgtcaggaacaccctggaggccgcaaccacttacaatcatactctcatcaccaagatccaagaggacgtccacgagaagatttacacatcagtaatgctgtctctgacttccccgaatccggaagagcaaggaacttccggcataactaacgcacttcgcaaagtcgggaagttttctgaagatcgaatcgaactcatcgcaagagatcaaacaagcaagctttacagttctctgagcgatgagagaatggcggaaaatggagtcgaggagttcgagtggctacactcttctgccggcaagactcctcgccacacccacctggagaaagatgggaagaggttcaagctgaatgaccccagactttgggagggtccgaaagcagaccaggggccgccaggatgggcgattaactgtagatgcagaaagataccagtcatttgacatcgataggagcgctatatgccgttagttcatggcacttccaatgaggctcgttctgaaaacatcaagcgggaaatcgaagccggtaaagacccaaagcaggctgcggccatcgcttattccatccagcgcagtgagaaagggaagacggcgaaagattgttcgcctgagctcgtcgccgatcttcgcgccctggtgggcgctctgtcgaggctcgtgaaatgaaccgcaagacgtgccggcgccgactcgtggtcgatgtaatcagggccaatattcacggcggattcttcagcctgaagtttgccgccatcgatttggcaatcatcggcgtcgccatcttgatggcttttggccgataatgctgagaaaaatctggattctgactaaaaattctagtccggatagccgcaagttaccgtttacggaaaatagcagtaatttggaaatcctactgccgcgaggctttaacagagccagttcctaatttccgatttagccgcatgcttcaaaagtatatagcctgggaaattagaagtaacgttccaatagaattcatctataagtaacgttataatataacgtcaatctatatgctctagacgtattgaaattcaatttttaatcggtaaattggtaatttgaattagtttaggagttgaaagcctcgcggcagtaggcttagacaaatcacgtcaagtttccgagaccaaattaccggattttcgcggctgaggaaactggtaattagatcacaatacaaattataatgtaagttaacagtcacggctacatctaattattgttccgcttatttacccttagatgtactgcgtatataatacagccatagtccacgactcttcgaattaacgatggcaaagtcgaaaagaaaaattgacgaaaatggatatatgaccatagagggctgcccgatcagctcttatggcgttttccaatattctgctggtcaactcggtcttccgggcgatccgacgcggattgtcaacgtatatcgcccggagtctgccgtcagcgatccggagtacatcgaatctctgaagaatctcccgttgatcgacgagcatgagatgctgtcgggattcgacgatgatgacgatagcgtggcccccgaagacaaaggggtggagggcatcatcacatccaacgcttactacgaagccccatgggcacgcggcgatatccgcatctattcccgcaacatgcagaatcagctggaaaggggcaaagaagacctgtccctaggctatagttgccgctacactgagcaacccggcatctggaacgggacgccttatgaagtcgtccaggacaagatgcgcggcaaccacatcgccctggtaaaagagggtcgtgtgccgggggccagagtattggatggtctgtgttttgaccatctcagttttgatttcagaccatccgatgagggtaatgaaatgagtctcaagaaagccaagcggaagccccctgtccagcgcgtagggcaagctgctgactcggcggtcgaagagttgcgcgccctgtggccgaagctatctgcgtctgtccagaagttcctgggcgaagaagagcaggagccggagcatcaggaaggcgcagctccggccgaaccgaccgacagcgagcacctgaccgagcatccgactctggaaggtgctcagaaggatgacgaagagcaggaagaggagccttccgttgtcgatccggccgtggccgccgtcgagccggagcatcaagaaggtgccgcatccgaaatgtccggtgaaggcgaagtcgccgaactgatctctcaggtcaaagccattctggctcgactggagggcacggtagccgaaggggcagacgaagagcatggcgaaggtcaagatgtcgtcgagggcttggaggagcagagcagcctcagcggctcgcaaaccgccagcgacgatggtggtgagagcaaggataacagcgaggaacttcctgaaatggcacagaagaacgcgcaagatgctgcaattcgcggtctctatcgcgacattgctgctaaagatcgcctctacaagcgtcttagctccgtggttggtgcgttcgatcaccgagctatggactcggctgaagtcgctgtttacggcgtgaaaaagctgaatatcagctgcgcgaagggccaggaagctctggcgctcgacatgtacctgaaaggcgtcgaagcctcgcggggcgcggccagccgtcaatcgaaagcccaggattcggccggttctgctccgcagtgcgccgagctggacagctacctgaagggggagtaactcatgttccagaaacaagtttaccgccagtacactcctggttttccgggcgatctgatcgaggacggcccgaagcgggcgcggccgggtcgaatcatgtctctgtctgccgtaaatccggctgccaccgccaccggccccaaccgcatcagtcgcgctttcggttacgccggtgacgtcagctccctcggcgaaggtcagccgaagactatcgcggctcgcgcttctgaagtcgtgatcggcggcgccaacttctttggtgtcctcggtcatccgaagcactatgcgctgttcggttcggccggagactccctggctcccagctatgatctgcccgatggcgccgaaggcgagttcttcgacatggccaccggcctggtcgtcgaaattttcaacggcgccgcaaccgccctggacctggactatggtgacctggtcgcctatgtaccaaacaacctgcctaccgccgacaacgcgcttggcctgccggccggcgccctggttggcttcaaggctggctccatgccgaccggcttggtccagattcccaacgcacgcatcgttaacgccatcagtctgccggcccagtcggcggggaatctggttgctggcgttaccatcgtccagctcacgcagtaaggaggcgtcatgagccagatcagcaagacccattcgcgcctcgcaggccgcaatgcgaaacctttcgacctgaaaaacatcaccaatgacgccgtggcgtctctgcgccgcatcggcctggtattcgatcacgccgtcgtccaggaccagatcaaggccttggcgaaggccggcgcgttccgctccggctcggccatggacagcaacttcaccgccccggtgaccacgccgtccatcccgactcccatccagttcctgcagacctggttgccgggcttcgtgaaggtcatgaccgctgcacggaagatcgacgaaatcatcggcatcgataccgttggctcctgggaagatcaagaaatcgtccagggcatcgtggagccggccggcactgcggtggaatacggcgaccacaccaacatcccgctgaccagctggaacgccaacttcgaacgtcgcaccatcgttcgtggcgagctgggtatgatggtgggcaccctggaagagggtcgtgcctcggccatccggctgaacagcgccgaaaccaaacgccaacaggcggccatcggtctggaaatcttccgcaacgccatcggcttttatggctggcagagcggcctgggcaaccgcacctatggtttcctgaacgatcccaacctgccgccgttccagaccccgccgagccagggttggtccactgccgactgggcaggcatcatcggcgatatccgcgaggccgttcgccagctgcgtattcagagtcaagatcagatcgatccgaaggcggaaaagatcaccctggccctggccaccagcaaggtggactacctgtcggtcaccacgccatacggcatttcggtttctgactggatcgaacagacctatccgaaaatgcggatcgtgtctgctccggaactgtcaggcgtccagatgaaagcccaagagccggaagatgctctggtgctcttcgtcgaagacgtgaacgcggccgtcgatggaagcaccgatggcggcagcgtgttcagccagctggtacagagcaagttcatcaccctgggtgtcgaaaagcgggcgaagtcgtatgtggaagacttctccaacggcaccgctggtgcgctgtgtaagcgtccgtgggccgtggtgcgctacctcggcatctaaccgatgcctattcaccaaaggccgggtttccggcctttgttcactctgactctgactcggttgtaggggccggttagggcataattactaggactacgccaatgactgtttacatcgtttccgccatgactcaatccgtgtcttacaatgcgtatgacacctctgatccgtccaatcctcgccttcagcggaagattctgattcgtggccgcgccggcatcgcatcagaaacttccggcttcggcgacatgatttccgacgcggccgggcgtccgatctggaccccgcagggcgattgtactgccgtgagcgattcggatttcgagctgctccaggccaacaagattttcatgcgtcacatggataagggttatctgcgagtcgtgaagaccgacatcaccagtgaccaccagcggatttccaaagagactcgcaccatggagcgcgatggattccagcctctggacgctgctcgtctgcagcagaaaatcaaggtgactaccgccagcgcttcccaggaacaagagttccggatttaaccgagggtttcggtatggtgattttcgacgaacataagtttcgcacgctgtttccggagtttgctgatccagccgcttatccggacgtgcgcctgcagatgtacttcgacattgcgtgcgaattcatttctgatcgcgattcgccataccggattctcaatggtaaagccctggaagcctgtctgtatcttctgaccgcccacctcctgtcgctgtccacgatgcaagttcagggcgcggctggaggtggcgtcactgccggtgggacccagggcggtttcatcaccagcgctactgtcggcgaggtcagcgtggccaagctcgcgcccccggccaagaatggttggcagtggtggctttccgggacgccttatggtcaagagttgtgggcgctcctcagcgtcaaagcggtgggcggattctacatcggcggtcttccagagcgccgaggcttccggaaggttggagggacgttctggtgatccctggtgcgaatcttctgcgaatggccttcggggtcatcggtactcaaattgtgaaatatcgcaagtttgagcagcgagtgaagaatgatcaagctcagtacgtttccatgttcgaggagcctttcgacctggcagcgtctgttcagcgagtccgacgcgatcagtatgtccagtttaatctggagttccaacggaattacgttatgatcttcgccaactttgagatggttgacttggatcgcgatgtggccggtgaccagttcctctggaccggaagagtctttcagctggagtctcaaggctcctggttttatcaggacggctggggagtttgcctggccgtggatatcggtgcgaccaagctcgctgatgacgggaaaccgactttctaggtgatgtatgtttgacggcgaactgatagcgaaactggttgtcgagttgaatgcggcgatggcatctgctcaagaggctttgcagttcccggattttgaagtcgtccagaaagctcagccgacccaacagggaacgtcaaccaggccgaccatctttttccagaaactgtttgacattcctcgcggctggcctgccaccgattggcacctggacaacacggcccgcaaatatgtagaaataactcgacagcatgtagagacgactttccagatcagttcccttcattggcagaatcctgaaataactcacgtggttacggcttctgatatcgccaactatgtgagggcttatttccaagctcgatccacgattgagcgcgtaaaggaactggacttcctcattcttcgcgtgtctcaaatttccaacgaagcattcgagaacgacaatcaccagttcgaattccacccaagttttgacatggttgtaacttacaaccaatatattcgcctgtacgaaaacgcagcatattcggccgatggggtattaataggcatatgagtctgaggcgcgattcagagctaatcgccgcgcacctccagatgttaagagccatgcgcggcaggtccgtttcagccggatggtattccacggctcgatatcctgacaaggcaggtggatcggtcggaatacaagtcgcgagaatcgcacgtctcaatgagtacggcggaactatcgaccatccgggcgggaccaggtatattagggacgccattgttcggggtcggtttgttggcgttcggttcgtcagaaacgactttccgggagaaaccgaggtaactaagcctcacagaattaccatcccggctagaccgtttatgcgatatgcttggaacttgttttccgcagatcgcgccgcaatccagaaccggatagccatgaggctggccagaggacagatcactccagatcaagctcttgcccagatcggcctggcgttggaaggatacatagccagaagcatcaggaccgggccatgggtggctaactcagcatctacggtcaggagaaagggattcaacagaccgctggtcgatacggcgcacatgcttcaatcgattagcagcagagtaacataaccaggagatcatccagtgatcagtcagagccgttatatccggatcatttcgggcgtaggcgcaggcgctccggtcgcaggccgaaagctgattctgcgcgtcatgactaccaacaacgtcatcccgcccggaatcgtcatcgagttcgacaacgccaacgcagtcatgtcatacttcggcgcgcagtcggaagagtatcagcgggctgcggcttatttcaaattcatcagtaaaagcgtgaattcgccgtccagcatcagcttcgctcgctgggtaaacaccgccatcgcgccgatggttgttggtgacaatctgccgaagaccatcgccgatttcgccggcttctcagcaggggttctgaccatcatggtcggcgcggccgaacagaacatcaccgccatcgatacgtccgcagcgacttctatggacaacgtggcgtcgatcatccagaccgaaatccgcaagaacgccgacccgcagctggcccaggctaccgttacctggaatcagaacaccaaccagttcaccttggtcggcgccaccatcggcaccggcgtcctggctgtggcgaaatctgccgatccccaggacatgtccactgccctcggctggtccacctccaacgtcgtcaacgtcgccggccaggctgccgatcttcccgacgcggccgttgccaagagcaccaatgtcagcaacaacttcggttcgttcctgttcgccggtgcgccgctcgacaatgaccagatcaaggccgtgtcggcctggaacgcggctcagaacaaccagttcatctacacggtcgctacttccctggcgaacctcggcactcttttcaccttggtgaatggcaacgccgggaccgccctgaacgtgctgtcggcgactgctgccaacgacttcgtggagcagtgccccagcgagattctggctgccaccaactacgatgagccgggcgcttcgcaaaactacatgtactaccaattccctggccgcaacatcactgtttccgacgataccgttgcgaacaccgtcgacaagagccggggcaactacatcggcgtcacccaggccaatggccagcaactcgcgttctaccagcgcggcattctgtgcggcggtccgaccgatgcggtggacatgaacgtctatgccaacgaaatctggctgaagtcggctatcgctcaagcgctcctggacctgttcctgaacgtcaatgcggtcccggcgagcagcactggcgaggcgatgaccctggcggtgctgcagccggttctggacaaggcgacagccaacggcacgttcacctacggcaaggaaatcagcgccgtccagcagcagtacatcacccaagtcaccggtgatcgccgcgcctggcgtcaagtccaaaccctgggttactggatcaacatcaccttctccagctataccaacagcaacactggcttgaccgagtggaaggccaactacacgctgatctattcgaagggcgatgccatccgcttcgtcgaaggatcggacgtgatgatctaatggtttgcggcggactcgatccgccgctaccttccataaatggagtgaggaataagcaatgatcaacatttctgcgttcggctcgatctgccagttcacggcaagcagaactttcccgaacggattcaccgtcaccgagttcgccgacgatgccgatcccatcgacagcccgccgttcaccgctgccgataccggcgtcggtctcaacggtgacatggtagtttggaaccgggcgaacatcctggaagtagtcgtcaacgttatcccgaacaccgagggcgagcgcaacctggcagtcctgctggatgccaaccgcaccgggaaagacaagtcgggcgctcgtgatgtcgtcggtttggtcgtggcgatgccggacggcagcaaaatcacctgcaccaacggcacccccatcgacggcgttctgatcaacgctgtggcaagcgtcggccgtctgaagaccaagccgtatcggttccgattcgaaaaagtgatcaaagccggtactagctgatgaagaaaattccgctgacagcagtccccaatcaagcgatctcatttaacgccggtagcagctattggaagattcgcctgtaccagaacatggacatgatgaatgccgatatcagccgcgacggcgtgatcgtttgccatggggtccgctgcttcggcgggattcctcttctccaatacagccatcagtaccgacctgactatggcaatttcgtcttcgaccgcgacgccgattggacgttgttcggcgacggaattaacctgttctatctggacggcgccgaattcgcagagtatcaggcgctcgccacgaggaaagaatgagcacatcaacgatcagaaccgggacgaacaatgatatccttttggacgacaatggaaacatggtcatcctcagggatgtcgaagcgtgcgcccaggacgttcgggcggcgatgctcatgcgcaccggcgaaaatattttcgatgtgaactccggcgtgggatatttcgaatacatcttctcgccgcagaaaagctatgatgacgctcgcaaatccatcgcggatgcaattttgtcctcgccggatgtgaccggcatcgagcagctggacatcgacatcaccggggaagtcttcggcgtcgatgctaaagtcatcaccatccacgggcctgttaccacaggagtttgaaatgagcacaatccgcatccaatacgccaacggcacccaactgttcctggacggcaaaaatccgccgcccctggacctgctgccctcgtttaacccgtctgtcgaagatctggaaggcctggaccgcgaaaagaacaccgacaaaggcgactcctcgccggccggtcttcccgttcccccggtaaacgtcgattccaatgtcgacaacggcggaaccatcccggctccggtatcgaccgacgctcctgcggccgaatcggccccggaaggcgcccaggaagctcctgcagcgggccaaggcgacgagaaaggcgccgaggaagccccgactaccgccccagtagaaaaggccgaggaaacggcctcgccggccgctgaagaggcagccccggctcccgccaaggccacctctcgcaaaaccaccagcaagtaaggactcgacatgatcaacgtcagcggcttcggcacaggaattgtaatagtttccgcctcatcgttcccgatggggttttccttgtcgaagttcgctgatgatgagagtccgatatcctccaaagagctggagccgttcggatatgagatgctttatgacggtggcctattcgcctttgacaaggctgctcctctggaagtatctgtatccgtcatcgcagggagcgaggatgatattaaccttcgcatccttctcaattccaaaaagggatcattcagatttcttccgggaatcatcccggacatgacgactctcgtggccactcttcctgatggcggccgcaccgttctgtccaatgggactatcatcaagggtccggccatcgacaccatacagaacaccggacgacgcaaaggcaacacgtacacttttgttttcggtagctatcttggcgcccagactgcgcgtcaagccatttctaacgttatccaatcggtactggaggtggtctgatgttagggattttcaccagcctcctaagttcgcgatctttttcgattgtggaccaaaacacaaaccagctagttgctgcggatttgaggataagccgggtcaacacccggttttcttctgtagggcaacgccacatgctggaagatggtacgaccaagatggattccagaacgatccaccctatggaaatcatcgtcgaagtattttgcccttcaattgatgtcgtcgatcagatcaatcaattgctcctggatcgcgacacactgtacaaagtcatcactcgcggcatggtattcgaacggatgatgtgtaccagcgaagcgctcaatcagactccggatatgatatcggcgactcctgcgcggctgacattctcccaagttctcgtccagaatcccaagcctataatgttcagaaatgcaggggactcttctatgatcgaccgagggctggccctagctgaagacgtggttggctcggccggcgatctgttcgactacgcagtgaacggcgtccagaacgccgcagacttgttctgaggtgccaattgaactctttcctcaagtctattctcaacacgcctactctcaccatacgcgatgatgttaccaaacttcctgtctggaagagtcttcaagtcaagaaagtggaaatttactcgccggcttccgtagtgtcgaaacctctggcgacgaaagaccagacggaagctcaagtgtacaccgaagctctggacattgatgtgaagaatggaaagatcatccaaccggtgcgactccgcatcagtgctatctgtccggacctgtccaccgttgaaagtatcatgaacgctttcaatgataacacctcgactttcgctatcacttctaagtcgatattggccgataaaatggccatcatgacgctcgatgtagatcagtctccagacatgttgaacgcggctgagatcaatatggaattcgagcaggttgagcctccagtattgaataaattcgatcctgcgttccctcaagatagtccgacttatggggtacagattcaatctctttctgatgctaatttgctggatttgggcgccatcggcgattcgatatcttcggccgcaaaatcgctatataatcgcgtgaccagctacttctgagggtgtatcatgcttgaaatcaatcttcccgatggccgtcaaactcgcgtacaaatcgaggcgtggtcggcattggatggctggggcctccagcgccgtttcgtcgaatttgctgtcagccaagattccgacttccgccgctctttcaccatggaaatcctgggatatgcgaaagtgctgcttggcgacgatgacaccggcattccgctgaccaccgcggcagtcatcaacaaccacctcggccactggaagaacgtggaactggttttcaactctgttctcaagcacaatggcatcgacccggccacgcacgccgaccggccggactattgggaacaagtcggatcgcagatggccatcgcatttctggccgaggcgtccaagctcattggtccagcaatgaagatcgccgaaggactcgccaacaagccggagtgattcatgtctagtgatttggatgaattcatacttcggtatgaggccgatactgccagagccgagcgcaatctggagcgcctccagaaccagatcaggcgcgtgaacagcgcatcgacgagtggccttcaggatttgcgccacttcgcagacggcgcggccactgaactcggccgagtcgttccgcagatcgattctgtgacgagcgcgattcgcgggatgaacgcgcaactggcgataggcgccactggcgtggccctggtcgcggccggcgtcaaggcgttcatgaacaccagggaccagtacaatcagcagcgcatccaggcgatggacatcggcatcgccccggcacgcttggaagagtaccagagaaaattcgttcgccagtccggtggaaccatcagccgcgagcagggcgcggagatgaccaaaaatctggcagacactttccggcgtgcttatcgcgatatcgggcgagtcggcccggaagcgcgaattctgcgtatggccggcgttgatgtcgggagcttccaaaagggcatgcggccgctcaacgacatcattactgatctggccacgaaaatggccaagctgaagccggacgaaatttctgcctacgctgatgcccttggcgtctcgcgagactacctgagcaccctggctaagatcggcccggccatgggaaaagtcaccgagatgacgactgcggaactccagtccagggtccagggcgagtccaacattcagaaattcaacgatgctctggcgaatctcaaccagacgttcaccaccctggaaaaccgagtcggcgaaaagctcgcgcctgcgttcaccaagctgatcgaaatcatcgacaagatagtccaggctattcccaatgaagtggaaagcttcgcgaaggacaccaaatcccgttgggaagatggagtgctcgggaaggcgaccgttggcagtgatatcctatccctcctcagccccggcgccctgctcggtcgcctggcagcgtgggggactcgtcgcggcatggaagaatcagggctcatcgacaaggacaaggttcccggcgctcaaaccagcgaagacctggccaagaaacaagaagaccaggacaaggctactaagtccatgaaagagctagagaagctggctgaccagaccacgaagtctaccaatgattttgcggtggcgatcaacatgttcagtggcgcggtatcgtcgttcgcgaatgccgttgacgagcgccaagcttgggcagcctgggcgggggaaattggtcgggcggtcggtatgggaagcaccgcgccgacttcgcgggccaccggcgtctatccgcacgcgatctatgatcagtcgaagagtggcgcggccggacaagtcttcggcgagccaatcggcgcccagtctcttcgcaatcgcatgttctcgccgcagcgcaaggccgaaccggtcaccgttccatcgtacatcaacgacatcatcaaagatgcgtcgaagatgtacaacattcctgagctggacatcaagaaactcatatacaccgaaagccgattcaacgccagggctaccagcgaagccggagcgaaaggcctcatgcagctgatgccggaaatcgccaaggcgtatggtataactgacgtatatgaccctcgccagaacatcctcggcggaacgcgtctattgcgggaaaacctggatcgagccaatggcgacatgcggctggccttgacctactatcacggcggcctcgatccgaagaactggggaccaaggactcgcgcatatccgggtttggtgatgagcgctccaatcgagctgatggaagaggcgcagcgcaagcagaaggctgcggccatgaccgccgccaacgagacgttcgctccggaaggcggcgacatggacattcgcccctatgatggcggacgattggaaactccagaccagggcaagaaggaagatgagcgccgcgaagcccgtcgatatgacgacagggttgtgcgaccggaaattcgcatcatcgaccgcatgccagaccgcagcgacggcgaaatcctcaagatgtctagacgtcaagaggccgaccgggcagattctggattccggaagttcccgaatcaagttcgcggcgagaccaagcagaacatccaggctcaactcactgcaggagccatcgcgcaagtgatcggcgttaaccccaaccagatcatgcgccgcgaaatcagccgttctgacttgctgttcggatacaaccaagccatcctgggcaagcaacaggagatcaaggccgccgcgaccgaagccaacaacgtattcctgtctccagccaagcttgccgaagccacggccaaggtgaacgccgcatcgcgagaaatggatattctcaggacatacggcgagcaacttctgaagagcgctccagagcgcggccaggagctgaccatcggtcgaatcgacatgttggtcaacgtcaccggcgcgaattctccggaagaggctcgcgagatattcagtaagcagactgcagaccagctgactacggcaatccaggacgctcaaaacgattccgcaactaagatactctactgatgaaaaagagaattctgcgagtaacattcaacatgccttatggacccgaagtcatccgcgaagatctggatgttcgggtccggattatgaaggctgcgttgcggattcagaaccgggcgacgatggaaattttcggcctcaccactcagctgcgcgagtctcttctgtcgcagttcaccgcgtggaagcaccggcaacgtcaagtgggcagggaagatgaattgatgatcaaggtgtcggtggaagccggctactctgaccaggggcgcgagcaagtttccagagtctttgtcggcgaagttgccattgtcgatatcatttctccgccaccggacattggaatccgcatccagtgctataccaggcaaatcgacaggacgaagaccattcggaatatgccgcccgccaacacgacgtttgtcaagttcgtcgagtggggcgcgaacgaaatgggattgaacttcatctgcgataccagttacaacgatcaagttctgaagaatccgggccggtctatcactgtcgcgtcggcaatcctggcgtcgattcaggatatgtacatgccggacgtggccgcgttcgtcgatgatgacatattgatcgtgaaggaccgcgataaagtcattcgtccggatgaggtgaccaacgtcaactcgtttgttggaattccatcttggtctgaatggggcgtggaattccagtgtctgtttgagccatcgattcgtgtggctggaggcgtagcggtcgaatctctcatgaatccaagtgttaatggtaactatgtaataactgctctggaatacgatttggccagtcgggatcggccgttctatatcaaagtcatggggagtccagcagcataatggccagggaaatcaaatcattcaacatgttcggagttcactatacttcgcggcaattctctgccgtcgatgggctcagcatgatgtcggaaattcagagcgtgccgccagaagaattgctcaagggtactgatgtattggcgcatccggaagaccatccggaaggcatctggcttccattgactgctgcgaacatcaatctttatgtcgttgatcgagcgaaagtaatagctcccgtacaagttcttgcacttctgtccgaagtggtaatcgactggaattttggttttctcaaagactggaccggagtcaagattccatccagatttgtcgaagatatcaaaagcgtgaagacggcacattcaccttctgtagttgcgagtttggtggcgaacggttcggcctctatgcgcgagttggaagagtattattcgactcaagatgcctttaagatgatagatatcatgacggcgaagagcgtgaacgaggccttggcgtccgaagcatcgcacaacagaatcaaaaagggataattcctaaccgggcctgggaaggctatactagacctgccaaatcagaggctttcccatgtccaatatttctctaacatcagcaaaagctcccgacaggacgcgactgatcgccgctcttgacgctcggtcgcggcgggatgctctagatttcgaagtaatgataccggctcaggttgttcaatatgacagggccgagaatatcgcaacgattcaacctctcatcacctgggttgacacggaacacaacgccgtccaaaggcatcagctggttgatattcctgtaatttccatgggggctggcggcttccacataagtttcccgattcagcaaggtgacataggctggatttatgcggccgaccgcgacacatctcagttcctggagtcgttgtcaatgtcgaagccgaacaccggccgcatccataagttcgagcatggcctgttcatcccggacgtattccgtcgatacaccatcaattccgaagattcggccgctatggtcatacaatcgacttccggagcgaccagaatttcgattcgcggcgacaacatcaagatcactgcgccgtcgaatgtcaccgtggatactccgcaggcgaatttcactggtgatgtgactatcgctaacactctggttgtaaacggtatcaacgtgaacaaccacggccacctcgaaaacaacccgcctgatgcccggacgaagggcggcatgattgcttaaggagaatttcatggcaagttttgatttttctgatttaacagcgggggggggttgtaatggctaactacaactacatcgtcgatactggtgtgatagtcgcagataccgccgacgttctgagtgacgttgaagccgagttccgcgccgccctcggtgccaatatcaacttggccgcgagcactccgcagggatcgcttgtcgcggccgaggccatcgcccgttccagtgtcatgcggaatgaagcgcgaattgccaatgccataaacccgaacgtttcattcggaacgttcctggacgcgatctgtgccttgatggggatcgagcgcggttctgacctgtcaaccttcggctatggagttcaagtcaccggccgcagccaaacccgcatttccaccgggtctagggtccagactccggccggcgcgatcttcacagtgatgagtgatgtcacgattcctgctggtggtgtcgcgaccatcgatatcaaatcgcaggagtatggcaacattcctctgccggtcgggaatctcatcatcatcgacggaacaattggctggtccggagcgaaagtcatcgcctccactcgcgtcgatccgggcagccgccaaatgagcgatgcagagttgaagaatgcccgcgttaatcgattggccatccaaggccgcaactcgactatggccatcaaggcgtatgtgagcgccgttccaaacgtcacgtcggtgaacgtaatcgagaacaacaccggcgccgttcaagtggtgaatggagtctcgtttacccttccgtatgctgtttgggtctgcgtcgccggaaacccggataaacaagcagtcgccgatgcgttgtgggccgcccataacggcggaactccatgggactatggtgcgacgaacaacggcgtcccggtggacggtccgaatggcgttcctgtgcgcgatccggcgtccggtcgaaagtatgtcgtgaagtggaccactccaattatgtacgatggatatgttaacgtaacagtccagcaaggttcctcctctgtagctccggaagccattcagaacgcagtggtcaattacgcccaggggaaagtggaaggggaagaggggctggtggtgggcgcgagcctgtcggcattcgaagtcgccggcgccatcgctcgcgaaattcccggcatctacatcaaactctgccaggtcgcgtgcgtcgcggctggctcgccggctccggctccgggcgatttcacttcggaatacgtcatgagcgcattcggccaggctaccatttccgttggtaacgttcgggtgactttcgtatgactctgcctgcgtacaattcggacatccaacaagctctgaaatggctccataaccaggcgcctgggatcaccggcctgatccagagaaaggcgcaatggtatgacagattcagccgccaattctgggccaactgggagcgcgacgttttccacttgaaaaccgccaacccgttcggccttatggtttggtgcatcatcctcggcacgccttcgaaagggttcggcctttatccaaaaaacagttcttgggcattcggtcggctacgccagaacttcatctatagcggtacacaagttccgccaccggcagacgcatcgcctggcggcaacttctacggtggcggcaatgccgaaattctcaacttggacgaaatcaggaaagtgcttcagctaagatatgtagcgctgatttctaacggctcgattgcatatgtcaatcgcatgcttcgttacatattcaatgatgatgagccatgggacgaggcgaccggtctgtacttctatctcatggactcaaccggcgagaatggccctgtggagaacttggcgatatatcggaaagattgggaaggtatggtgctattgtccagttcgcccagaacgaaccacgtgctgacatcgacccctgccagcgacgccgattggccgggagtcgatccggccgcgagcggtattccggtaacggtcgaaacggcgtccgctacggccccggacggctccgctacggtgtgcaagcttactaagccggccgggagtaccgcttacgtctccgcgccgatagatgggccgctggggtccggtagcactgtcacgttctcgttcttcgcgaaagccggctccacccgtttcattgcaattcagtcggctgccgatttccccagtcgagccgatgccgttttcgacctggattccgggaacgtaatcagcgatcagatgctggacagcagcgtggtaagcgcccgaatgattcgtctggaaaatggctggtggcgttgcgttctcacgaccaagaccgtcagttcttcgttccgcgctgcttacgtcgctccggcagaaaccaacttcagctggattgattcgagttccagcgcggcgattgatgtgcttatctggggcactcagatcgaactgggtgatactccaaccggatacttggagactaccggaacgcccgtaaccatcaccgattacgttctgcagagcgcccagaccggaacggtcaagttcacacagcctcttccgaccggagtagaagcgtattggactggagactggaaaggtgggtctgcgaccgagccggccagattcgcagtaggggatgggactcaagatacattcaatctgtccagccctgcatacatcggcctacccactagtggggcgttcaagctagaatacagagttggtccggcgcttaatttgtcgccgcaattgatcaacctcatgaatgaccgggcggtcggcatcatgccgacttgcgccggttgcgatgtaaaagtcattcaggagtaatgacgtgatcacacccgaactgatacccagtccgtttgccgctcagggcgataaagacccgattccacaaacctcctccactggcttcgcaaaccttcgcgacggctatacgccggactacgaaatcagcctggcgtcgaacaacccgcaggccaaagcggtcgagcggaaaattcaaaaccaactcttcttcatcgcgacccagaacgcacaggcgtggcagcgacaaatggcgccgccgtggtttcagggcatgcctggcggctacgaacagaatgcagaagtcgtgcgcgtcggaaatgacggcataatgcggcgttatcgttccatggtgaatgccaatgcgagcgaccctctcagcagcacgacttgggaagaacaacccgcatggtcggtgatgcgctccaacatcccgatgccggccggaggcccaggcctatcttctggcggagaagtcatcacgaccggccgcaacttcaacgacctgttaaatgggacgtgggagttcttctctgattcagtggttatcgcttctcagaatgcccccgtatatccggcttccgctggtgccgctgctggcatgttggaggcgaaatcttgggtgtccggagccaatacgttctgcgtccaacgctacactgatcgcgtcgggaacgtcgctgtgcgcgggcttaatgccggagcgtggaccaactggatgtatgcggtaaacgtcatggcccttcaacaaggtcgggtcacctatggagtcgcggccggatcggcgaacgcttacacgttgacgctagttccgcagctccaaggcggcctggtggatggcatgattcttcgggtcaagttcaacaccatgaacaccggcgcctccaccatcaacgtctccggactcggcgccaaagccatcgtcggcgcggccaacttccctctcaccggcggcgaacttggccaaggactcatcgctgagcttgtcttcgacgcagcaggcgaccgctggagaatcctcgcaggcgcgccacgcatccaagttggcaacgccgatcaagattaccaggcccccagctggaaacaggtgaaggattacgtcgcgtcccaaaagctgactgaagtggactgggctgacgtcgtcaacaagccgaacgtcgctatccaagacactacgccgtggttcgccaatctggagttgtctgacgctcggcctttcatcgatttccacttcaacaacaaccgcgccaaagacttcgactatcgctttatctctgaagctgatgggtcgatggcgttctactctcgccaggggtccgctggtcctacccaggatatcctgttcagcaggtcgaatgttacattcctccagccgcgactggatgttgcgaaaaacctcgcgtacatcgcgaactctggtcccctttggcagaacaccactgccgatcagcctggttggaaattcaccttcgcacaaggtgtggacgccaacaacaacgcggttatcgcagtcaataccaccaaccctgacggctcttatcgctcgcaggtcatgcgatgggactgggcgtccacgaacgtcatattcaacaaccgtccgctcttcgccggtcaatacaccccttgggattctgggaacttcgatccttccaccaagttgacggtgagtgccacgaaccaaatcgccggcccaaccgggattcggaataccaacggcaacaccggcaacatgaacacctggggttccggctccacgacggcatcctatggcaatgctgccattcaaatcttcggaaaagggggcggtgagcctgccgcgatctatttcgacaactcccagaccggatggtatctgggcatggacaaggatggacagctcaagcgggccggctggtcgctcggcaataactcctatgtgatcaccgacgaatccaacatccgaacccatatcaacacaatggctgcgcgcccgatttgggggaatgtcgagttctggggtccgtggaacttcgatccgaatcttaaactcactttgaacgctttcaatgatagctcatacaccaggatgaccaacagcggcgcgaaagacgttggtatcgcgtccatgacgagttatgctgatgcggccatgtcattcttcaactatgaagcctcgaatccgaccgggccgcgcgcggccgttatttcgttcgtgagaaatggatcgcgtggagtgctattcggcttggattctgacaacaagctgaagtggggcggatattccctaggggccgtcgcgttcgagattgccgactccaacaacctcatgagcctgtggtcatcccacgctgccgcgccgaactggaacgggcagaccatctggaggtcgggaaacttcaacccagacaccaaggcgactttggcagctcgcaatacgacgtcatcccctacaatattcagttatggggcgtccggaatcgcatcaaccggacaggtcggtgcgttggttgtggaaaacaacagagtcaccaataccgcagccgccatcacgttccattcgccgcagaaatatcaggtcaacttcggcctggatgcggacaacgtggtaaagatcggtggcggcacaatgggcggcgtagcatatcccatcatccactccggcaactacaacaactacatcaaccaggcgctggttcaggtgggtcttggcggagtcggttcctacgcgatccttgccgtatttgacacctccgcgccggcagcgtccattgcccccggaacgatcatggacagttccaagctgttctattcgtcctgcgattcgacctatcgcagcagcgcccgtccgacgggcacctggcgctgcatggggtatgtgtataaccgagactccaccaacggcgactcggcatccctattccagcgggtaacgtaacatgaaatggacgcggatcagaaaccctcgttggctggatgaaacaaacatccacgccatggtgactttcgatgggatcggggaagttcctttcaccgccaatccgcacgacgtggaggcccacggaagggccatccacgctgcgatcctatccggggcgcacggatctatcgccccggtcgatgcgaagcgggagcaggccttgcaggacgctatacgggccagggaaaagcgggctatccttcgtgatacccgctggcccatagatcgtcacgacgagcagaggcggctgggtatcgaaaccacggacggacctgggttgatagcagcccttgttcactggaggcagcagattcgcgattggaatagcggggatcggccgcgacttcccatggctctgaaaacgatgttcaaaaatcaggagtattgatgaaaatcacgaaggatgttctgatcaccgggaccgggtgcaccacggatcgggcgatcaagtggctggatgatgtacaggcggccatggacaagttccacatcgagtcaccgcgagccatcgcggcctacctcgccaacatcggcgtcgagtccggcggactggtaagtctggtggagaatctcaactacagcgcccaagggttggccaacacctggccgcgccggtacgcagtagacccgcgagtccgcccgtatgtcccgaatgctctggcgaaccgcctggcccgtaacccggttgccatcgccaacaacgtgtacgcggatcgtatgggcaatggctgtgagcaggatggtgacggttggaagtatcgcgggcgcggcctgatccagctgaccgggaagtcgaactattcactgttcgccgaagactccggcatggacgttctggagaaaccggagcttctggaaactccggccggcgcgtcgatgtcttcggcctggttcttctggcgcaatcgctgtatccccatggcggagtccaacaacttctccctggtcgtgaaaaccatcaacggcgccgcgcctaacgatgcgaaccacggccagctccggatcaaccgctatatgaagaccatcgccgcgatcaatcaaggctcctgacattccacccaaagaaaaggccgcttattcagcggcctttttgctttctggctttgcctcttcaaccatcttgatctcgaccggcgcggcggactcctcctgagttaccgaatccacatagttccctagtgaactcagaacgccgattaacagcgctcttactaccttgtccttgactgtctcgcctatgatcttggtcagaacggatatcaactcttcccggagtcttgggctgattcttggccgaaagcgcttgcgatgctctttgcgtttcatgtttagtcctctgtctgcggtcttctcctcaccccgataatggcttggggatgcgctgtgttagtcggaagggtcgggcgctattataacccgtcgaaaatgctcgcgcttaactgtttaacgatacgcaccgcgatactaaatcgccttctttctggccaaggaactctggcggcctggtccggtctaaggcctaatttgtcgacattaaaacgagaaaacccggatcgcctgtaggacaaggcgtccgggtttatttcgatctagtgtacgctagaatcagtggcttccgccccaaccgtccagccagcaatcgaagacggcgtgtctcggcttgtccttggcgccatgggagaagtgcttgaaccggatgacctggcccttgagatactccctgtcattccagcggcgctgtttctcgtcgtgggtcaggctggaggccgacacgttgaaggtgactccaggccacagacgttcgttgcggcagacgaacgcaccgaccattccggacggcgacaggttttctgcgtggctggagcgggccgtgtggccaagttcattgatgaaagcttcattgttgttgtgcatcaactcttccacgtcgatgatctcagcttcatcgtagtcgtatcgcttgactttcacacagtgcccttccttggcagtcgagcgaccgaacttgtacagtccatcagcgcgcttgcccatggacccttcgaatcccagcatcgtgtggcggcgctcgacttcgctgaactgttcgatggaagtcaccagttcctgctctaccaggtgaatcctctcatagccgaggcagttacgcaggaagttcacgcgctcggccgccctggctaggcgatcttcggtcggtgcgcgaggatcggtgaaatcatcgaacacatggaaagaccagtccggctcaccgctgtggcggcgaagatcgccggacgacttctggaaaactttcgggtcgctgatgtcgccgcagaccagctcgccgtccaggccgttgaacagtttatcgctgaggtattcgtagatcgattgattgttctgccgcttgagttgacgagtcagcgcctcgccttcgaatacgaagcagcgaaatccatcgatcttcggtgagaaatacatcggcagttggccttcaagcagcttcgggtcaaaattcgatgcgagcatgggtttcatacagttctccagaaaagaagcccggcgaaccgggctaaatggcggtaagccggctcagatggtttcgttggcgtggttcagttcggccacgatcgacgcatagcgctcgtccgactccttgatgaacacgccgtcgtacatgacgcctttgcgatccttgatggtgtcgtaggccgcagcgtagcaggcgagcatggtagtgtcgtgctcttccgtcacatcgaacagagtcatgacggccaagaccaggctcttgatggctaatccatgatttccgcgtgccagcgcgccggccagatgtccgaggtgctgcaaatcgtcgccgtaggtgggatgaacttcgacagtctcgctgaagaccgatagatgatcgaacagattttcaccgagttgcgcggccatgaccgtggcaaccaccattacgtcgccgatgccgtctttcacctcgactggtttgttataaacccaggcttcgcaaacttctgcgaactcttcgaccaacttcaggaattgatccttggccgaagagcctttgatcaggttccggtcggaaccccatttaacaaccaggtcgtgaagttcgcgactcatgatttgttcgatattcattctttcgattccttttggatttgggatttgactgcgttgattatggacgccgtgctctggcgcgatccatccttggtggtgccgaagtagaaggccatgaccgacttcagctcggcgaaccaatagccgatgatggtgccgatggcgacagaggatgtcgggtccatcagagcctcgcggccgaaggtgaagattgcgatgatgatgagaatggagcccgtcagaagagcgaatgtaatcgccgggcgaacgaaatcgttctgctgcgcggcaagcctcctcgccgaatccctgtctgccgcctctgcggcgaactggctaagctcggcctggagctgattctgctcagactgaaggcgattttgttcggcttgaatcgcaagctcctggagacgaacgcgctcggcgctctggagttcggcgaggcgcgctagagcttccggattcgcgtctagagcgctagcgaccgaggctgggtcggccttcgaccccagcgccgtcgcgacgatagcgccaacggcggcgcctgcaggcccacccaggagcgaccccagagccggggcagccgcgccgatcttactacctatgtctttccagtccatttcgactcctcaaaagaaaggcgccattacagcgcctttctctggccgttgacgttagaactcttcggcttcggtcgcatcgccgacgccaccggcgtcactgcgaggctgttcctgcttgctgtagtccaccttcacctcgccgccgacgaacgacttgtacaggtcggccgcagccttgaagtgatccgggttcttcaccaggccttccagctcgaactggacgccggaccagctgcccttgtcgttcgacatgcctacggtggtcatacggaccaggttggcgaaagtcggcggggtgcgcaggccctgcggggtctgaacctttttctgggacagcgcggtcatgagcttcttcgaggccttgatctgcgaagacgacagggagatcagagcctggccgaaatcgccggtgtccggatcgatgacgatgacgtaatgaccacgggtgtcggcgaagtagtcagacttcttgtcgctgaccgaaccgtcttcgttcggcgcgtacaggcgtccttcgacttccttcaccttggtcgggtctttcatcatttccttgaagtcttcgacgctgatggcgcccttgaaaccgccctcggcctcgcgaccggcccagcggatgaactcgcggcggtacgcggccggaatgatcagcaggccggtcttgccgtcgtaaaccttgccggtgacggtgttcaggaacatgccggccttcgcgccttcgatgtacttcgggtcatcttcatcgacctggggagacatcttctgcaaaacctggatgaaggggatggcataggactcggcatcggcgccttcgaagcctgcgccgtcatacgatcccaaatccatgaagtcgggaacttcggtagtcgcgacggcgccgccaccggtggcaactgctacggccttggtttcttcggttgcttcggaagtttcggttttcttaccagccatgttaggctccttgtttgtcgaatttcagttatcgctaactgtgggtttataataacggaagttgcaactaagtaaagcaaattacatattaagatttgctctttttcaccttcggtttcgtgatcttggcctctttgtattcgtgtacgccgatgaaatctggcagctcttcgcccttctccaggtactcgcgaccgaacgcctggagggtctggtaatggacatcgcggttgatggtggcgtcatagccggcttcgatgatggcctcggccgccttcttcgcatcttccatttcgccgcgaccgaattcggccagaaccttggtcttgatgatgccgtcgttgtcggtgtcttccagccacttccagaacttcgatttgttctcttccttgacggaaatgatggccttcggctctacttttaccgtgcgaccgtccgccagagtagtggtcttctgaccaagctcctccaacagctccggaatggtgttacgcttgagggtcttcagctcctcttccttttcggccagcgccttttgaagatcgaggatttcgccgtccagctgcgaagccttgtccaccaagttcagcagtcgatggccgatgtcggtggcttcaaccgccatttcatccatgacgccaaaatagtcgatttcgcccggcgcgttctctttcaagtattccgggatttcaagctcttgctctttcatgtccgcctccaacttattgatgttcccttacttgaaccaagtattgagtagatattatgccgcatcttccttgatacggctactgatttacatattaaatttcgtcgcgagtgctaacgtcagcctcaaacacgccatcaacgacataacttgccaggttgcgtttccactccaagctgacctggattttctcgtcgatggaatccagacagatcaggtcgaagtacagaaccgagttgacggtgccgattcgatgatttcggtcttcggactgcatccgcaactcgttgtcttcgtcggtcgtgtagtaaatggccacgtctgcggcggtgagcgtgatcccgatccctgctgcggccgggttgcccaggaacacctggacgcgcttggcctggaaatcgtcgatcaatttttcccgctcggcctctttggtctcgccgtagtaggtgccaaacgaaatcccttgggcctccaaatacgccttgatctggtcgatttcctgaatgcgcatggcccagacgatgatggaacgctccgggtcttcctccagcagaccctccagaagatcagtaaacacggcgaatcgcgggttgtcttcgggcggcaggatcaccggctcaccatagacgttgatatagccggacgccacttgcttgagcttcgagcgcgctgccgcagcatcgaaagatacatcaagcatgaaatcttcgttctggagaacaaagtggtagtcttcttccacgcgctggtaaacctttcgttgctcaggcgacatttcgaagtatatgcgcttgtacactttgtccggcaggaatgggagtgcttctttcttcgttacacggaaactgtgcggctcgatcagggaccgcagcttgtccaggttccggaataccgggcgcccacactcgtctttttcgaccagttgcggcggcatggtttgcttcccttccagcttgcgcatgatagcgatcattcgaggatcgtcactgggcaccaagacggaaaattcggccacaaacgcccgataggatttagtccccagaattccattccgcaagaattggaactgcatgaacaaatcggtcggtgcccgcgtcagaggagttccggaaaggatgcgacgggccacggccttctcgcccagctttacgatctttttcgcacgcttggcttgtgggtttttgatcctcgttgactcgtccacaattgcgcaaactttgaatgtatcaaggaatcgctcgacctcatcatagccagcctggtggttgattgcgtcaacgttgatggcgaagacgcgaagaactttttcatctgcgaacgtctcggaatacagacggtccaagcgcgccctggcctttttggaagtcggtcggccgcgccaatccacgctcaaagtcttgatcgcgacgtgggtgggaatctcgcgcagaatccagttggtgtggacgcctttgggggcgacgatgagcagcgcgtccacgcgcccctgtaggaagaggcgaacggcatcggccaaagtcgtccaagtcttcccggtgccctgctccatcaggtatgcgaagttccgtttgttcagggacgctgccagggcattgaattggtgctgcatggcctcggtcttcatgcccttgacgggatatgttttggctttcatttgttctccaaatcggcgaggaactgaacaatgttatccagtccttctgcatagctcgcaacttccaccaagtcgcggctgttaagctcgaacaaatcgagcataggattcagcagcagccaatcggttccgatcttggccaggacgaagccccggccaccccagccgatccgctcccgaagaaaagggatttgcccaggttcgaaacatctggccattgggcaggtggaagcgcgtttcggccactcctccaaagccttgaactcgacccagaactggacacctcgacgattcaggcagatcgaatcggacatgccagaccgccgcgtctccagaaagtcgatcaggattcggccgagcgagcgctgcttaaacgcattcgccgctttcgtttcgcgatcattcatcaccttcgccctctttggaaactttctctgcttgcgctgccagctttgctttttcgcgttcggtcaaaatccgcttgacggccttcacgatgaacatatcgattccgctgagcttccagcctttgatgaggaaccaagaacctgtcggcgtcccttcagcaatctgctttccgtattgcagatatttttcaggcctaattctgaaacgtatcggctgatcaaccgagtcatcaacacacatgatgtcgagaaactgcgactggcccttgtacaccgggtttttcccttgatcagccctcttcttctggcgaatcggttcgttctcatcagacagaacttttttcaccatcttgacaatgaccagaccatcatctccatcgcggatatcccgaatgttctgaatggggtttccggaagttactccaaccagctccggattgtcataagcatgaccccagagcgtgtgagcttcgttcaaatctgcgaattgaacttcagaattcgacagactcgcggcgactttctcccaatcctgaagcgtcttcaggtgggtgcctgccagctctttatattgagccttcaactccttcagatcggccttcaactccttcagatcggccttcaacagtttctccagttctttgtcttggctgattttcgccgaaagaatctgggcttccagagctgctacatcagcagccttgtcctcaacatcctgtgccgatatcgggcaattggccagggcgatcctcgcggccttgacttcctcacgaagacgcaggaaccgctcggccttcgccgggccgaagcctttggcgttcatgatgccgccgatcaggcgcccgtccgccaccacccagttgagttcggaatgctccgggtccagggccgtatattctacgccttctttggccaattcgcgaaggatagacacagtttgctggtcgtccttcgccgcccgaaggcacgcggccgcgtattccaggcgatgataccgcttcatgtagcaagtccagtatgtcaccacggcatagcttaccgagtgggagcggttgaatccccaggcgccgaatgtcaccatttcctgccaaactcggtgagcgtcttccggggcgacgcctatggtcttggcgccctcgatgaacaattctcggcgcttgttgaagaactcttcgcccttccgcgccgacatcgctttccggatcgccgacgtttgttcccagtcgaactgaccaatgtccttaacaattgacatgatctgttcttggtacaggaacacgccatacgtccccgacaaatactgctcgacctgcggaatggtataggtcacaggctcgcggccggccacgcgctcgatatacttggttgccataccagaagacaacggacccggacgggcgagcgccgtgatgtggtcgatgttctcgaacgcggtgatgttgatcgcgtttgctaccgagcgaacggcctgcccttcgaactggaagatgccggacattttgtcttcattgagaacgtccagaaccgccttgtcgttcaaaggcaagtcgtacaactcttgcgcggtcacgcagttcgcgtcctggatgactcccaaagttcgaagtccaagcgcgtcaattttgaggagattcagatattccgaatcgggcttgtcgagctgcgcaacgccttcggaagtcaccgtacagaagtcgatgacttcatcgttgcagaccaggatgcctgccgcgtggacgccagagtgggatgggtgaatttcgaggtcgcccatgcaggcggacgcgatctcatacttttcacggaagtcgcggccgggctgagttttttcgaaagtgtcctccaatccttttccatatcgttcgtccgctgatgtatattcgatgatcgagtttttgatgttgtcggtatcgtggaaggggatgccgaagcgctttccgacgtgagcgataaccgacgcggccttgagtgtgttgatgttacccaacttcacaacgttccaagtgccatacttctgctggagatattcgaacactagatagcgatgggtatcggcgaagtcgatatctatatcgggaagatcggaacgggaaatgtcgataaagcgctggaagagaaggcgatgcgggagcgggtcaacctcggtaatgcccaggaggtagcagaccaaagagccggctgaagagccgcgagccgggccgaccagcatatgcttcttggcgaacgcaaccagatcggcgaccaccagaaagtagctgtcgaagtctttcagctgaatctgcttgatctcttcttggaatcgatcctcatactcctgggtccattccttgatgtggccgcgactgaggcggtaggcttgcccctcgcgagccagagcgacgatatcaccatccaagtggatcatcggcgccttcgccagtttcacatccgccaactgctcgactaccgcacgagtattggcggcggcggcatcgaactcttcgcgagtcatgatgtggcgtaaacggctccacaactcctcttcggtggcgatgtggcgaaggccgaccgattcccgcaccttccaggcagacgcgaaatcagcatggtcgatggacggcatgtcgttgtaagaggtaatcaccaccggctttccgaatgctctggacgtctccatagcaccgtgcgcggcgaccatcgacgcgggattgatgtcaatgtagtcgattccggccagatccagatgggcataggcctcgccagcgaatttgatgacgccgtcagcttcctggaattcttgcggagtcaatccttgattctggaccgacttggaagtcaagcggtagaacttcttagtttccttggcaagcacccaggctttgagcttcagctctttttcgccgtcgtcggcgcatttgatcggaatttccatgccgaatccgcgaggcagttctgctttggtagcagcctgctcccaacggacgtgaccccaggttccatcatcgacgatggcgacgaatggggattcgatctctttggcgcgctcgatgatctccgggaatcgcccatatgcggcgccgtaggagtagccagagcgaacgcggagttgagggaaagacattatgcggcctccattgcttgatatgcccgatatacgcccatgcgcttgcaaacttcgtggagcagccgcacgtcgtcgagcgcccggtgtttctgtacatatgggccgcagtagtgctcataaagatgctgcagccgcatgcggtggccgaacaacggcgccgactcttccacagtacagatatcgagcgatgggaaattgacttcgtccaggccgagcttgccgcgagccagatcgcaggtaagcatgaacttatcgaatggaaggttgtgagcaatattcgcgtcggctctggaaaagaagtcgcgaactttctgacgctgatcgaggaaagatgggtgcttgatcagatcttcgttcttcaaccctgtgatcttggtgatgatttcctcgataacgattccaggattgcagatgaactctacttcatccaaaatcttttcaccgtcagttatcacgccggcgaattcgatgatcctcggctgcttcctcaaactcaccctctggtggaacgggagtcctgtggtctcagtatcccacacggcgaatatcatgtttgttccctcttatgtcgaaagggccggctgctttcgcgaccggcctgaggagtataccgcgacggctgaagatttacgccttctgtccgtctttcggcgtgatacggccggagcgcatggtggcgtggacaaacgccgaatagttgatcgagtccaaggccgaatcggcatccttgaacccgctattcgccaggcgagtgagtttgcccaccatgtgcatcacgaacagggcgagtcgatggtcatcggcggttttcgccaccaggccgttcgggaagaggatttccatgatctttccgtacatcagatcattgcgaccataggtgctctggcggtcgcggaagacttctgctgcggcgtacagattgttgagaacatcttccgcgaaatcatctggatgggaatcatcttcgcccggccagacggattccatggcgaacggcgcggcgtcttcggtcgggtcttcggactgagccgtttcagcgagcggagacggggctttcgcaaacgcctcgtcgagggtaggggcggagttcggggcggccgggaacggctcgcctgccatgtcgttgggcgcgctatcggggtcgctatcggccgcgacggcgaagaacggcgcatcgcaaccttccaggttcaggatgtaggagtcgatccccaggctattgtaggcatcgatgatgtcctggcgatcatcgaacgccgcgacgatcttggtgacgccttcgattttcttcagtatgtcgagcgcgactgcccgcttgaactgaggcgccggctcggtgttaccatacggccgcatgatgagttcatactcgcgatgttcggcgatgccgagttcgcggtggagcttggccctggtctggaaaaagtggttgtcggttcggccggtgacgaagaaaatcatgaggtcggcgtcgatggcattcctgatgcgacctacagcgtgcgggttgagagtgtccttgtcgagacgagaatgatactcgtcccattgccgttccaaggcgaagctcttgcggtggctatcgtcgaatacgcagccgtccaggtcgaagatgatgatgccattctttggtttgcgttccatattcagatttccttactggttgctttctgggtgacggttttatcgatgaacgtcccatcagaagtgaggcggaaaacttcgccattctggatgaaatcgaacgattgcacgttcatcgtgatgcgaatggattcgctgccgttggtcacttcgacttgtgcgatgtcgccaactttctcgacaatgatcttcatgttacatggacttcccattgacggccacagggttggcctcttgtttttccgatccccagaaatcgcggcgcagttcttcctgctcggccgagcgatccatccaggggcgatagaacttgcactggtagataggttccaacggaacatcaatcacaggaatctgacctggctttgtctccagagcggccatgaaccggtcataggatttctgctggatttcctcttcattcatcaccttcgacccatagcgcgggaaggcgcaggagccggtggcgacgcagtgcggctggagcaggctgtcgaacataggatagacttccagaaccagccggcgcatttcgcggaatacttcctgatattcaccctgggtccgaacgcacaggcgaaccttcgccatgtcgctgagagtccgcagattgaacttggccgcgatcttcgtttccatgttggaagggatgatggcacgagcgtcctggagcgacgcgccggcctccagaagcttctggtagctggtttgcgcgtcggcaatggcgtcatgccacagacggttcagctcttcgcggacatggtaggtcgggtcaggctcgccatttaccgtagccggttcgtcgaattcccagcggaaggcttccggctgaacgacggcgctgatttccagagcgcgactggtttcctgctggtaagccccggtacgagtccgaacgagttgatgggtgaagttcttgctgacaccctcgatctggaaaatgaagtccacgaactcgaacggcgagcggatggtgtccagcatgtacttccagtggtcaagcttttcggcctcggtcatggtcgccgggtcttggccgcgcatgcgagtggatttcgtccccaggagaagttcccaggcgttctgggtgtaactgatcagagaaattttcatcagaaatcttccggaattggcgtgaagtggaattttttggttagagccagggccaggccttgggcttgctctttacgaatgccatactgctctatctcttccttgagcagttcgcaggcctccagacgcgactcatactcttcagcctcctgaacggatgagaaaacggttccatcagaggttctgtacacaagttcaatcgacatgatgacctcagtagcagcggatgatttcggcgcggatatctcgacggtcgaggtagtgctcacgaatcttatcgcgggcgcgctcggcctcttctcgactgccgaacgacaggttgaacgaagtgaaaggcttatcgtccaggcgcccatcgccaatcaggtacaggatgcctaccagcacgaaagacggcgctgtctgtcgcgtttgcggcgggtcgatttgcatttcgaggaaagacatgggaacctcttcaggatgatctggtgcgtacattaatagcgctcctgctgagcagctacggtttccggctcatagatgagcatgtcaacgatttccgggcactggcctttcacccagtcgatggccgcgaccagtgtggtggaagcggagaaagagaaagtgcggtaagactcatggatgtacggcgaccccatcgaatcgcgctcggtcgtgcgagaaatgactgctttgatattaacgatccggcccatcttcggcctccactttagcgattatatctgacaggctcagtttctcgccattcaggaaataactggcgcgaaacttcctgtcaccctctggcccgacgatccgggccgttatggtgagactcccgccgccaagggcatcggtgtccctgaagaaagccagcagcgcccgcttgagcgctgcctcgcgaggatcgacggccattaacctaccacgttccagccgtgctgagcgcaccaaaccgcaccggcccctgcaggaaggctattcagaaggaacacaggagtcaggcgaccgtcctcggtcatatgtatgaagtagcgggcgccttcaccgagccactcggccttggcgatagcgcgttcgagattggccttggtggcgtaggttttggtgtggttcttgtcggtggagaaggttacttcgcgggccatttgtagattccttttggttgaagggtttcgcgtttcgatgagggaatattacgcccacctgatccagaagtaaagcacttttgtaaattacttcacgaacattttcttggccttctgataagacgaagaagtcatcaggcgctcgatgacgtccatgtccgaaaccagatcatccagaaggacgttgcgccaggtagcgaaccggccgagcgagaagatgccagcctcatgggtgagattccagatcatggattcgcgctcgtcgcgaccgagcggaatgattttgcctttggtctggatggtcggctcgccatcttcgatgagctgtttccttctgatgccgaaggccgcgcaaacgtaatccatatcccagtcgctgtcccattcgatggtttcgattttaccatctaaagtctccactatccctttagtgatggattcgacgatcagagtatcaccggtgatggacgctcgaaacgttcccactttaggaccagggaaatacacggtctggaagacatcacaggggatggagagcttgtatcgactcacgatgatggaggttccttcaccgaatgacgggtcgattcccaggtccagccctgccgcagccagattggcgcggaacggcgcggtgctgatgatattcacgtggtcatcttgccggcgaagatactggaagaaagaggcgtcgaaaggacggctccaagtgatacgattcgcaagcttagccaccagctgctcatagtagtcggccggtgcgatccaacgcttttcagtcgccagattccagatggaccggtccgacaggccgcccgttactttcctggagtacatgttgcagtggtcgatgcgcggctgggaaatgaactcgccatcaatgtagatggccttgtgtacggtgacttcgcggaatgggatgccggtgagttggccgatgactggtgagcggaaccgcaagagcgcgttgtggcgttccttgctcgtcggcgtcgccgcgtcgatgatttgggcttgaggaaagcgatgcgcggcgatcaggccggcgagtccggctcctacgatgattactttctgatcaggaatcatgatgtgtcccttatgagtgtacaaaacttgagaggataaaaaagggacccattttcatgagtcccttgaagagctagacgattcaggctcagaggagcggcggcttactcctcctcaccttcggaaccatcggcgccctgatcttcaccgccgtgctcctggccttcgtcatcggccttctcgtcatcgccctggccagcttcgtcttccttcgaagcgatggcaaccagatcgacccagcccatgatttccagcttgctcaggtagctgcggaccgaggtgccatagagaagatgggccaccttatcgccgaaggattcgatttcgaccggctcaccaacggtgcagtgctcgttgatgtgtgcgaacaccttgccgcgagtcgagaaggcctgcggagtgccatggccgtcgccggtcgggatgaagtgagttgcgcgggggcgacgcgagccgttggacttcaggtcttcgcggcgggcttcggccttcttgcggcgctcttcctgctcttccttgcggcgctgcttctcggcttcgcgctctgccttcttctgctcggccaggcgcttgcgctcttcttcgcgtgcggctttctgggcttcctgcgcggccttcttctcttcggccttcttggcgcgctcggcttccttctcggccttcttctgctcgcgctcggcttccttcgccttcgccttctcggcctgctcagcttccttcgccttggccttttcagcgcgctcggcttccttggcggcggccttttccttcgccttctcggcgcgctcggcttctttcttctcgcgctcggctttgcgcttctcttcgcgctcggctttcttctgctcggcttccttggccttggcttcggccttctcggcgcgctcgcgctctttacgttggcgctcagcggccttctcggccttgcgcagggcagcggcttgttccttggtcagctcttcgccttgggcctgttcgttctggttcttctgttccatgttcttactccgggaatgtttaaagggatggcttattggcctgtgaggggattatctctaaactaattgaagaagggaatacccttagcctgaactttcctaaatattttctttcgggaaagtccaaactctagggaacttatttatgttcgagaagttcctagcttttacgcaagaacagtaagtattcaattgcacgagtgatcccagtatacatcaactgactataagggatggacggcaagttctcttccaacatggcgactcgtttccactccgacccctgcgacttgtggaacgtcatcgcccatccgaagtcgaatccgccaatagccttctgcgcctccagccgcacgtcttcctcggccgaaaaactcagaggattgaacttcacccagcgttcatagttcgtgccgataatacgaactttggcgaacaacatctcatcaggctcgtcatcatcttcttgcccttcaggaaccggcttgaagtccagcagaatggcttgttcgccgttcataataccatattcgtgctggttcccagtgcacaccagcttctcgccgattcccggctgcgcacctttgtagccgaggattcggcgagcgcgtgcgttcaagcgacggcgagtattgttgtaagcgcaaagaattacaccatcgttgtccaggaacgtccgcatttcatcatccgacatatcgaagccggcccggaccactatgtcatcatactcgcggcatggcaagcgcttgccctggcgaacaaacatcgacgcccgaacgatattgccggcgttgcgctcgatttcggtcatgatggtatcacaactgttctcgtggaagatctggacgccgcgcacaggaggaacttggccaaagtcaccaatctccagaaccggaattcgatgcgacaacaggcgctcttcatcccactcgccgatcatagacgactcgtcgagcactaccaacttcggtttctcgtcgagcgagtctttgttggcaaacatgatttcgccgtcttcatcttcaccgatgggtcgatagataaagctgtgaagagtccgggcattggtgcagcctttctcacgaagacgcgctgctgcttttccggtcggtgcgatgaagactgtccagtccatcgagcagcaaagctcagcgatgatcttcgcgatggaagtcttaccagttccggcaaaaccggcgagtcgatagacctggcggcggtgtgctcgatcacaccaaccgcgataccagtcaacgacggaatttatcgcgtcgatctgctggctattgggtcggaatccgaatcgctcttcgatctgatcgacggtgaagttagatgctgacatatttgcgttctccaacgctaggtttaattgaattgaggctaagtttaagcaagccgtccacagaccatccagtatcacgacgatacttgcggccgtgcggatcgacatagaagtttttcgtgcggcgcaacagaacataatgccaagcggcgccgagtgcgtggacccttcctttatacgggaaagccttcgcctgctctgcggcctctttggccccagggagccagcggacggtagaaaggaccaggaccgcacccttaatagcctgggaagcggcgcggccgtcctgtgggctatagcgatgtctatcgaagtctacccagtggtggttgccgcgccggagcttcaccgtccgggaccggccctcaaacaccacagtgccttcgtgagtaaaaatatgttccgccatggaatgttccttataacgtacagttctgctttacctctgcgcaagaagagtatactatcagctgactcgtcaaagcgagcgaatttaatccaactttacttcggcaggaaagtggccgatactagcgccgccgcctgtactgccctccaaaacagaggatacattaaatgcaagaatgcaagatttcccgcgaccaactcccggtcggtaatccgaatcccaatgtcgacaagacccgcgacccgaaccttaagcccggtttcctgcgtcgcagccgcgagctggacccggcgctggccgttcgcatccgtcgcgagctgatccacgccgaagcatccgacttggccaaggccggatgggtcaattcacagtccagcctctatggatcgaaagccttcccgcgccattccgtcgttcgcgtgaccggagttccggaagatggagctttcatcggcatgctgatcggcttcatcgagcatcgcgagcatggcgaatgggcggtcatggaagccggaacgaaagaaggcggcgccgtcattattccagtcgatcacatcatgcgagcgtcattcgccgaagccgaagagttcgccgaaaagtgggagcggaacttggggtggcgtctcctgcgccaactccgcgagtgcggcgccctggccgggactgaagacgagttcctgcggcggatcatcaatcgatacgttcgtgatcgcacgatcctcgatcaccacaaagtcggcgcggacaaaacctatactgatgcagtactcaaaagcatcggcgaaacatggccgaagattccttcggggaaattcgtcggacaccgagtcgcgcagctcctgatcggccacaagctaggtcgagcggggaccatcctgaatgacctggtggacttcctggagaagttcgcggccgggcgcgataaagttctcaacatcgccatctgtaattgaggtgaatgaaatggttgacttggaaaagctgagtccaaagctgagtcctcggcagcatgccgttctactggagatgtacaggcatcctgagcatccagttcacagatcgccaacgaatttaactcttaaggctttgagacgaagggggcttgtcgagctatcctggaaggattccgtggctggatatatgttcggtcgccaaccttgctggaaaataactgatgccggcataaggcgaatcctgggagtgctggggaataatatggaaaaagaacaaagcgaagatcgcccaagcatccctgagtttgagaagaccgacgccaacaaactctatgatgctctggagacgatttcgctgctggagaagaagttggacgaatccgaaaagcgcgggagcgagctggccgcgagctattgtgacggcgtagtcggcgatgaatacggccatccttattgtcgttataaagtggaacgcgacgccgccttggccgaagtagagcgcctgctagaaccaaaaggcgatccctctggcagcttcgacaggtgtatgaagatgatgtacgagcgcgacgagaatgcaaaacgactcgacgccgccttggccagggtcgcggagctggaagggaagttgacggactgggtgcacgaagggttccggctcaacgaggcgctagcggtcgccaaggctcaacccagcgtgccggaaatatctggcatcggtcgcgatgccgaacatcccagagctgtagtgctgtatctgcgtaacgaacccagcgatgaagatatgcgagcaattcagaactttttgcgcgccatggccgcccccgctcagcacagcgtgccgaaagcatggctcgacgttcaggcagagcgccgccggcaggtcgaggcccaggcgctaaggcaggaagtcgcagcactgcgcgcaagggcggatgttgtgccggaggtgttcgggcttgagcggtaccgcgtagaaaaaactgggaagggtttctggccatactgcgtgcgtgcgggggatggaacgcgtgaactgttcgtcggccacttgaagcagtgtcagcgggtagcgaccgaattggctacggcgtttgaagatgggaagtttatcgccgcgcccggcagctcggctcagcacagcgtgccggaggggtggaagctcgtaccgatggacccgacatcgcagatgacctatgtcggtcagtccctgcgttgtgacgcggtaaacagcatcggcgagatttaccggcaaatgctcgccgtagctccctcacccatcgatccggccgcgcatcctcagccgtgccagcaaccacaggcccatcctgcccgctgcgggtgcgagcggtaagtgccaagtaaggaattcatgtaatggaacagaagaaaccttcaccagtagatggagtcatcatgaccagcctcgacgttctccggaaagcacagcccgaagcccaggacgagtatgccgtgtccatgttcgcaacggcgatccgccagaaaatgcagcgctcccgcgataaaggccgaggcggctggatcgactgcgacgaagatattctgatcaacggattcgccgaacatgcgctgaagggaaatgagaacaacctcttggacctggcgacgttcctgatgttcatgtgggtgcgcggcatcgacgatgcgaagattcccccggcgctcgaaaaggcgcggcagcacaagatcatggaagcatggagtcgggtccacgaagatggactaaactccgccagaaaggcgagtgctgcgcgacagttcgtggaagtgcctcgacgcaaggggcgcccggagcgacttgcatgaagcctcacgaaataagactggcacaggccgaagagttcctgcgcgaactcggccgagggattccggacgacgaacgggtaatggtcggctacgctgaagaggccacagtccaaaccgacgagaacggccgcaagctcaacgcaggctggtggcccgtgccctggaaggaaggcaagtacatcaattccaggtcaaacgcctacgcctgtatctcgtcttccatcaagacgcccaacccgaagaccggccagatgcgatactggcgcggcgaggcctctttcggccacggcctggcgttaatggtcgatgacatcggctccggcaaaggttccaaaggcgacttcgaccgcgacgagttccgagaacgcctggagccgaccgcgattgtggagacttcgccgaacaactaccagttctggtatttcttcaaagagccgatgtcccacatgcttcagtttaaggcattgctctattcgttcgtggaccaggtgctaaagaaaggcggtgacaacaccgtcaaagacgtcagccgttacggccggatgccattcggcttcaacaacaagcgcgggaaagacggcaagttcaaatatgccgacgaaaacggcaaacccgaactcgtgcgcctgtacagcgccgactattccaagcgctactcgccagaggaaatcgcgcaggccttcggcgtccgcatcattatgccacagatgaagaaggtggagataaaccgcgacgattgggtgtatgaccaagtatggctgaagtatgccgagcacatctgcacgaaatacaagatgggagaagcggcaggcggccaggtccagcagaatatgtccggcaaataccgcatccgctgtccctggggcgacgagcacaccaacggcgatcctttcggcgcatactttcgcggaccgatacctggcgccgagcacgaatatgtgttcggatgcgggcacgatacttgccgcaaagagcatcgacggacgtgggcggccttcactgatgaagtcgtcctgccctatatcgtcgaacaattggaacgcatcaaccgccgtcatatcggcgaggagtagtaactatgcaaaacgatcctggaatcctgattaccgccatcggcttgctgttcctcggccttatcatcttcttcgaaggcctaaaggggtggaaaatacaagtcgcaaacttcctcgcgtcgcttctgtgcttcttcttcggtctttccgctttgacgttctggttcgtcgttgcgtttgacgtattttaatcgacgaacggtacagaaattttcggatggggacggaacttattagctatgccggtttaggtaggagataatagccgtccctttcgcctcaatatgtagaggcaatgttgaatccgatcatgtaaagcagaaggcggcaaacctaacatgattatcgacgaagataatgtttttgatgatggcgaatcagggtccagtgagtttgatctcacacagatagaagatgctggaatggaccctttgatgaccgccgcgagcaaggcggccgatgatgcgattgcgaggaacgaaacgcatcgcgcgcaaaaggcggcaagatacgccgaggcgtatgcggaaccagacttgagaaagcgagcgcgattgttgatgctcgaccaggcgttcgatcttccggtcagccgggtcgtgaaagggccgttcgatgacttcatcacgaaatacagctcgacttccgacagcaactatctcgcggtgtacgatactttgttctgtaagggcgacggaaccgtcccacacccgcacttcgacgagtttcgcggccggctggtggaccatcgcggcgtggcgttcaacaacaagaccctcgatccgattgacctgatgggcgccctcgcggctgcggccttggacgatccctcgattaagaagacgattgagacttgctgcgtgtgggcgcgtcgatatcgccgcaactcgctgatcgagacgtttgagaagaagataccggagtgggatggagaagagcgaattggcacgctgctgatcgatctttttaagccattcgacaccgaattgaaccggatggtcagcaagtatttctggctgagcctgtactgccgcatcaactatcctggaatctcggcgccgatctcgctggcgttgattggtgggcaggatgcggggaagacttacttttcaatcttgatatgtaaagagttgtcgagcgaccgaaagttatcgccggtccagcttgacctgagccgtcatgaccagacgccatttttgcgcaatatcactggcaactcggtgatcgcgaacgtcggcgaaatgtccggcttcaaaaagggcgacatggaacgcattaaagagttcctggtgcgatccgatgatactttcgatcagaagtttgaaccaggcgaaactatcagccgacaatggatcaccatcatggacggcaacggctatgatggtcttcaacgggatgagtcaggaaaccgtcgattttatccaatgttcgtggcgcaacttcccgacgaggatggcaagccgaattgggttaaaccgggcgatggaaatgaaactttccgcgttgacttcaccgacttcggccgcaaattctggcaagccatggctgagtgccgcgcctggattaaggcgaatggcgtggagggatatctcgatctagttcgggcgaccaacaacgaagtccagaaattctctatttcggaaatggagaatgcgcgtggcgtggttcgtgacgatacgattgacatgtatctgatcaatgttctgatcagttgtgagttcgaagagatcaagcctggcaggaattcaaagaatcctggatggagagtcaacaccatcgaaatcctgaaatggttcgatattctcgccaggaagaagccgatttctcgccacttgactccgcacctgaaggcgctaggatttgttccgaataagaatggcttgaatggctggtgcctgcctgtagataaggttgcgcctggatggaccagagatatgcacacgacgttgccgccgttcaatgatgtgcttgtatacttgctgaggaaggttgattctgaggtgactgatgaagaggcaatgattcaaatccgcaaagttaaggccgagcgcgcaaggatattgggtgaggatttctgatgtagtgatggagtgtacttggactaggccgccttcgggcggtcttttctttggtgcggagtacattcgatttcggttgtggccgagtgagattcggaagctatctggtaattagggtttggtggcgatggcggattgtggaaagttcgtgaacgttggatcaaggattttgtgcggtgattggatgaattgtggaaaatcgacgattctgactggatttttggggtcggccgcgccggtcttactggtaattaccgaaaccgggaatttgggtcgagccttagtgccgcgtgggcttgaagcgcttattcggatacttcccggtttcggatgcagccgcaaaagtatactacagcgaaaatcgattgccc

SEQ ID NO: 11 - DNA, 66230 bp, Pbunavirus
  source 1..66230: mol_type = genomic DNA
aatcctaatagaaaaaatctatcacggacgttacctatctttaaaattaattaaattaatggtaatttggtaatttggtaaactttagtatttgaaagcctcgcggcactaagcttgtacatatcccgtgaagtttccgattccagccagctcgcggcagggtcgccggaaacttccggacttccaatccatgggtcgcggcaacaccacggcggactaagcggcaagtgccaaaactcgacgaacggaaccggaaatttgggagcgcgacagaatcgctcagctggacatatttctaacattcgatttaacactcaatccaaacactcaccaccatcatctcccgccaaccgccgactcgaccctcacccaccagcggatcgcccgtataacatcctataacaccacctaacactcattcatcatcaaacccacccagacctacagcccacccacaagcagcccatagacgcgatccctggccccatagtacaatcgcgccatactcagtgtcgcggcagagcaccaggcccatccaccaccaacgccaccgcgacgactccagaatctaactccagggacgcagcaccaaatgaccaaatactacagccccgacgatctagtcacgccacaggaattcgcagacccgcatttcgcggcgatcaaccagaagcgtttcgatctgtatatcgacctgcgcgtccaaggctacagctcctggcgggtcttccgggccatctggggcgaggagcacatggacggtccagcccaggctcgcatcttcgcgatggagtccaacccgtactatcgcaagcagttcaaggccaagttgaacgcgaccaaaacgtccgatttgtggaatccaaagacggcgctccacgaactcctccaaatggttcgtgaccccaccgtcaaggactccagccgtctgtcggccatcaaggaattgaacgttctggctgaaatcacgttcgtggacgagtctggcaagaccaggatcggtcgcggtttggccgacttctacgcatcagaagccgatgctcagactgccaccgtcgctgctgcagccgaagccaatggctatgtaccggaaggcgaagagggcgattttccgtctccgacgccggaaccgaccgaggaagaccgcgccaaccccatttagacataaaataacatcgttctaggcccgaatcggaccgaactaaggcgacggtagcgggaagggacgaaaaacgattctagggcggttctaggaagtcggagcctaaccctcagaaacgacaaagcccccggactctagctcagaatccgggggctttcttttgggcgccttattcgccagcttcgatgatttcgaagttgtatttgacgccttcgtgctcgaaagtcatcttgccagccgccttcagctgcatgcggaagcggatgtgtttcgaagaaggcaggccgaactcgatgaatgctgcgttggtggaccggaactcgccgcgcttgcctttgacagtcacagccacgccatggcgctgagtgcgtttcttggaaacttccgggtctttccaggagttggcgatggctgccgacaggtctttggtctctttggccttctccggcgcgttcttggcctcttcgcgcatcttccggatttcttccagcgcttcctcttcggtgatctcttcttccggcttcagattctcttcctcggccttctcttcttccttcttcttggaagtgcgggttttgtaaacctttgccggggcttcctcttcctggaaggcttcttcctcggccggcagagcattcaggatggcgaggcagcgacgctcagcagtcttgcggtcagagaaacgcttgacagtcgcatcggcgttgtgggcgttgtagaaggcgaccagttctttcatttctgcgttctggatgtcgccgaaggttttgatggagttggtcattttgcgatcctctgttttggaagatttcgttcgggcttcggtttgtcgccccgttgaaagagattatgcctaggtcgatgctgcgtgtctacatttatttcatcagattgatcgcaaagccgacgaacggttgtcggatgtgaaaacaccgcagagcaggctgcggtgtttgttggcgagggcgatggtcaagcgaacggatcgcccagcatatcttcagacggggcacgttgcatatcgcccagcttgtcttcgtcagttgccggactggacgggatcgcgccggaccgaagcgacagagattccgactgcctgctcacctgcggagccggaggagccggaggagccggaggagcttttggcgcagtaggggcaggcgggaccggcaggcctggaggagccatcggcgccctgggaggttccggaagatcgggaagactcggcgctatgccgccaaaggaccgctgcgactgttgcgccggattgtcgccgaacatttcggcggatcggttgtccttgatgacttgacctatggccgtcttgtcgccgcccggctctgccggatcgaagcccgtgaatggagtggtaacgcagcgcatgttcggatgggtaggcagatttttcaggactatggaatctgcccagacatacggattcttgtggttgccgggtccgtggctgatgatctcggcaggaatatggccgttcatggtgagccattccgccatcccttgccgagtcagcgggcttaccacgatctggccagtagactcttcggcgacggcgaacagatcaccgagcttgaacccgatgattatgtagttggacctggactcgccgacgaaagccagggtttcgatgttgtggtggatatcttggtcttcccagatgtaaagcatgatgcgctcctcaataaggctgcttgttgtgttcgaccagagacataccggccggaactttgaagcggacgtattcgatcatcatcgccgttcgacgccgattcgtgccagactcgtcattaacgaagagttcgcactgatgcggaatgactcgcgtcaccaggtcttcgcctttcgaaccgtagaacttgatgtaggctgcgacgcctcgcgtcatgctcagatggatcgtttcgcagagtcgctgcgcggccgacgcgctggacagatcggtcggactgaccgtcacccagtaatggccactttgttctttatcggacataaactgccctccaatgagaaagcctctgccgagtcgcagaggctggttgttagtcgcgcttcagcagaacgactttgtcatgcgctcgatacttcccgcgccagtcttcccagtattcgccggccgggcagacaagctccagagtgatttcgtcgcgccagcattcgacagaaagtacaatagccttgttccttgctgcggcatctgctctgagcttaaccagaatttcgtcgccagttttcagctcatcaactcttacaactttggccatgacacactcctgtttgaagaggcgcggccggaaccaacccagccacgccgatggattaacgtttgtgaaggatggacacggtgtccacgtcgaggatgctgatggtacggcgacggcgcggattgctgcgttcatggatgcgaatcaggttcgcaactggagcttcgtccaccacccatacatcttcctgcttctgcgtccggagcaggaccgttacttctgtgttctgggcgaggccgttgcaaatgaacgtgaatttggacgagggagttctgtacatttcgagattcctttttggacttcgggtccggcttctcagccggtgaagagattatgccctgattctcaccgccgagtaaagcatttgtgtaccaattctcccgtcaggtggaaccaaagtgaggtatcgcttatggctacgctaccgcgccatggcccttcttgctcgcacactgcgaaccacaggctgatttccatccttgccaggactcggccgaaagattcgaacctgcgccgactggacaggatgtcgacattcactcgtcgattgacctcataccggcgaccgttgatgacgaagaccagccgcagggtttgtccgtcaagacactcccagtatctggtttcataccgaagccagtagcgctttccagccgggcctaccatggtcatttaatcgatgctcctggccgcgccacgcggtccggtcggcggcgcaggatcgaaccgccccaggatatagtcgggccggcgcgcttcctgaggacacacggcgagaaggcgccatcctgcgtccagggcgtactggagttcgtccgtgcagcagtcttccttgagcagcagacggttgacgctctggagattcggaccagggatggccgagctggtgtgcgagttccaaccttcgatgccgtccaccatctgtggttggttgatgtagccttcggacctgccagccaaccggctcgcggccagctccaggcgctccagcatgggtcgcagagcagcttctgggtcaacgtcgtcccagagaaggaccaagctgatgatggtgtatggatagtccttgtccagatcccaggccgaagcggtcagacggcccaggccgatttcattacacatcacgggaacgtcgttgctccatgtggacggctcccagttccgctcaccaggattcccgattgttacgccttccaggttcccaaggagaacgtggagcttgctgacgtattccgcctccagcgctttccgctcttcgtcggtctggttgtggcgatagaaggatggagggctgacttttgcatggtagagtttcatggcggttcctcggtttttgaaggcttgaacgttagagaatggtgtcgcagtatttctcgaaaggactctggcgcttcttctcgcagatcgcgcaggtgatttccaggtcgggcagctcgctgcaagtcttgccgagatacagccagcgcttgcacagactgcggccgtccgacgtgaagaagtggactttgcgagcattgccgggttgcgcccagccaccttgatcgtttttgcgcttgctcatggcgatatttcctttggatctggaatccatgccgtccgttcgctcacccaaactccgtctacatagatcaggactgacagagcagtcgcgccaaacccgaagcctacatagaatgaaccgggatcgatttccatggtggcgctattggtggcgctattgaaatcgacttcaaagtcgaacatcgaatggccactcataccatcaccatgtcgatttcattgatgaagaaatgaacatcgacaccatcggcgcgaccggtgtaacgcagccgagtcgtcccatcaatgtgggcttcctcgacgccgatgacttccaggatggtgtcgttgcagtaaagcttgacgaacatcttgatgccggagccaatcgccgcgaaggcgatctgcttgtacaggtcttgcttgatcacgctttgcgctcctgtttgcggatgtattctgccctggcttcggcttcgaacttcgcccaaagcgcgttgtcgactggaccccagggaccggtctgagtcccgtccaccggcgcgaacttgccaccggcgcgacgatacttggacagagttctcaggctgatgattttctcttcttgggaatcgagttggacgatcacttgacatacttcccgaagtagcaggtgtggagtatttccatacccttggagatagccttcagcttgataccgaaattcttgatcgcccagtccagatcgtggtgatagaactcgatgatgttgacgatttggccggcgctgtagtggatgacgcgaaccttgccgttccagtggaaatcttcgcggctgtttacggcctcgacttcgatggtgtcgtttctgccgatggtccatttggagctagtcatgtcgcaatcctctttttggagtgtttcgcgtttcgatgaggtaactatacctcagtcacctcatcgagtaaagcacttttgaacagattatttgaaatttctggaagacagattcatcggctgattcagtcagtggaaccgagactccatccgttgcgggcgaaggccgagcgaccagacagcttgcggcactggatggagctgccatcgtcgaaggtgtaagatacggcccagtccaggcgctcgcgacgtactgccgcagcagcgatatcttccagacgggctttgagaagttgttctgctttggtcatttagagttcctctttggagcgcttcgggtttcgatgagatgactatacctcagtcacctcatcgagtaaagcactcctgaggaattatctgaagtttctggaggccagaaattgccgccagagccagtcaacgtgatcgttgagatagcgctcgccatcggacgacagagccaggcatccatcctttatgccgagcttggagccggcaatccattcgaactcgaactggagcgttcctgggcgagggatatgggacaggatgtacttttgcacggtcagtagtcctcgaaaggattcatgttggcgatggccgcgattttctgcatgccgatgcgatagaattcggcttcttccctggccttggccagattctccctggcttcgcacgccagcttgtactggttgttggcgttctggatgcttccgtccagactcctgtccagttcttcccgaagagccttctgcgacgctagctcggcctccaaatcctggattctgagatgaagctggcgatttctttccgcaacctcgttttcgcgagcgatggagttctgaaggcattcgtcaagacgagtattttcgcgcaccagctgatgcttttcgactttcgcctttcggcatgtctctcgcatcgctgaaagctcactggcgtgcaaatcagcgtccgggtctttacgctcttccttcgaccccatccgcaggtagtattggccggccgcgaaagcgagcatagcctggtcggcatactttacggcctcacccatgtagttggatttgtagcgaggcagaaacttgcactcctctggatcccagagaagactatcggcaataggccagaatttgcggaagccatcaggatcgacttctacattgaccatttgcagctggccgccctccacttcgacttccagaggaacctgaatggcgccggtgatgtactggaagtacactatgctagacataacacaatcctcataagaagtcgcggccgggaccatcccagccgcatcgtaatcactcttcgccttcgtccgtgctcagccactcttcgaaggcgaaattcaccttcgactcgacccaatcctgaagctcgtcggcgaactcgtcactgtcgatgtccatggtgattcccataacttccatgttccatagcgcggcattcagttcgaactgtaccatctgctcgccatcgacttccagcaggattcggtctgcgacttcatagtcgtctacatcgaacagatggccgcccgccaggaggtgctggacgaaagcttcatcgaggttggtgacttcgatctggacttgtttggtcatttccgtctccttacttagcggctttgaattgggctttgaggttggccagttcagctttcagatcgatcatcgcctgaccgcgcaggccttccatttcggcctcgctgatcgcgatcttggctgcgcggattttgtcgttgatttgatctttagtcattttcggcttccttttgtttgaagggttttgcgtttcaatgaggagattatgccgaaagtcagaatggaagtaaagcatcttgatgagaaaatttctgccctccatcgaacggtcgtgctcgaccgtcgatggagggtgtgcataatcgaagtcgcacgacgcgaccggtgatgccccggcgaaccgggacggggtggttaggcggtgcgctcggcggcgcgttctgcgttacggtcgtgcgccatgcgcgcccatactgcggcccagcgcgctttatcggcagagttcggcttgtacacgtcgtcagggtgcggttccgggccgtaggcgttgcagctttcgtcgtattcgtaggtcatcatcttgccctcaaggggtcatggcccggcgaaccgggcgggtgattacttgcgatatttcttaataaggtcgtgtgccatggcgatggcatcagaataggtttctccgccggcctccatttccttcacagccttattgcgcagtgcgttcagcttgttgccgttgatggtgcctttttcatccttggcagcttcgcaggagtcgcgcagagttttcagggcttggtaggtggcgttcatcgtcttgttctccgggtttcgcgtttcgatgaggagattatgccgatagtcagaatggaagtaaagtgtctgaatgaagaaatttctgaacaccgacgaacggttgtgctcgaccgtctgctgcggtgtcgatatactcggcctattgcgaacaatggactgattaaatgtacaaactcaatcctgcgctgcgagcggtctggcgaactcgcgcccgttacaaagtcatctatggaggccgggcgtcttcgaagtcgcacgacgctggcggtatagccgttttcctcgcggccaactacaggctcaagttcctctgtgctcgccagtttcagaaccgcatcagcgaatcggtctacacgttgatcaaggacaaaattgagaattcagagtacaacggcgagttcatcttcaccaagaactctatcaagcacaagaggaccgggtcagagttcctattctatgggatcgcccgtaacctgtcggaaatcaagtccaccgaaggcatcgacattctctggcttgaggaagctcactatttgacccaggagcaatgggaagtcatcgagccgaccatccggaaagagaactcagaaatctggatcatcttcaacccgaacgaagtgaccgacttcgtgtatcagaacttcgtggtcaagcccccgaaagattcctgcgtcaagatgatcaactggaacgaaaatccgttcctcagtgagacgatgcttaaagtcattcacgaagcctatgagcgcgaccgggagcaggccgagcacatttatggcgggattccgaagactggtggcgacaaatccgtcatcaacctcaagttcatcctcgcggccatcgacgcccacaagaaactcggctgggagccagccgggtcgaagcgcatcggcttcgacgttgcggacgacggcgaggatgcgaacgccacgactctcatgcacggcaacgtaatcatggaagtggacgaatgggacggcctggaagatgaactgctcaagtcgtccagtcgcgtatacaatctggcgaagatgaaaggcgcctcggtcacttatgactccatcggcgtcggtgctcacgtcggttcgaagttcgccgagttgaacgatgccagccccgacttcaaacttatctatgatccattcaacgcgggcggcgctgtcgataagcctgatgatgtctacatgaagctgccgcacacgacgatcaagaacaaagaccacttcagcaacatcaaggcgcagaagtgggaagaagtcgcgacccgattcaggaagacttatgaagcggttgaacatggaaaggtttatccattcgacgaattgatttcgatcaactctgaaacgattcacccggacaaactaaatcaattgtgtattgaactttcgtcgccgcgcaaagacctggacatgaacggccgattcaaagtcgagtccaagaaggacatgcgcgagaaacgcaagatcaagtcgccgaacatcgctgactcggtgattatgtcggccattctgccgatccggaagcccaaaggcttcttcgatttctaaacacagaaaagcccggatcgctccgggcttcgggtcttactcggtatggttcctggcgctgagtgtcgatgcaacggcctcgccgactcccagggcttcctggccggccgcgagcgcttcggcttccgactcgacgatgaagtcatcaccttggccgtcgccgggcggaacctcgaccagcacggcttcttcgccctcgaaacgcagatcataggtcttttcgacggacagaccgtaacgggcgttgagcgcatcccagagctgagcttcatagttgcgcaggtcttgcagagatttctggtggctgagcatcgccatatcgacggcccgttgcagggtttcgtccaggacgttgaatcgcatgcgaagagaacgaatccgctcgaccacttccgcatccaccacatgtctttcgatcatcacttttcacctttgctgaatgtaacgttgtagccgttgtcggccaggtaggtcagggcgccttcgaaggaagttccgacgaggtgcttgagcttcatttcgcgttgcgcggccaaccagaatgcagttccggaaaactctgcgcggccttcggacaaaaccctgcaatcaggcccggcgatccgtacatggacggaagatagcttgatcggcatcagtgaatacctccgctggcttgcgacggcatgctttcggcgcgagcggcttcgcagtccgggcagggacaggcttggcggacgcgctccaactcgtcggcatccatgacatagagcttcccgtcggcagtgtcatgtgccatagcgatgttcgggaagtcggttgcgctcaggccggcgacagtgcggatttcgtcccagagcaccagatgctcggcattcagtcgggcggcgagcgcttcgtgctctttagcgacgcgcgccatgaactcgtccatccggaatgcgaattccgcatcgatggcacgggccgaggccatggagctgagtcgaatcggttctttcttcatgatgattctcttttggttggtggttgttagctgctcaggcctattcaaggccggctcaacgcggcgaagaacaacacgatgaaaaggagcgaaaagaatgcgaacgccagagatattccggaaatcagctttgctatgccctgcatctcagttgccttggcagcgagtctggccttagcctcgataacttccggtcgtggcgactgaacatattctaaggcctcttcccgcgctttttcggcctcgaccaacctagggtcgcgggccgagacttcgctgtgccctggcctcgcgggatgggcttgcagcgatggaggaagttcagcagccacgactccatagtcggcgcaggcccaagcgatcccgatgaggatcgcgaggatggactggacgattcgcagcatcactttgtcgctagggaagttcacgatcaatcctccaccgaccgaacgatttccatgttgcgaccggcattggtcccggcattgaaggcgcgccgaccgtcgctatcgtccagacgcatgagcttagtaacattcgatttcttgtagccaggatcgccgaaatgttcgtgaaccgcagcttccttcaccacaaccagagacgttccggcagaagataccagctccatgcgcttcctggtgatggattgaaggcgatagctgatttcctgggtcgcggccagcttgaattgcgcggcaacctttacgttgaaacgttcgtacccttgagccttctgatactcccggcacagacgatcaatggcctcgaccagggagttgaacatgttcaccgccagctcaacgtccgacttgtagcctttaaagcgtacggcatgaccccagcgcttggtagtgcttccgtcgcgggcgcttctggatgccttggccgatgctcgatggttgttgatgccaccggcgaaatccatgatgcagtcattgtacgtcgccacggccaccgagaagaacttcatccagttcgggattgcggaatagtaacgagtcgcaatctgctcgtcgaactcttcacgaatctcgccggtcgcttcgaagccgtggaggtcatacttgtccttcagcttcttcacgcgctcggctgcgatggccgcttcgtgcgggctggaggagtcggctgccatggcggtcagtttgcggatgcggtctttcgccttctcgatggcttccggggtgaattcgttctggtcggtcatggtcggttccttttgtctgaagggtttcgcatttcaatggagctattctgccttcattcagaatggaagtaaagcactttcttccactatttcggcatcgactggaagaaattccagatccaatcacctgctaccagcaagaggatgagggcggcaaagaacaagacagcggccgcgagctgtgcgcccggcttcagtttgggatggctgagcttgggctctacgggaacggccggagcgctagcgctgcaaccggcgtctcctgggccgtagccgatgccgcgttcacacgcctggagcgacaccagggatttaagatactcggtctgcttttgcgactcttcgtagatgccggcgacggcgaaccagagggcgaacaccacggacgtacacacaacccaggcgccggtcagcaggagggccagcgggccgatgacgaagacggtagcagccaggacgattgcgccgccccagatgatgaagccggccagaccattggtgatgtcgacacagaactttttcattttcagattccttcggttacgggatggaggggatttgaaactctgcgccgccgagaacatcaatgacgacttcccagagcgtcggaacagaccactggtaacggtcgaagtcggtttcaggatcgacgcccagcgtcacataggaagtggcaggccatttatgaatactgcctttccgcatgagagtcgccacgcggccgtcaccgagcggattcgtcctgtgcggaacgtacgcagacatcgaatattgctgcccggcgtcgacaacaaatctttgcctctggcgcagacatacagagcccacaggattccagccgcgaccgccgcaagcctggcgagccgaagaatgctcataaccttcgtgagtcatttcgccgaggcaagccgagcgatcctcgtaatagttgatgttctccatcgatccaaccagcaccagagactcgaaatcgaatcgatgatcgtggatggccgagtgattgaagcaaagccgacgcggcagctccgggtgccaaacatggaggcgaccggccggaagttggacctgaatgaaccccaggccgtgcagagtgatcttgtccttcatcgggtcatggacggtgctcatggataatcctcagtagcagaaatgtattgtgagagttacgattgacaagccggtcgcccatagaagggcgaaccaggccatggctttgatggtcgtgtagatcatccgaagaattttccggcacagatcgggccaatgcccatttcgatggatgcgtggttggtcaactcgcgaccgcagcaggagcactgaccagtcttccgaccgtaggcgactgccgattccatcggcttttcgaacatcttcagaacgtcatcgtgctcagtatcggtgcagtcgcgactcttgatgaatttgccattggtgatccggccgaggtagatgtcgcccaggacgtacaggctaccggcgttccggctgtgagcgctagcctctttcacaacaacgatgagcggctcctcgccttcgccagctaggcggattttcgggcgcttgataccagactctttcgccttctcaaacgctttctcgatgccggaaatgtccagagtcggcgcagcagcttcctgcgcggccactttctcgcgatacttggcgaggttttcgatggcgcgcttcgcagcagcgatctgattttctgtcaaggagccgtatttatacaacgactcctgaaggctctgagcgaagctgaaggaatttccagtccaccactcgatgatgtccgggtgcgcggcttcgaaggccttaattttgaggtcgcgctcttgcgcagcgctacagattttctcgatgcgcttttctgccgccttagcacggctcttggcgcgctgctccgggctggttttgtactctttgtatccgacgccgccgcaggcaaagcaggcgcgaccataagacgaagggccacggtacaggccggtgcctgcgcatttggtgcacttgtcgcgatacagcttcacttccttccgggagttcgggcgggcgcccatggacacgtcttccagggtcttcggcgcttcgttgttgatctctacggtagcgaagtcatcacccaggtcttcgaagccggtgaacagattctctgctgcgttcatgtcgattctcctgtttggaaagttcgtttcgatgagttgactatacgccagaaatggaaaaacggtagcgatttctcactaccgttcgtcgggtcgaagacaatcaataaatgtcgctattgatcttgaacccatgctcagcgccgtcgttgtagtcgtactcaacataactgtcgcagtagtcgttcaaatgccgaatgatgcctagaacgtcgttcgcggccttgtgccttttcgcggcgatggtcttggcgatgctgtcgccgacttccagggtttcggccgtccggcgatggatcagcaggcgactccaaagatagagccggacgcggcgaatgatgtcgcgatggcgctccagtcgtccgtgcaactcttcaatttcgtgctcgcgagattttaatactcgtcgaagctgttgaacttccaactccaaatcggccttagtagccatgttcacctcagaaaggaaaatcgtctgagactccaggaagctcgacgattattgttgagcctgatcggtctagaatgcatccgaccgagccagccctgtgtggatagggtctacacgaactataacaggtgacttccctgactattcgccaggtcgatcctccacaccatctgcaaattggcgggcgcttcgacttcagttttcgttcgtccaggacggcgcgtctgtcgcaggaaaggcagcgtgccttaaccgacgtaaccatgggtatagtcgatcattcggatgagctcatcatcctctgattctctcgacttcagaccgcccaaagagtccgactggccgtcgcatttcgcatcgatatccatcgaagacaggaatcctgccgatactgcgatgatatcaactttgtcgccggccttcttgaagccttcgcactcagcatcgagggccacaattgcactcgcggccatgttcacatgactgatgaggtcggggaagatcacaggaacttcacgcgacatgccacggaccgtcagcttcaggactacatacttcatactcactatcccttttgtatgtgaggaaagaacttgctgttttccggatggtgaaaacgctcggtcgcaggcggtctttcttccggacattgaatcgtcgaaggcgggaaaaccgcgccggcgataatcgccgcgaggagtgcagcggatgtcgacatccagagggcggtttccaggctcacccgaacttccggacggcgcggcttcattcgctccaccctcttcccggttcataggatggtagactgccgccgcgaacccagttgtcccacatatggttcagaccagtcggtggctggggtggcggactgtagaatccgggagtctcagtgctgctcaggaaataaggcgtgcaaacggcctggacgaccaattggtgtcgctcccacatcttatcaatcgctcttagcatgacgtcttcgcactgagccttactgtcgaaccgtctgctagtatggtccggcatctggacgcagccgtctccagtgcaaaggaaagcagtagcaatccatacggtgatactcgccatttcgtcaccctctttagttgatgagcagagtctattccatctgctcgccaggagtaaagcgcttttcgtcgggataaatgccgatgatgtctgcgtcgagcatccaaatctccacggacggatcgtcgctgctgatgtggtacaggttgtacagctcccgtccgccgacagcgcgctcgcctcgcggctcaaccgccagaaccttgccgtgcccttctccgtgctcgtccaggtatatgacgtgatcgccgacttcatagctttctttcgtgacgaggcgtgaacgcgagctgttctgcgattccaccacccaggaatccagcacgccgcctttcatgtcgcgaaacaatcttgccgatttgtcgcaatcgaatacgcccagaacttctccgtctttcaacacgatatgtacgattggcaaaagagtattcatgtttaatctccattggttgataattagagtctaatctgccgaaaagttcccgtaaagaattattttctcataactgattagttgcaactgttaatctgatgtatatgtttgaatctcttttgaacgtttgatgtttcccctataataagcgcacacagccaacaaccacgtggaactacaatgtttaaactttcctggatattcgggcgcaaaaaggataatgctgcctgttctgaatcggcgccggagaaagtcgcacaaatccctcaacacgatccgctcgaccccatgatcaagctgggaaggattcgcggctggaacgtcgagccggagaaagccccggtcattcgtagtgtgaaagatttcctggaaccgggcctatctgtcgcaatggatagtgcgtatggtgatggaccaaccccggccgcgaaggctgctgcgggcggccagaatccctatgtcgtcccgactatgttgcaggactggtacaattcccaagggttcatcggataccaagcttgcgcaatcatttcccaacactggttggtggacaaagcttgttccatgtctggtgaagatgcagcacggaacggatgggaactcaaatcggacggcaggaagctatccgatgaacaaagtgcgctgatcgcccggcgcgacatggagtttcgcgtcaaagacaacctcgtcgaactcaacagattcaagaacgttttcggcgttcgtatcgcgctgttcgtcgtggagtctgacgatccggactactacgaaaagccgttcaatccggatggaatcacgcccggctcctacaagggaatctcccagatcgatccatactgggcaatgccgcagctcaccgctggctcgacggcagatccgtcttccgaacatttctatgagccggatttctggattatcagcggtaaaaaatatcaccgcagccacctagtggtggttcgtggaccgcagccgccagatatcctgaagcctacatacatcttcggcggtatcccgctcacccagagaatctatgagcgcgtgtatgcagcggaacggacggcgaacgaagccccgctgcttgccatgtcgaagcgaaccagcaccatccacgttgacgtggagaaggccatcgcgaacgaagaggccttcaacgctcgcctggcgttctggatcgccaaccgtgataaccacggcgtgaaagttctgggaattgacgaaggcatggagcagttcgacacgaacctggccgacttcgacagcatcatcatgaaccaatatcagctggtcgcggccatcgccaagactccagccacgaagctcctcggcacttctccaaaaggattcaatgccactggtgagcacgaaacgatttcttatcacgaagaactggagtccattcaagagcacatattcgacccacttcttgaacgccactatttgcttctggcgaagtcggaagaaatcgatgtgcagctggaaatcgtctggaaccctgtggactccacgtccagccagcaacaagccgaattgaacaataagaaagccgcgaccgatgaaatctacatcaactctggcgttgtgtcgccggatgaagttcgcgagcgtctgcgtgacgatccgcgttccggctacaaccgactcaccgacgatcaggcagaaaccgaaccgggcatgtctccggaaaacctggccgaattcgagaaggccggtgcacagtcggccaaggcgaaaggcgaagccgagcgagccgaagcccaggcgggcgccgtagagggcgcaggcgcccctgttcccgccgctccacgcgggactaagcctctcgcgaaagcggccgaggaaggggccagcgaggtcgctgaaccgccgtcgcggccggaccccaaggccgagctgcggaacttgttggtcgatcttttgtcgaagctccaagacctggacgacattaaggcaccggatggcgtagacatagagcacaatgatgcgcctggcttaaagcgcacgtccaaacctggcgtgtctggcatggagccttcggtgttttcgtctaaccgcatcgtcgggcctcgtgatcattcggaactccagagaatcaaggtgaatggaataaccaccttgatcgaaaatccgcgcggaagcattcggcaaggaaaggatgggagttggcgagttcagatgaaacaccactacgggttcatcaagggaacgaaaggcgctgatggggatgaagtcgattgcttcgtcggtccgaatctgggatccaaacgggtcttcgtcgtcgaccaggtgaacaaggaaggtcagtttgacgagcacaagtgcatgctcggcttcaacaacatcaacgatgcgaagtctggatatctgtcctgcttccgtccgggctgggatggtctcggctccatccatgaagttgacctgcccgctttccgtcgctggctggcgaatggcgacaccaccaaaccattcgggggcgagtgatggcattcaaggcctccaaaaagcgcgagcgccgggcacctcttccagtcggaagagggaagcccataattccatcagcaggaatcgaggcctggtatcgaaagcagatgaaggatatttccaagctcatgatctccgactatcgaaacgagattgagaaggcgctgtcccagcctgcggccgaacggttcttcgccagcgacgaatccgtgaacgtcctgttcaagatgacccttcgaagcctacagcagcgatggagccgcatttttgaaggcttcgcggccaagatcgccccggagttcgtcaaccggaccgaagaagccgccaccgccgcgacccttcacagcttgtcggtggccggcgtcgatcagccacgagctgcgtataatgagagcgtcaggaacaccctggaggccgcaaccacttacaatcatactctcatcaccaagatccaagaggaagtccacgagaagatttacacatcagtaatgctgtctctgacttccccgaatccggaagagcaaggagcttccggcataactaacgcacttcgcaaagtcgggaagttttctgaagatcgaatcgaactcatcgcaagagatcaaaccagcaagctttacagttctctgagcgatgagagaatggcggaaaatggcgtcgaggagttcgagtggctacactcttctgccggcaagactcctcgccacacccacctggagaaagatgggaagaggttcaagctgaatgaccccagactttgggagggtccgaaagcagaccaggggccgccaggatgggcgattaactgtagatgcagaaagataccagtcatttgacatcgataggagcgctatatgccgttagttcatggcacttccaatgaggctcgttctgaaaacatcaagcgggaaatcgaagccggtaaagacccaaagcaggctgcggccatcgcttattccatccagcgcagtgagaaagggaagacggcgaaagattgttcgcctaagctcgtcgccgatcttcgcgccctggtggacgctctgtcgaggctcgtgaaatgaaccgcaagacgtgccggcgccgactcgtggtcgatgtaatcagggccaatattcacggcggattcttcagcctgaagtttgccgccatcgatttggcaatcatcggcttcgccatcttgatggcttttggccgataatgctgagaaaatctggattctgactaaaaattctagtccggatagccgcaaattaccgtttacggaaaatagcagtaatttggaaatcctactgccgcgaggctttaacagagccagttcctaatttccgatttagccgcatgcttcaaaagtatatagcctgggaaattagaagtaacgttccaatagaattcatctataagtaacgctataatataacgtcaatctatatactctagacgtattgaaattcaatttttaatcggtaaattggtaatttgaattagtttaggagttgaaagcctcgcggcagtaggcttagacaaatcccgtcaagtttccgagaccaaattaccggattttcgcggctgaggaaactggtaattagatcacaatacaaattataatgtaagttaacagtcgcggctacatctaattattgttccgcttatttacccttagatgtactgcgtatataatacagccatagtccacgactcttcgaattaacgatggcaaagtcgaaaagaaaaattgacgaaaatggatatatgaccatagagggctgcccgatcagctcttatggcgttttccaatattctgctggtcaactcggtcttccgggcgatccgacgcggattgtcaacgtatatcgcccggagtctgccgtcagcgatccggagtacatcgaatctctgaagaatctcccgttgatcgacgagcatgagatgctgtcgggattcgacgatgatgacgatagcgtggcccccgaagacaaaggggtggagggcatcatcacatccaacgcttactacgaagccccatgggcacgcggcgatatccgcatctattcccgcaacatgcagaatcagctggaaaggggcaaagaagacctgtccctaggctatagttgccgctacactgagcaacccggcatctggaacggaacgccttatgaagtcgtccaggacaagatgcgcggcaaccacattgccctggtaaaagagggtcgtgtgccgggggccagagtattggatggtctgtgttttgaccatctcagttttgatttcagaccatccgatgagggtaatgaaatgagtctcaagaaagccaagcggaagccccctgtccagcgcgtagggcaagctgctgactcggcggtcgaagagttgcgcgccctgtggccgaagctatctgcgtctgtccagaagttcctgggcgaagaagagcaggagccggagcatcaggaaggcgcagctccggccgaaccgaccgacagcgagcacctgaccgagcatccgactctggaaggtgctcagaaggatgacgaagagcaggaagaggagccttccgttgtcgatccggccgtggccgccgtcgagccggagcatcaagaaagcgccgcatccgaaatgtccggtgaaggcgaagtcgccgaactgatctctcaggtcaaagccattctggctcgactggagggcacggtagccgaaggggcagacgaagagcatggcgaaggtcaagatgtcgtcgagggcttggaggagcagagcagcctcagcggctcgcaaaccgccagcgacgatggtggtgagagcaaggataacagcgaggaacttcctgaaatggcacagaagaacgcgcaagatgctgcaattcgcggtctctatcgcgacattgctgctaaagatcgcctctacaagcgtcttagctccgtggttggtgcgttcgatcaccgagctatggactcggctgaagtcgctgtttacggcgtgaaaaagctgaacatcagctgtgcgaagggccaggaagctctggcgctcgacatgtacctgaaaggcgtcgaagcctcgcgcggcgcggccagccgtcaatcgaaagcccaggattcggccggttctgctccgcagtgtgccgagctggacagctacctgaagggggagtaactcatgttccagaaacaagtttaccgccagtacactcctggttttccgggcgatctgatcgaggacggcccgaagcgggcgcggccgggtcgaatcatggctctgtcggccgtaactccggctgccaccgccaccggccccaaccgcatcagtcgcgctttcggttatgccggtgacgtcagcgccctcggcgaaggtcagccgaagaccatcgcggctcgtgcttctgaagtcgtgatcggcggcgccaacttctttggtgtcctcggtcatccgaagcactatgctctgttcggttcggccggagactccctggctcccagctatgatctgcccgatggcgccgaaggcgagttcttcgatatggccaccggcctggtcgtcgaaattttcaacggcgccgcaaccgccctggacctggactatggtgacctggtcgcctatgtccccaacaacctggctaccgccgacaacgcgcttggcctgccggccggcgccctggttggcttcaaggctggctccatgccgaccggcttggtccagattcccaacgcacgcatcgttaacgccatcagtctgccggcccagtcggcggggaatctggttgctggcgttaccatcgtccagctcacgcagtaaggaggcgtcatgagccagatcagcaagacccattcgcgcctcgcaggccgcaatgcgaaacctttcgacctgaaaaacatcaccaatgacgccgtggcgtctctgcgccgcatcggcctggtattcgatcacgccgtcgtccaggaccagatcaaggccttggcgaaggccggcgcgttccgctccggctcggccatggacagcaacttcaccgccccggtgaccacgccgtccatcccgactcccatccagttcctgcagacctggttgccaggcttcgtgaaggtcatgaccgctgcacggaagatcgacgaaatcatcggcatcgataccgttggctcctgggaagatcaagaaatcgtccagggcatcgtggagccggccggcactgcggtggaatacggcgaccataccaacatcccgctgaccagctggaacgccaacttcgaacgccgcaccatcgttcgtggcgagctgggtatgatggtgggtaccctggaagagggtcgcgcctcggccatccgtctgaacagcgccgaaaccaagcgccaacaggcggccatcggtctggaaatcttccgcaacgccatcggtttctacggctggcagagcggcctgggcaaccgcacctatggtttcctgaacgatcccaacctgccggcattccagaccccgccgagccagggctggtccactgccgactgggcaggcatcatcggcgacatccgcgaggccgttcgccagctgcgtattcagagccaagatcagatcgatccgaaggcggaaaagatcaccctggccctggccaccagcaaggtggactacctgtcggtaaccacgccttacggcatttcggtttcggactggatcgaacagacctatccgaaaatgcggatcgtgtcggctccggaattgtccggcgtccagatgaaaaaccaagagccggaagatgctctggtgctcttcgtcgaagacgtgaactcggccgtcgatggcagcaccgatggcggcagcgtgttcagccagctggtacagagcaagttcatcaccctgggtgtcgaaaagcgggcgaagtcgtacgtggaagacttctccaacggcaccgccggtgcgctgtgcaagcgtccgtgggctgtggtgcgctacctcggcatctaacagatgcctattcaccaaaggccgggcttccggcctttgttcactatgactctaactcggttgtaggggccggttagggcataattactaggactacgccaatgactgtttatatcgtttcctccatgactcaatcggtgtcttacaatgcgtatgacacctctgatccgtccaatcctcgcctccagcgaaagattctgattcgcggccgcgcaggcatcgcatccgaaacttccggcttcggcgacatgatttccgacgaggccggacgtccgatctggaccccacagggcgattgtactgccgtgagcgattcggatttcgagctgcttcaggccaataagattttcatgcgtcacatggagaagggttatctgcgagtcgtgaagaccgacatcaccagtgaccaccagcggatttccaaagagactcgcaccatggagcgcgatggattccagcctctggatgctactcgcctgcagcagaaaatcaaggtgaccacagccagcgcttcccaggaacaagagttccggatttaaccgagggtttcggtatggtgattttcgacgaacataagtttcgcacgctgtttccggagtttgctgatccagccgcttatccggacgtgcgcctgcagatgtacttcgacattgcgtgcgaattcatttctgatcgcgattcgccataccggattctcaatggtaaagccctggaagcctgtctgtatcttctgaccgcccacctcctgtcgctgtccacgatgcaagttcagggcgcggctggaggtggcgtcactgccggtgggacccagggcggtttcatcaccagcgctactgtcggcgaggtcagcgtggccaagctcgcgcccccggccaagaatggttggcagtggtggctttccgggacgccttatggtcaagagttgtgggcgctcctcagcgtcaaagcggtgggcggattctacatcggcggtcttccagagcgccgaggcttccggaaggttggagggacgttctggtgatccctggtgcgaatcttctgcgaatggccttcggggtcatcggtactcaaattgtgaaatatcgcaagtttgagcagcgagtgaagaatgatcaagctcagtacgtttccatgttcgaggagcctttcgacctggcagcgtctgttcagcgagtccgacgcgatcagtatgtccagtttaatctggagttccaacggaattacgttatgatcttcgccaactttgagatggttgacttggatcgcgatgtggccggtgaccagttcctctggaccggaagagtctttcagctggagtctcaaggctcctggttttatcaggacggctggggagtttgcctggccgtggatatcggtgcggccaagctcactgatgacgggaaaccgactttctaggtgatgtatgtttgacggcgaactgatagcgaaactggttgtcgagttgaatgcggcgatgacatctgctcaagaggctttgcagttcccggattttgaagtcgtccagaaagctcagccgacccaacagggaacgtcaaccaggccgaccatctttttccagaaactgtttgacattcctcgcggctggcctgccaccgattggcacctggacaacacggcccgcaaatatgtagaaataactcgacagcatgtagagacgactttccagatcagttcccttcattggcagaatcctgaaataactcacgtggttacggcttctgatatcgccaactatgtgagggcttatttccaagctcgatccacgattgagcgcgtaaaggaactggacttcctcattcttcgcgtgtctcaaatttccaacgaagcattcgagaacgacaatcaccagttcgaattccacccaagttttgacatggttgtaacttacaaccaatatattcgcctgtacgaaaacgcagcatattcggccgatggggtattaataggcatatgagtctgaggcgcgattcagagctaatcgccgcgcacctccagatgttaagagccatgcgcggcaggtccgtttcagccggatggtattccacggctcgatatcctgacaaggcaggcggatcggtcggaatacaagtcgcgagaatcgcacgtctcaatgagtacggcggaactatcgaccatccgggcgggaccaggtatattagggacgccattgttcggggtcggtttgttggcgttcggttcgtcagaaacgactttccgggagaaaccgaggtaactaagcctcacagaattaccatcccggctagaccgtttatgcgatatgcttggaacttgttttccgcagatcgcgccgcaatccagaaccggatagccatgaggctggccagaggacagatcactccagatcaagctcttgcccagatcggcctggcgttggaaggatacatagccagaagcatcaggaccgggccatgggtggctaactcagcatctacggtcaggagaaagggattcaacagaccgctggtcgatacggcgcacatgcttcaatcgattagcagcagagtaacataaccaggagatcatccagtgatcagtcagagccgttatatccggatcatttcgggcgtaggcgcaggcgctccggtcgcaggccgaaagctgattctgcgcgtcatgactaccaacaacgtcatcccgcccggaatcgtcatcgagttcgacaacgccaacgcagtcatgtcatacttcggcgcgcagtcggaagagtatcagcgggctgcggcttatttcaaattcatcagtaaaagcgtgaattcgccgtccagcatcagcttcgctcgctgggtaaacaccgccatcgcgccgatggttgttggtgacaatctgccgaagaccatcgccgatttcgccggcttctcagcaggggttctgaccatcatggtcggcgcggccgaacagaacatcaccgccatcgatacgtccgcagcgacttctatggacaacgtggcgtcgatcatccagaccgaaatccgcaagaacgccgacccgcagctggcccaggctaccgttacctggaatcagaacaccaaccagttcaccttggtcggcgccaccatcggcaccggcgtcctggctgtggcgaaatctgccgatccccaggacatgtccactgccctcggctggtccacctccaacgtcgtcaacgtcgccggccaggctgccgatcttcccgacgcggccgttgccaagagcaccaatgtcagcaacaacttcggttcgttcctgttcgccggtgcgccgctcgacaatgaccagatcaaggccgtgtcggcctggaacgcggctcagaacaaccagttcatctacacggtcgcaacttccctggcgaacctcggcactcttttcaccttggtgaatggaaacgccgggaccgccctgaacgtgctgtcggcgactgctgccaacgacttcgtggagcagtgccccagcgagattctggccgccaccaactacgatgagccgggcgcttcgcaaaactacatgtactaccaattccctggccgcaacatcaccgtttccgacgataccgttgcgaacaccgtcgacaagagccggggcaactacatcggcgtcacccaggccaatggccagcagctcgcgttctaccagcgcggcattctgtgcggcggtccgaccgatgctgtggacatgaacgtctatgccaacgaaatctggctgaagtcggctatcgctcaagcgctcctggacttgttcctgaacgtcaatgcggttccggcgagcagcactggcgaggcgatgaccctggcggtgctgcagccggttctggacaaggcgaccgccaacggcacgttcacctacggcaaggaaatcagcgccgtccagcagcagtacatcacccaagtcaccggtgatcgccgcgcctggcgtcaagtccaaaccctgggttactggatcaacatcaccttctccagctataccaacagcaacacaggcttgaccgagtggaaggccaactacacgctgatctattcgaagggcgatgccatccgcttcgtcgaaggatcggatgtgatgatctaatggtttgcggcggactcgatccgccgcgaccttccataaatggagtgaggaataagcaatgatcaacatttctgcgttcggctcgatctgccagttcacggcaagcagaactttcccgaacggattcaccgtcaccgagtttgccgacgatgcggaccccatcgacagcccgccgttcactgcggccgataccggcgtcggcctcaacggtgacatggtagtctggaaccgggcgaacatcctggaagtcgtcgttaacgtcattccgaataccgagggcgagcgcaacctggcagtcctgctggatgccaaccgcaccggaaaggacaagtcgggcgctcgtgatgtcgtcggcctggtcgtggcgatgccggacggcagcaaaatcacctgcaccaacggcaccccaatcgacggcgttctgatcaacgcggtggcaagcgtcggccgtctgaagaccaagccgtatcggttccgatttgaaaaagtgatcaaagccggtactagctgatgaagaaaattccgctgacagcagtccccaatcaagcgatctcatttaacgccggtagcagctattggaagattcgcctgtaccagaacatggacatgatgaatgccgatatcagccgcgacggcgtgatcgtttgccatggggttcgctgcttcggcgggattcctcttctccagtacagccatcagtaccgacctgactatggcaatttcgtcttcgaccgcgacgccgattggacattgttcggcgacggcatcaacctgttctatctggacggcgccgaattcgccgagtatcaggcgcttgccacgaggaaagaatgagcacatcaacgatcagaaccgggacgaacaacgatatccttttggacgacaatggaaacatggttatcctcagggatgtcgaagcgtgcgcccaggacgttcgggcggcgatgctcatgcgcaccggcgaaaacattttcgatgtgaactccggcgtgggatatttcgaatacatcttctcgccgcagaaaagctatgatgacgctcgcaaatccatcgcggatgcaattttatcctcgccggatgtgaccggcatcgagcagcttgacatcgacataaccggggaagtcttcggcgtcgatgcgaaagtcatcaccatccacgggcctgttaccacaggagtttgaaatgagtaccatccgcatccaatacgccaacggcacccaactgttcctggacggcaaaaatccgccgcccctggacccgctgccctcgtttaacccgtctgtcgaagatctggaaggcctggaccgcgaaaagaacatcgacaagggcgactcctcgccggccggtcttcccgttcccccggtaaacgtcgattccaatgtcgacaacggcggaaccatcccggctccggtatcgaccgacgctgctgcggccgaatcggccccagaaggcgcccaggaagctcctgcagcaggccaaggcgacgagaaaggcgccgaggaagccccgactacagccccggtagaaaaggccgaggaaacggcctcgccggccgctgaagaggaaaccccggctcccgccaaggccacctctcgcaaaaccaccagcaagtaaggactcgacatgatcaacgtcagcggcttcggcacaggaattgtaatagtttcagcctcatcgttcccgatggggttttccttgtcgaagttcgctgatgatgagagtccgatatcctccaaagagctggagccgttcggatatgagatgctttatgacggcggcctattcgcctttgacaaggctgctcctctggaagtatctgtatccgtcatcgcagggagcgaggatgatattaaccttcgcatccttctcaattccaaaaagggatcattcagatttcttccgggcagcatcccggatatgacgactctcgtggccactcttcctgatggcggccgcaccgttctgtccaatgggactatcatcaagggtccggccatcgacaccatacagaacaccggacgacgcaaaggcaacacgtacacttttgttttcggtagctatcttggcgcccagactgcgcgtcaagccatttctaacgttatccaatcggtgctggaggtggtctgatgttggggattttcaccagcctcctaagttcgcgatctttttcgattgtggaccaaaacacaaaccagctagttgctgcggatttgaggataagccgggtcaacacccggttttcttctgtagggcaacgccacatgctggaagatggtacgaccaagatggattccagaacgatccaccctatggaaatcatcgtcgaagtattttgcccttcaattgatgtcgtcgatcagatcaatcaattgctcctggatcgcgacacactgtacaaagtcatcactcgcggcatgatattcgaacggatgatgtgtaccagcgaagcgctcaatcagactccggatatgatatcggcgactcctgcgcggctgacattctcccaagttctcgtccagaatcccaagcctataatgttcagaaatgcaggggactcttctatgatcgaccgagggctggccctagctgaagacgtggttggctcggccggcgatctgttcgactacgcagtaaacggcgtccagaacgccgcagacttgttctgaggtgccaattgaactctttcctcaagtctattctcaacacgcccactctcaccatacgcaatgatgttaccaaacttcctgtctggaagagtcttcaagtcaagaaagtggaaatttactcgccggcttccgtagtgtcgaaacctctggcgacgaaagaccagacggaagctcaagtgtacaccgaagctctggacattgatgtgaagaatggaaagatcatccaaccggtgcgactccgcatcaatgctatctgtccggacctgtccaccgttgaaagtatcatgaacgctttcaatgataacacctcgactttcgctatcacttctaagtcgatattggccgataaaatggccatcatggcgctcgatgtagatcagtctccagacatgttgaacgcggctgagatcaatatggaattcgagcaggttgagcctccagtattgaatgaattcgatcctgcgttccctcaagatagtccgacttatggggtacagattcaatctctttctgatgctaatttgctggatttgggcgccatcggcgattcgatatcttcggccgcaaaatcgctatataatcgcgtgaccagctacttctgaggatgtatcatgcttgaaatcaatcttcccgatggccgtcaaactcgcgtacaaatcgaggcgtggtcggcattggatggctgggacctccagcgccgtttcgtcgaattcgctgtcagccaagattccgacttccgccgctctttcaccatggaaatcctgggctatgcgaaagtgctgcttggcgacgatgacgccggcattccgctgaccaccgcggcagtcatcaacaaccacctcggccactggaagaacgtggaactggttttcaactctgttctcaagcacaatggcatcgacccggccacgcacgccgaccggccggactattgggaacaagtcggatcgcagatggccatcgcatttctggccgaggcgtccaagctcattggtccagcaatgaagatcgccgaaggactcgccaacaagccggagtgattcatgtctagtgatttggacgaattcatacttcggtatgaggccgatactgccagagccgagcgcaatctggagcgcctccagaaccagatcaggcgcgtgaacagcgcatcgacgagtggccttcaggatttgcgccacttcgcagacggcgcggccaccgaactcggcagagtcgttccgcagattgattctgtgacgagcgcaattcgcggaatgaacgcgcaactggcaataggcgccactggcgtggccctggtcgcggccggcgtcaaggcgttcatgaacaccagggaccagtacaatcagcagcgcatccaggcgatggacatcggcatcgccccggcacgcttggaagagtaccagagaaaattcgttcgccagtccggtggaaccatcagccgcgagcagggcgcggagatgaccaaaaatctggcagacactttccggcgtgcttatcgcgatatcgggcgagtcggcccggaagcgcgaattctgcgtatggccggcgtcgatgtcgggagcttccaaaagggcatgcggccgctcaacgacatcatcaccgatctggccacgaaaatggccaagctgaagccggacgaaatttctgcctacgctgatgcccttggcgtctcgcgagattacctgagcaccctggcgaagatcggcccggccatgggaaaagtcactgagatgacgactgcggaactccagtccagggtccagggcgagtccaacatccagaaattcaacgatgccctggcgaatctcaaccagacgttcactaccctggaaaaccgagtcggcgaaaagctcgcgcctgcgttcaccaagctgatcgaaatcatcgacaagatagtccaggctattcccaatgaagtggaaagcttcgcgaaggacaccaaatcccgttgggaagatggagtgctcgggaaggcgaccgttggcagtgatatcctatccctcctcagccccggcgccctgctcggtcgcctggcagcgtgggggactcgtcgcggcatggaagaatcagggctcatcgacaaggacaaggttcccggcgctcaaaccagcgaagacctggccaagaaacaagaagaccaggacaaggctactaagtccatgaaagagctagagaagctggctgaccagaccacgaagtctaccaatgattttgcggtggcgatcaacatgttcagtggcgcggtatcgtcgttcgcgaatgccgttgacgagcgccaagcttgggcagcctgggcgggggaaattggtcgggcggtcggcatgggaagcaccgcgccgacttcgcgggccaccggcgtctatccgcacgcgatctatgatcagtcgaagagtggcgcggccggacaagtcttcggcgagccaatcggcgcccagtctcttcgcaatcgcatgttctcgccgcagcgcaaggcagagccggtcaccgttccatcgtacatcaacgatatcatcaaagatgcttcgaagatgtacaacattcctgagctggacatcaagaaactcatatacaccgaaagccgattcaacgccagggccaccagcgaagccggagcgaaaggcctcatgcaactgatgccggaaatcgccaaggcgtatggtatcactgacgtatatgaccctcgccagaacatcctcggcggaacgcgcctactgcgtgaaaacctagatcgagcaaatggcgacatgcggttggccttgacatactatcatggcggactcgatccgaagaactggggcccaaggactcgcgcatatccgggtttggtaatgagcgctccaatcgagctgatggaagaggctcagcgcaagcagaaggctgcggccatgaccgtcgccaacgagacgttcgccccggaaggcggcgacatggacattcgtccctatgatggcgggcgactggaaaccccagaccagggcaagaaggaagatgagcgccgcgaagcccgtcgatatgacgacagggttgtgcgaccggaaattcgcatcatcgaccgcatgccagaccgcagcgacggcgaaatcctcaagatgtctaggcgtcaagaggccgaccgggcagactctggattccggaagttcccgaatcaggttcgcggcgagaccaagcagaacatccaggcccaactcactgccggagccatcgcgcaagtgatcggcgttaaccccaaccagatcatgcgccgcgaaatcagccgttctgacttgctattcggatacaaccaagccatcctgggcaagcagcaggagatcaaggccgccgcgaccgaagccaacaacgtattcctgtctccagccaagctcgccgaagccactgccaaggtgaacgccgcatcgcgagaaatggatattctcaggacgtacggcgagcaacttctgaagagcgctccagagcgcggccaggagctgaccatcggtcgaatcgatatgttggtcaacgttaccggcgcgaattctccggaagaggctcgcgagatattcagcaagcagactgcagaccagctgactacggcaatccaagatgcccaaaacgattccgcaactaagatactctactgatgaaaaagagaattctgcgagtaacattcaacatgccttatggacccgaagtcatccgagaggatttggatgttcgggtccggatcatgaaggctgcgttgcggattcagaaccgggcgactatggaaattttcggcctaaccactcagctgcgtgagtctcttctgtcacagttcaccgcgtggaagcaccggcaacgtcaagtcggcagggaagacgaattgatgatcaaagtgtcggtggaagccggctactctgaccaggggcgcgagcaagtttccagagtctttgtcggcgaagtggccattgtcgatatcatttcgccgccaccggacattggaatccgcatccagtgctacaccaggcaaatcgacaggacgaagaccattcgaaatatgccgcccgccaacacgacgttcgtcaagttcgtcgagtggggcgcgaacgaaatgggattgaacttcatctgcgataccagttacaacgatcaagttctgaagaatccgggccggtctatcactgtcgcgtcggcaatcctggcgtcgattcaggatatgtacatgccggacgtggccgcgttcgttgatgatgacatcttgatcgtgaaggatcgcgataaagtcattcgccctgatgaggtgaccaacgtcaattcgttcgttggaattccatcttggtctgaatggggcgttgaattccagtgtctgtttgagccatcgattcgcgtggctggaggcgtggcggtcgaatcgctcatgaacccgagcgtcaatggcaactatgtaatcactgctctggaatacgatttggccagtcgggatcggccgttctatatcaaagtcatggggagcccagcagcataatggccagggaaatcaaaccgttcaacatgttcggcgttcactatacttcgcggcaattctctgctgccgatgggctcagcatgatgtcggaaattcagagtgtgccgccagaagaactgctcaagggaaccagtgtattggcgcatccggaagatcatccggaaggcatctggcttcccttgaccgctgcgaacatcaatctttatgtagttgatcgggcgaaagtaatagctcccgtacaagttcttgcacttctgtccgaagtggtaattgactggaactttggtttcctcaaagactggaccggagtcaagattccatccagatttgtcgaagatatcaaaagcgtgaagacggcacattcgccttctgtagttgcgagtttggtagcgaacggctcagcctctatgcgcgagttggaagagtattattcgactcaagatgcatttaagatgatagacatcatgacggcgaagagcgtgaacgaggccttggcgtcagaggcatcgcacaacagaatcaaaaagggataattcctaaccgggcctgggaaggctatactagacctgccaaatcagaggctttcccatgtccaatatttctctaacatcagcaaaagctcccgacagaacgcgactgatcgccgctcttgacgctcggtcgcgacgggatgctctagatttcgaagtaatgataccggctcaggttgttcaatatgaccggaccgagaatatcgcgacgattcaacctctcatcacctgggttgacacggaacacaatgccgtccaaaggcaccagctggtggatattcctgtaatttccatgggggctggcggcttccacataagtttcccgattcagcaaggtgacataggctggatttatgcggccgaccgcgacacgtctcagttcctggagtcgttgtcaatgtcgaagccgaacaccggccgcatccataagttcgagcacggcctgttcatcccggacgtattccgtcgatacaccatcaattccgaagattcggccgctatggtcatacaatcgacttctggagcgaccagaatttcgattcgcggcgataacatcaagataactgcgccgtcgaacgttactgtggatactccgcaggcgaacttcaccggcaatgtgactatcgctaacaccctggtcgtaaacggcatcaacgtgaacaaccacggccacctcgaaaacaacccgcctgatgcccggacgaaaggcggcatggttgcttaaggagattttcatggcaagttttgatttttctgatttaacagcggggggtgtaatggctaactacaactacatcgtcgatactggtgtgatagtcgcagataccgccgacgttctgagcgacgttgaggccgagttccgcgccgccctcggtgccaatatcaacttggccgcgagcactccgcagggatcgcttgtcgcggccgaggccatcgcccgttccagtgtcatgcggaatgaagcgcgaattgccaataccataaacccgaacgtttcattcggaacgttcctggacgcgatctgtgccttgatggggatcgagcgcggttctgatctgtcaaccttcggctatggagttcaagtcaccggccgcagccaaacccgcatttccaccgggtctagggtccagactccggccggcgcgatcttcacagtgatgagcgatgtcacgatccctgctggtggtgtcgcgaccatcgatatcaaatcgcaggagtatggcaacattcctctgccggtcgggaatctcatcatcatcgacggaacaattggatggtccggagcaaaagtcatcacctccactcgcgtcgatccgggcagccgccaaatgagcgatgcagagttgaagaatgcccgcgttaatcgattggccatccaaggtcgcaactcgactatggccatcaaggcgtatgtgagcgccgttccaaacgtcacgtcggtgaacgtaatcgagaacaacaccggcgccgttcaagtggtgaatggagtctcgtttacccttccgtatgctgtttgggtctgcgtcgccggaaacccggataaacaagcagtcgccgatgcgttgtgggccgcccataacggcggaactccatgggactatggtgcgacgaacaacggcgtcccggtggacggtccgaatggcgttcctgtgcgcgatccggcgtccggtcgaaagtatgtcgtgaagtggaccactccaattatgtacgatggatatgttaacgtaacagtccagcaaggttcctcctctgtagctccggaagccattcagaacgcagtggtcaattacgcccaggggaaagtggaaggggaagaggggctggtggtgggcgcgagcctgtcggcattcgaagtcgccggcgccatcgctcgcgaaattcccggcatctacatcaaactctgccaggtcgcgtgcgtcgcggctggctcgccggctccggctccgggcgatttcacttcggaatacgtcatgagcgcattcggccaggctaccatttccgttggtaacgttcgggtgactttcgtatgactctgcctgcgtacaattcggacatccaacaagctctgaaatggctccataaccaggcgcctggaatcaccggcctgatccagagaaaggcgcaatggtatgacagattcagccgccaattctgggccaactgggagcgcgacgttttccacttgaaaactgccaacccgttcggccttatggtttggtgcatcatcctcggcacgccttcgaaagggttcggcctttatccaaaaaacagttcttgggcattcggtcggctacgccagaacttcatctatagcggtacacaagttccgccaccggcagacgcatcgcctggcggcaacttctacggtggcggcaatgccgaaattctcaacttggacgaaatcaggaaagtgcttcagctaagatatgtagcgctgatttctaacggctcgattgcatatgtcaatcgcatgcttcgttacatattcaatgatgatgagccatgggacgaggcgaccggtctgtacttctatctcatggactcaaccggcgagaatggccctgtggagaacttggcgatatatcggaaagattgggaaggtatggtgctgttgtccagttcgcccagagcgaaccacgtgctgacatcgacccctgccagcgacgccgattggccgggagtcgatccggccgcgagcggtattccggtaacggtcgaaacggcgtccgctacggccccggacggctccgctacggtgtgcaagcttactaagccggccgggagtaccgcttacgtctccgcgccgatagatgggccgctggggtccggtagcactgtaacgttctcgttcttcgcgaaagccggctccacccgtttcattgcaattcagtcggctgccgatttccccagtcgagccgatgccgttttcgacctggattccgggaacgtaatcagcgatcagatgctggacagcagcgtggtaagcgcccgaatgattcgtctggaaaatggctggtggcgttgcgttctcacgaccaagaccgtcagctcttcgttccgcgctgcttacgtcgctccggcagaaaccaacttcagctggattgattcgaattccagcgcggagattgacgtgcttatctggggcgctcagatcgaactgggtgatactccaactggatacttggaaactaccggggcgcccgtaaccatgaccgattatgttttgcagaacgcccagaccggaacagtcaagttcacacagccccttccgaccggagtagaagcgtattggactggagactggaaaggcgggactgcagcagaaccggccagattcgcagtcgggaatgggactcaggatacgtttactctgtcagaccccgcatacatcggcctacccaccagtggggcgttcaagctagaatacagggttggtccggcgcttaatctgtcgccgcaattgatcaacctcatgaatgaccgggcagttggtattatgccgacttgcgccggttgcgatgtcaaagtcattcaggagtaatgacgtgatcacacccgaactgatccccagtccgtttgccgctcagggcgataaagacccgattccacaaacctcctccactggcttcgcaaaccttctcgacggctatacgccggactacgaaatcagcctggcgtcgaacaacccgcaggccaaagcggtcgagcggaagattcaaaaccaactcttcttcatcgctacccagaacgcacaggcgtggcagcgacaaatggcgccgccgtggtttcagggcatgcctggcggctacgaacagaatgcagaagtcgtgcgcgtcggaaatgacggcataatgcggcgctatcgttccatggtgaatgccaatgcgagcgaccctctcagcagcacgacttgggaagaacaacccgcatggtcggcgatgcgctccaacatcccgatgccggccggaggcccaggcctatcttctggcggagaagtcatcacgaccggccgcaacttcaacgacctgttaaatgggacgtgggagttcttctctgattcagtggttatcgcttctcagaatgcccccgtatatccggcttccgctggtgccgctgctggcatgttggaggcgaaatcttgggtgtccggagccaatacgttctgcgtccaacgctacactgatcgcgtcgggaacgtcgctgtgcgcgggcttaatgccggagcgtggaccaactggatgtatgcggtaaacgtcatggcccttcaacaaggtcgggtcacctatggagtcgcggccggatcggcgaacgcttacacgttgacgctagttccgcagctccaaggcggcctggtggatggcatgattcttcgggtcaagttcaacaccatgaacaccggcgcctccaccatcaacgtctccggactcggcgccaaagccatcgtcggcgcggccaacttccctctcaccggcggcgaacttggccaaggactcatcgctgagcttgtattcgacgcagcaggcgaccgctggagaatcctcgcaggcgcgccacgcatccaagttggcaacgccgatcaagattaccaggcccccagctggaaacaggtgaaggattacgtcgcgtcccaaaagctgactgaagtggactgggctgacgtcgtcaacaagccgaacgtcgctatccaagacactacgccgtggttcgccaatctggagttgtctgacgctcggcctttcatcgatttccacttcaacaacaaccgcgccaaagacttcgactatcgctttatctctgaagctgatgggtcgatggcgttctactctcgccaggggtcagctggtcctacccaggatatcctgttcagcaggtcgaatgttacattcctccagccgcgactggatgttgcgaaaaacctcgcgtacatcgcgaactctggccccctttggcagaacaccactgccgatcagcctggttggaaattcaccttcgcacaaggtgtggacgccaacaacaacgcggttatcgcagtcaataccaccaatccggacggctcctatcgctcacagatcatgcgatgggactgggcgtccacgaacgtcatattcaacaatcgtccgctctttgccggtcaatacactccttgggattctggaaactttgatccctccaccaagttgactgtgaatgccacgaaccaaatcgccggcccgaccgggattcggaatacaaacggcaacaccggcaacatgaacacatggggctccagttccacgacggcttcatacggaaacgctgctcttcaaatcttcgggaaaggtggtggcgagcctgccgcgctttatttcgacaactcccagacaggatggtatctggggatggacaaggatggacagctcaagcgggccggctggtcgctcggcaataacgcctacgtgattaccgacgaatccaacattcgtttccacgtgaattccatggctggcactcctgtttggggcggaaacgaattctgggggccgtggaactttaatccgaacaccaagctgaccatcaaagccggcacccaggaaactagcagcactgcgatattcagcggaactatgccattcgctccaatcgcatcgctgtccgattattctcaggcccctttgacggtttacaacgcgccaaccggtccgtctgcaaaaccggccgtcatcgcgttcattcgtcctggcaactggggcgcgttcttcggcatcgataccgacaacaagctgaaatggggcggcggatcgctcggcaacagttccagggaaatcgccgattccagcaacatcatgaatctttgggcggccaacccgaccgcgccgtcctggaacggccaaaccgtttggcgatccggaaactttgatccggcgacgaaagtggatttgaacgccgcgaacgccaccaacggcaacatggtcttcaaccgcatttctggaactggtagcggcatagcttcgtcaggtcgagttggcgccatcaacctgcagaatggggcgcattcggggcaagcggcagcagtcactttcgagcggggcggcagtaccttcgtcaacttcggcttggataccgacaacgttctcaaagtaggtggcggaaacctgggggcaaatgcctatccggtcatccacgccgggaactacaataactacatcaaccaggcgctggttcaggtgggtcttggcggagtcggttcctatggcatctttgcggttctggacaatgccgctccaaccgcgaccgttcaaccgggagtggttgtggacggttccattctcatctactcgtcttgcgccgcaaactacaatagcggtcaaaggcctgccggaacttggcgctgcatgggatatgtagtcaaccgggatgccaacactcctgactccgcgacccttttccagcgagtgacgtaaaatgaaatggacgcggatcagaaaccctcgttggctggatgaaacaaacatccacgccatggtgactttcgaggggatcggggaagttcctttcactgccaatccgcacgacgtggaggcccatggaagggccatccacgctgcgatcctgtccggggagcacggacctatcgccccggtagattcgacgcgggagaaggccttgcaggacgctatacgagcaagggaaaagcgggctatccttcgcgatacccgctggcccatagatcgtcacgacgagcagaggcggctgggtatcgaaaccactgacggacctgggctgatagcagctcttgtttcctggaggcagcagattcgcgattggaatagcggggatcggccgcgacttcccatggctctgaaaacgatgtttaaaaatcaggagtattgatgaaaatcacgaaggatattctgatcaccggaaccggttgcaccacggatcgggcgatcaagtggctggatgatgtccaggcggctatggacaagttccacatcgagtcgccgcgagccattgcggcctacctagccaacatcggcgtcgagtccggtggactggtgagtctggtggagaatctcaactacagcgcccaaggattggccaacacatggccgcgccggtacgcagtagacccgcgagtccgcccgtatgtcccgaatgctctggcgaatcgtctggcccgaaacccggttgccatcgccaacaacgtgtacgcggatcgcatgggcaatggatgcgagcaggatggcgatggttggaagtatcgcgggcgcggcttaatccagctgaccgggaagtcgaactattctctgttcgccgaagactccggcatggacgttctggagaagccggagcttctggaaactccggccggcgcgtcgatgtcttcggcctggttcttctggcgcaatcgctgcatccccatggcggaatccaacaacttctccatggtcgtgaaaaccatcaacggcgccgcgccgaacgatgcgaaccatggccagctccggatcaaccgttatatgaagaccatcgccgcgatcaatcaaggctcctgatattcgcccaaaagaaaaggccgcttattcagcggcctttttgctttccggctttgcctcttcaaccatcttgacttcaaccggcgcggcggactcttcctgagtgaccgaatccacatagttccctagtgaactcagaacgccgattaacagcgctcttactaccttgtccttgactgtctcgcctatgatcttggtcagaacggatattaactcttcccggagtctggggctgattcttggccgaaagcgcttgcgatgctctttgcgtttcatgtttagtcctctgtctgcggtcttctcctcaccccgataatggcttggggatgcgctgtgttaatcggaaggttcgggcgctattataactcgtcgaaaatgctcgcgcttaactgtttaacgatacgcaccgcgatattaaatcgccttctttctggccaaggaactctggcggccgggtccggtctaaggcctaatttgtcgacattaaaacgagaaaacccggatcgcctgtagggcaatgcgtccgggtttatttctatctagtgtacgctaggatcagtgacttccgccccacccgtccagccagcaatcgaagacggcgtgcctcggcttgtccttggcgccatgggagaagtgcttgaaccggatgacctggcccttgagatactccctgtcattccagcggcgctgtttctcgtcgtgggtcaggctggaggccgacacgttgaaagtgactccaggccacagacgttcgttgcggcagactaacgcaccgaccattccggacggcgacaggttttctgcgtggctggagcgggccgtgtggccaagttcattgatgaaagcttcattgttgttgtgcatcaactcttccacgtcgatgatctcagcttcatcgtagtcgtatcgcttgactttcacacaatgcccttccttggcagtcgagcgaccgaacttgtacagcccatcagcgcgcttgcccatggaaccttcgaatcccagcattgtgtggcggcgctcgacttcgctgaactgttcgatggaagtcaccagttcctgctcgaccaggtgaatcctctcatagccgaggcagtgacgaaggaagttcacgcgctcggccgccctggctaggcgatcttcggtcggtgcgcgaggatcggtgaaatcatcgaacacatggaaagaccagtccggctcaccgctgtggcggcgaagatcgccggacgacttctggaaaactttcgggtcgctgatgtcgccgcagaccagctcgccgtccaggccgttgaacagtttatcgctgaggtattcgtagatcgattgattgttctgccgcttgagttgacgagtcagcgcctcgccttcgaatacgaagcagcgaaatccatcgatcttcggcgagaaatacatcggcagttggccttccagcagcttcgggtcaaaattcgatgcgagcatgggtttcatacagttctccagaaaagaagcccggcgaaccgggctaaatggcggtaagccggctcagatggtttcgttggcgtggttcagttcggccatgatcgacgcatagcgctcgtccgactccttgatgaacacgccgtcgtacatgacgcctttgcgatccttgatggtgtcgtaggccgcagcgtagcaggcgagcatggtagtgtcgtgctcttccgtcacatcgaacagagtcatgacggccaataccaggctcttgatggctaatccatgatttccgcgtgccagcgcgccggccagatgtccgaggtgctgcaaatcgtcgccgtaggtgggatgaacttcgacagtctcgctgaagaccgatagatgatcgaacagattttcaccgagttgcgcggccatgatcgtggcaaccaccattacgtcgccgatgccgtctttcacctcgactggtttgttataaacccaggcttcgcaaacttctgcgaactcttcgaccaacttcaggaattgatccttggccgaagagcctttgatcaggttccggtcggaaccccatttaacaaccaggtcgtgaagttcgcgactcatgatttgttcgatattcattctttcgattccttttggatttgggattttactgcgttgattatggacgccgtgctctggcgcgatccatccttggtggtgccgaagtagaaggccattaccgacttcagctcggcgaaccaatagccgatgatggtgccgatggcgaccgaggatgttgggtccatcagagcctcgcggccgaatgtgaagattgcgatgatgatgagaatggagcctgtcagaagagcgaatgtaatcgccgggcgaacgaaatcgttctgctgcgccgcaagcctcctcgcagaatccctgtcggccgcctctgcggcgaactggctaagctcggcctggagctggttctgctcagactgaaggcgattttgttcggcttgaatcgcaagctcctggagacgaacgcgctcggcgctctggagttcggcgagacgcgctagagcttccggattcgcgtctagagcgctagcgaccgaggctgggtcggccttcgaccccagcgccgtcgcgacgatagcacccacggcggcgcctgcaggcccacccaggagcgaccccagagccggggcagccgcgccgatcttactacctatgtctttccagtccatttcgactcctcaaaagaaaggcgccattacagcgcctttctccggccggtgattcagaactcttcggcttcggtcgcatcgccgacgccaccggcgtcactgcgaggctgttcctgcttgctgtagtccaccttcacctcgccgccgacgaacgacttgtacaggtcggccgcagccttgaagtgatccgggttcttcaccaggccttccagctcgaactggacgccggaccagctacccttgtcgttcgacatgcctacggtggtcatgcggaccaggttggcgaaagtcggcggggtgcgcaggccctgcggggtctgaacctttttctgggacagcgcggtcatgagcttcttcgaggccttgatctgcgaagacgacagggagatcagagcctggccgaaatcgccggtgtccggatcgatgacgatgacgtaatgaccacgggtgtcggcgaagtagtcagacttcttgtcgctgaccgaaccgtcttcgttcggcgcgtacaggcgtccttcgacttccttcaccttggtcgggtctttcatcatttccttgaagtcttcgacgctgatggcgcccttgaaaccgccctcggcctcgcgaccggcccagcggatgaactcgcggcggtacgcggccggaatgatcagcaggccggtcttgccgtcgtaaatcttgccggtgacggtgttcaggaacatgccggccttcgcgccttcgatgtacttcgggtcatcttcatcgacctggggagacatcttctgcagaacctggatgaaggggatggcataggactcggcatcggcgccttcgaagcctgcgccgtcatacgatcccaaatccatgaagtcgggaacttcggtagttgcgacggcgccgccaccggtggcaactgctacggccttggtttcttcggttgcttcggaagtttcggttttcttaccagccatgttaggctccttgtttgtcgaatttcagttatcgctaactgtgggtttataataacggaagttgcaactaagtaaagcaaattacatattaagatttgctctttttcatcttcggtttcgtgatcttggcctctttgtattcgtgcacgccgatgaaatctggcagctcttcgcccttctccagatactcgcggccgaacgcctggagggtctggtaatggacatcgcggttgatggtggcgtcatagccggcttcgatgatggcctcggccgccttcttcgcatcttccatttcgccgcgaccgaactcggccagaaccttggtcttgatgatgccgtcgttgtctgtgtcttccagccacttccagaacttcgatttgttctcttccttgacggaaatgatggccttcggctcgactttgaccgtgcgaccgtccgccagagtagtggtcttttgaccaagctcctccaacagctccggaatggtgttgcgcttgagggttttcagctcctcttccttttcggccagcgccttttgaagatcgaggatttcgacgtccagctgcgaagccttgtccaccaggttcagcagtcgatggccgatgtcggtagcttcgaccgccatttcatccatgacgccaaaatagtcgatttcgcccggtgcgttctctttcaggtattccgggatttcaagctcttgctctttcatgtccgcctccaacttagtgatgttcccttacttgaactaagtattgagtagatattatgccgcatcttccttgatacggctactgatttacatattaaatttcgtcgcgagtgctaacgtcagcctcaaacactccatcaacgacataacttgccaggttgcgcttccactccaagctgacctggattttctcgtcgatggaatccagacagatcaggtcgaagtacaaaaccgagttgacggtgccgattcggtgatttcggtcttcggactgcatccgcaactcgttgtcttcgtcggtcgtgtagtaaatggccacgtctgcggcggtgagcgtgatcccgatccctgctgcggccgggttgcccaggaacacctggacgcgcttggcctggaaatcgtcgatcaatttttcccgctcggcctctttggtctcgccgtagtatgtgccaaacgaaattccttgggcctccagatacgccttgatctggtcgatttcctgaatgcgcatggcccagatgatgatggagcgctccgggtcttcctccagcagaccctccagaagatcagtaaacacggcgaatcgcgggttgtcttcgggcggcaggatcaccggctcgccatagacgttgatatagccggatgcaacttgcttgagcttcgaacgcgctgccgcagcatcgaaagatacgtccagcatgaagtcttcgttcttgagaacgaagtggtagtcttcttccacgcgctggtaaacttttcgttgctccggcgacatttcgaagtatatgcgcttgtacaccttgtccggcaggaatgggagtgcttccttcttcgtgacccggaaactgtgcggctcgatcagggaccgcagcttgtccaggttccggaataccgggcgcccacgctcgtctttttcgaccagttgcggcggcatggtttgcttcccttccagcttgcgcatgatagcgatcattcgaggatcgtcactgggaaccaaaacggaaaattcggccacgaacgcccgataggatttcgttccaagaattccatcgcgcaagaattggaactgcatgaacaaatcggtaggcgcccgcgttagaggagttccggaaaggatgcgacgggccacggccttctcacccagctttacgatctttttcgcacgcttggcttgcgggtttttgatcctcgtggactcgtcaacaattgcgcaaaccttgaaagtttcaaggaatcgcaagacttcatcatagccagcctggtgattgatggcgtcaacgttgatggcgaagacgcgaagaactttttcatctgcgaacgtctcggcatacagacgatccaagcgcgccctggcctttttggaagtcggtcggccgcgccaatccacgctcaaagtcttgatcgcgacgtgggtgggaatctcgcgcagaatccagttggtgtggacgcccttgggggcgacgatgagcagcgcgtccacgcgcccctgtaggaagaggcgaacggcatcggccaaagtcgtccaagtcttcccggtgccctgctccatcaggtatgcgaaattccgtttgttcagggacgcggccagggcattgaactggtgctgcatggcctcggtcttcatgcccttgacgggatatgttttggctttcatttgttctccaaatcggcgaggaactgaacaatgttatccagtccttctgcatagctcgcaatttccaccaagtcgcggctgttaagctcgaacaaatcgagcatgggattcagcagcagccaatcggtcccgatcttggccaggacgaagccccggccgccccagccgatccgttcccgaaggaaagggatttgcccaggctcgaaacatctggccattgggcaggtggaggcgcgtttcggccactcctccaacgccttgaactcgacccagaactggacacctcgacgattcaggcaaatcgaatcggacataccagaccgccgcgtctccagaaagtcgatcaggattcggccgagtgagcgttgcttaaacgcattcgccgctttcgtttcgcgatcattcatcgccttcgccctctttggaaactttctctgcttgcgctgccagctttgctttttcgcgttcggtcaaaatcctcttgacggccttcacgatgaacatatcgattccgctgagcttccagcctttgatgaggaaccaagagcctgtcggcgttccttcggcaatctgctttccgtattgcagatatttttcaggcctaattctgaaacgtatcggctgatcaaccgagtcgtcaacacacatgatgtcgaggaactgcgactggcccttgtacaccgggtttttcccttgatctgccctcttcttctggcgaatcggttcgttctcatcagacagaacttttttcaccatcttgacaatgaccaggccatcgtctccatcgcggatatcccgaatgttctggatggggtttccggaagttactccaaccaactccggattgtcataagcatgaccccagagcgtgtgagcttcgttcaaatctgcgaattgaacttcagaattcgacagactcgcggcgactttctcccaatcctgaagcgtcttcaggtgggttccggccagctctttatattgagctttcagctccctaagatcggcctttaactccttcagatcggccttcaacagtttttccagttctttgtcttggctgattttcgccgaaagaatctgggcttccagcgctgctacatcagcagccttgtcctcaacatcctgtgccgatatcgggcaattggccagggcgatcctcgcggccttgacgtcatcacgaaggcgcaggaacttctctgccttcgccgggccgaagcctttggcgttcatgatgccgccgatcaggcgtccgtccgccactacccagttaagttcggaatgctccgggtccagggccgtatattctacgccttccttggccaattcgcgaaggattgacacagtttgctggtcgtctttcgccgcccgaagacacgcggccgcgtattccaggcgatgataccgcttcatgtagcaggtccagtacgtcaccacggcgtagctgaccgagtgggagcggttgaatccccaggcgccgaatgtcaccatttcctgccacacacggtgagcatcgtccggggcgacgcctatggtcttggcaccctcgatgaacaattcccggcgcttgttgaagaactcttcaccctttcgcgcagacatggctttccggattgccgatgtctgctcccagtcgaactgtccgatgtccttgacgatggacatgatctgttcctgatataggaagacgccgtacgtccctgacagatattgctcgacctgcggaatggtataggtcacaggctcgcggccggccacgcgctcgatatacttggtggccataccagaagacaacggacccggacgggctagcgccgtgatgtggtcgatgttttcgaacgcggtgatattgatcgcgtttgcgaccgaacgaactgcctgcccttcgaactggaaaatgccggacattttgtcttcgttgagaacatccaggaccgccttgtcgttcaaaggtaagtcgtacaactcctgcgcagtcacacagttcgcgtcctggatgacgcccagagttcgaaggccgagcgcatcgatcttgaggagattcaaatattccgaatccggcttatcgagctgcgcgacgccttcagaagttaccgtacagaagtcgataacttcatcgttgcagaccaggatgcctgccgcgtgtacgccagagtgggatgggtgaatttcgaggtcgcccatgcaggcggacgcgatctcatacttttcgcggaagtcgcggccgggctgagttttttcgaaagtgtcctccaatccttttccatatcgttcgtccgccgacgtatattcaatgatcgagtttttgatgttgtcggtatcgtggaaggggatgccgaagcgctttccgacgtgagcgataaccgatgcggccttgagcgtgttgatgttgcccaacttcaccacgttccaagtgccatacttctgctggagatattcgaacactagatagcgatgggtatcggcgaagtcgatatctatatcgggaagatcggaccgggaaatgtcgataaagcgctggaagagaaggcgatgagggagcgggtcaacctcggtaatgccaaggagatagcagaccaaagagccggccgaagagccgcgagctgggccgaccagcatatgcttcttggcgaacgcgaccagatctgccacgaccaggaagtagctgtcgaaatctttcagctgaatctgcttgatctcttcttggaatcgatcctcatactcctgggtccattccttgatgtggccgcgactgagacggtaggcttgcccctcgcgagccagcgcgacgatatccccatccaggtggatcataggcgccttcgccagtttcacatccgccaattgttcgactaccgcacgagtattggcggcggcggcatcgaactcttcgcgagtcatgatgtggcgtaaacggctccacaactcctcttcggtggcgatgtggcgaaggccgaccgattcccgcaccttccaggccgacgcgaaatcagcatggtcgatggacggcatgtcgttgtaagaggtaattaccaccggctttccgaatgccctggccgtctccatagcgccgtgcgcggcgaccatcgacgcgggattgatgtcaatgtagtcgattccggccagatccagatgggcataggcctcgccagcgaatttgatgacgccgtcagcttcctggaattcttgcggagtcaatccttgattctggaccgacttggaagtcaagcggtagaacttcttggtgtccttggcgagcacccaggctttgagcttcagctctttctcgccatcgtcggcgcatttgatcgggatttccatgccgaatccgcgaggcagttctgccttggtagcggcttgttcccaacggacgtgaccccatgttccatcatcgacgatggcgacgaatggggattcgatctctttggcgcgctcgatgatctccgggaatcgaccatatgcggcgccgtaggagtaaccagagcgaacgcggagctgagggaaagacatcatgcggcctccattgcttgatacgcccgatacactcccatgcgcttgcagacttcgtggagcagccgcacgtcgtcgagcgcccggtgtttctgtacatatgggccgcagtagtgctcataaagatgttgcagccgcatgcggtggccgaacaacggcgccgactcttccacagtacagatatcgagcgatgggaaattgacttcgtccaggccgaacttgccgcgagccagatcgcaggtcagcatgaacttatcgaatggcaggttgtgggcaatattcgcgtcggctctggaaaagaagtcgcgaactttctggcgctgatcgaggaaagatgggtgcttgatcaggtcttcgttcttcaacccggtgatcttggtgatgatttcctcgataacgattccaggattgcagatgaactctacttcatccaaaatcttttcgccatcagttatcacgccggcgaattcgatgattctcggctgctttctcagactcaccctttggtggaacgggagtcctgtggtctcagtatcccatacagcgaatatcatgtttgttccctcttatgtcgaaaggccggctgctttcgcgaccggcctgaggagtataccgcgacggctgaagatttacgccttctgtccgtctttcggcgtgatgcggccggagcgcatggtggcgtgaacaaacgccgaatagttgatcgagtccaaggccgaatcggcatccttgaacccgctattcgccaggcgagtgagtttacccaccgtgtgcatcacgaacagggcgagtcgatgatcatcggcggtcttcgccaccaggccgttcgggaagaggatttccatgatctttccgtacatcaggtcattgcgaccataggtgctctggcgggcgcggaagacttctgctgcggcgtacagattgttgagaacatcttccgcgaaatcatctggatgggaatcatcttcgcccggccagacggattccatggcgaacggcgcggcgtcttcggtcgggtcttcgggctgagccgtttcagcgagcggagacggggctttcgcaaacgcctcgtcgagggtaggggcggagttcggggcggccgggaacggctcgcctgccatgtcgttgggcgcgctatcggggtcgctatcggccgcgacggcgaagaacggcgcatcgcaaccttccaggttcaggatgtaggagtcgatccccaggctattgtaggcatcgatgatgtcctggcgatcatcgaacgccgcgacgatcttggtgacgccttcgattttcttcaggatgtcgagcgcgactgcccgcttgaactgaggcgccggctcggtgttaccatacggccgcatgatgagttcatactcgcgatgttcggcgatgccgagttcgcggtggagcttggccctggtctggaaaaagtggttgtcggttcggccggtgacgaagaaaatcatgaggtcggcgtcgatggcattcctgatgcgacctacagcgtgcgggttgagagtgtccttgtcgagacgagaatgatactcgtcccattgtcgttccaaggctaagctcttgcggtggctatcgtcgaagacgcagccgtccaggtcgaagatgatgatgccattcttgggtttgcgttccatattcagatttccttggtggttgctttctgggtgacggttttctcgatgaacgtcccatcagaagtgaggcggaaaacttcgccgttctggatgaaatcgaacgattgcacgttcatcgtgatgcgaatggattcgctgccgttggtaacttcgacttgtgcgatgtcgccaactttctcgacaatgatcttcatgttacatggacttcccgttgacggccacagggttggcctcctgtttttccgatccccagaaatcgcggcgcagctcttcctgctcggccgagcgatccatccaggggcgatagaacttgcactggtagataggttccaacggaacatcaaccacaggaatctggccgggcttcgtctccagagcggacatgaaccggtcataggatttctgctggatttcctcttcattcatcaccttcgacccatagcgcgggaaggcgcaggagccggtggcgacgcagtgcggctggagtaggctgtcgaacatcggatagacttccagaaccagccggcgcatctcgcggaacacttcctggtattcaccctgggtccgaacgcacaggcgaaccttcgccatgtcactgagagtccgcagattgaacttggccgcgatcttcgtttccatgttggaaggaatgattgcacgagcgtcctggagcgacgcgccggcctccagcagcttctggtaactggtctgcgcgtcggctatggcatcgtgccacaggcggttcagctcttcgcgggcgtggtaggtcgggtcaggctcgccatttaccgtagccggttcgtcgaattcccagcggaatgcttccggctgaacgacggcgctgatttccagagcgcgactggtttcctgctggtaagccccggtgcgagtccgaacgagttgatgggtgaaattcttgctgacgccctcgatctggaaaatgaagtccacgaactcgaacggcgagcggatggtgtccagcatgtacttccagtggtcgagcttttcggcctcggtcatggtcgccgggtcttggccgcgcatgcgggtggacttcgtgcccaagagcaattcccaggcgttctgggtgtaactaatcagagaaatcttcatcagaaatcttccggaattggcgtgaagtggaatttttcggtgagagccagggccaggccttgggcttgctccctgttaaggccatactgctctatctcttccttgagcagttcgcaggcctccaggcgcgcctcatactcttcagcctcatggacggatgagaagacggctccatcagaggttcggtacacaagttcgatcgccatggtgacctcagtagcagcggatgatttcggcgcggatgtcgcgacggtcgaggtagtgctcacgaatcttgtcgcgggcacgctcggcctcttcgcggctgccgaacgacaggttgaacgacgtgaaaggcttatcatccagttcagcgccggtctgatacaggattcctaccagaacgaaagacggcgcggtcttcggctgctggtcggtttgcagttcgagaaaggacatagggagacctcttcaggatgatctggtgcgtacattaatagcgctcctgctgagcagctacggtttccggctcatagatgagcatgtcaacgatttccgggcactggcctttcacccagtcgatggccgcgaccagtgcggtggaagcggagaaagagaaagtgcggtaagactcatggatgtacggcgaccccatggaatcgcgctcggtggtgcgcgaaatgactgctttgatattaacgatccggcccatcttcggcctccactttagcgattatatcggacaggcttaacttctcgccattcaggaaataactggcgcgaaacttcctgtcgccctctggcccgacgattcgggccgttattgtgagactcccgccgccaagggcatcggtgtcccggaagaaagctagcagcgcccgcttgagcgctgcttcgcgaggatcgacggccattaacctaccacgttccagccgtgctgagcgcaccacacggcaccggtccctgcaggaagactattcagaaggaacacaggagtcaggcggccatcctcggtcatatggacgaagtagcgggcgccttcaccgagccactcggccttggcgatggcgcgttcgagattggccttggtggcgtaggtcttggtgtggttcttgtcggtggagaaggttacttcgcgggccatttgtcgattccttttggttgaagggtttcgcgtttcgatgagggaatattacgcccacctgatccagaagtaaagcacttttgtaaattacttcacgaacattttcttggccttctgataagacgaagaagtcatcaggcgctcgatgacgtccatgtcagaaaccagatcgtccagaaggacgttgcgccaggtagcgaaccggccgagcgagaagatgccggcttcatgggtgagattccagatcatggattcgcgctcgtcgcggccgagcggaacgattttgcctttggtctggatggtcggctcgccgtcctcgatgagatgccttttccttatgccgaaggccgcgcaaacgtaatccacatcccagtcgctgtcccattcgatggtttcgattttaccatctaaagtctccactatccccttagtgatggattcgacgatcagagtatcaccggtgatggacgctcgaaacgttcccactttaggaccagggaaatacacggtctggaagacatcacaggggatggaaagcttgtatcgactcacgatgatggaggttccttcaccgaatgacgggtcgattcccaggtccagccctgccgcagccagattggcgcggaacggcgcggtgctgatgatattcacgtggtcatcttgccggcgaagatactggaagaaagaggcgtcgaaaggacggctccaagtgatacgattcgcaagcttagccaccagctgctcatagtagtcggccggtgcgatccaacgcttttcagtcgccagattccagatggaccggtccgacaggccgcccgttactttcctggagtacatgttgcagtggtcgatgcgcggctgggaaatgaactcgccgtcgatgtagatagctttgtgtacagtgacttcgcggaacgggatgccggtgagttggccaatcactggcgagcggaatcgcagaagtgcgttgtggcgctccttattctccggcgtcgccgcgtcgatgatttgggcttgaggaaagcgatgcgcggcgatcagtccggcgagtccggcacctacgatgattactttctgatcaggaatcatgatgtgtcccttatgagtgtacaaaacttgagaggataaaaaagggacccattttcatgagtcccttgaagagctagacgattcaggctcagaggagcggcggcttactcctcctcaccttcggaaccatcggcgccctgatcttcaccgtcgtgctcctggccttcgtcatcggccttctcgtcatcgccctggccagcttcgtcttccttcgaagcgatggcaaccagatcgacccagcccatgatttccagcttgctcaggtagctgcgaaccgaagtgccatagagcagatgggccaccttctcgccgaaggattcgatttcgaccggctcaccaacggtgcagtgctcgttgatgtatgcgaacaccttgccgcgagtcgagaaggcctgcggagtgccatggccgtcgccggtcgggatgaagtgggtggcgcgcggacggcgggagccattggacttcaggtcttcgcggcgggcttcggccttcttgcggcgctcttcctgctcttccttgcggcgctgcttctcggcttcgcgctcagccttcttctgctcggccaggcgcttgcgctcttcttcgcgagcgactttctgagcttcctgggcggccttcttctcttcggcctttttggctcgctcggcttccttctcggccttcttctgctcgcgctcggcttccttggccttcgccttctcggcctgctcggcttccttcgccttggccttttcagcacgctcggcttccttggcggcggccttttccttcgccttctcggcgcgctcggcttccttcttctcacgctcggccttgcgcttctcttcgcgctcggctttcttctgttcggcttccttggccttggcctcggccttctcggcgcgctcgcgctctttacgttgacgctcagcggccttctcggccttgcgcagggaggctgcttgttccttggtcagctcttcgccttgggtctgctcgttctggtctttctgttccatgttcttactccgggaatgtttaaagggatggcttattggcctgtgaggggattatctctaaactaattgaagaagggaataccttagcctgaactttcctaaatattttctttcgggaaagtccagactccagggaacttatttatgttcgcgaagtttaactcttgcgcaaaaacaacaagtattcaactgcacgagttatgccagtatacatcaactgactataaggaattgacggtaagttttcttccagcattgcgactcgcttccattccgatccctgcgacttgtggaaagtcatcgcccaaccaaagtcgaatccgccaatggccttctgcgcctccagccgcacatcttcctcggccgaaaagctcaaaggattgaacttcacccagcgctcatagttcgtgccgataatgcgaactttggcaaacagcatttcatccggctcgtcatcatcttcttggccttcggggaccggcttgaagtccagcagaattgcttgctcgccgttcatgatgccatattcgtgctggttcccggtgcacaccagcttctcgccgatttccggttgtacacccttgtagccgaggatgcggcgcgccctggcgttcaagcggcggcgagtattgttgtaggcgcaaaggatcacgccatcgtcatccaggaacgtccgcatttcgtcgtccgacatatcgaagccagcccggactaggatatcatcatactcgcggcagggcaggcgtttgccctggcggacgaacatcgacgctcgaacgatattcccggcgttacgctcgatttcagtcatgactgtgtcgcagctatgttcgtggaaaacctgaacgccgcgcacagggggaacttggccaaagtcgccgatctccagaaccggaattcgatgcgccaacaagcgctcttcatcccactcaccggtcattgacgcctcgtcgagcacgaccaacttcggcttctcgtcgagcgagtctttattggcgaacatgatttcgccgtcttcatcctcgccaatcggccgatagatgaagctgtggagggtccgggcattgatacatcccttctcgcgaagccttgcggccgctttcccggtaggtgcgacgaagaccgtccagtccatcgagcagcaaagttcggcgatgatcttcgcgatggaagtcttaccagtaccagcgaagccggcgagtcgatagacctggcggcggtgcgctcgatcacaccaaccgcgataccagtccacaacggaattgatcgcgtcgatctgctggctgtttggccgaaaaccgaatcgctcttcgatctgatcgacggtgaagttagatgctgacatatttgcgttctccaacgctaggtttaattgaatcgagactcagtttaagcacgccgtccacagaccatccagtatcacgacgatacttgcggccttgcggatcgacatagaagttcttcgtgcgccgcagcagaacatagtgccaagcagctccaagtgcgtggacccttcctttatacggaaaagccttcgcctgctctgcggcctccttggctccagggagccagcgtacggtcgaaaggaccaggaccgcacccttaatagcctgggaagcggcgcggccgtcctgtgggctatagcgatgtctatcgaagtctacccagtggtggttgccgcgccggagcttgaccgttcgggatcgcccctcgaacaccaccgtgccttcgtgagtaaaaatatgttccgccatcgaatgttcctttataacgtacagttatgctttacctctgcgcaggaagagtatactatcagctgactcgccaaagcgagcgaatttaatccaactttacttcggcaggaaagtggccgatactagcgccgccgcctgtactgccctccaaaacagaggatacattaaatgcaagaatgcaagatttcccgcgaccaactcccggtcggtaatccgaatcccaatgtcgacaagacccgcgacccgaacctgaagcccggtttcctgcgccgcagccgcgagctggacccggcgctggcagttcgcattcgtcgcgagctgatccacgccgaagcgtccgacttggccaaggccggatgggtcaattcacagtccagcctctatggatcgaaagccttcccgcgccattccgtcgttcgcgttaccggagttccggaagatggggctttcatcggcatgctgatcggcttcatcgagcatcgcgagcacggcgaatgggcggtcatggaatccggaacgaaagaaggcggcgccgtcaccattccagtcgatcacatcatgcgagcgtcattcgccgaagccgaagagttcgccgaaaagtgggagcggaacttggggtggcgtctcctgcgccagctccgcgagtgcggcgccctggccgggactgaagacgagttcctgcggcggatcatcaatcgatacgttcgtgatcgcacgatcctcgatcaccacaaagtcggcgcggacaaagactacactgatgcagtactcaaaagcatcggcgaaacatggccgaaaattccttcggggaaattcgtcggacaccgagtcgcgcagctcctgatcggccacaagctaggtcgagcggggaccatcctgaatgacctggtggacttcctggagaagttcgcggccgggcgcgataaagttctcaacatcgccatctgtaattgaggtgaagggatgaacaataaaccgacgctgaatcaccaccatcaaactgcattgttgtatctgtataacaatccaaatcagccggccttcacaggccccaacaatcaggcgctcaatgaacttcggcagatggggtatgtaaaggcgaaagaattcgaaaactgggcaggcaccggccatcttaggatggaatggacgctcaccaaagccgggattgagcgcgtcgaagtcgggcttctggggaagtgcgacgcttgcaagggaatcggtcagactttgcttcgggggaagtgtactgtttgcaatggccgcggccaggggtggatcagcgaatggtcgcagaagccaatcgaagataatcctcaaattgtccctaagttcgaaaagaccgatgcgaataggcttgcagacgccattgaagaaatcggccggctggaaaaggcactggccgaatccgaaaagcgcgggagcgagctggccgcgagctattgtgacggcgtagtcggcgatgaatacggccatccttattgtcgttataaagtggaacgcgacgccgccttggccgaagtcgagcgcctgcgagaatcaaaaggcgatccctctggcagcttcgacaggtgtatgaagatgatgtacgagcgcgacgagaatgcaaaacgactcgacgccgccttggccagggtcgcggagctggagaaagaactggcgatggcacgcgacgcagcagcaaagggtgatgctgcccgccacgctgctggcggcatggaaatggagattcatgagctgaagacgaagctggccgagctggagaaacaagagccggtggcatggggagccttccatttcggcgggaagcgcgacggcaagctgtatgcgcaatgcgaaactgaggctcagatagaggcgtatatcctcgacatgcaccgaagcagcgactcattgacgctcaggaaaggccccctctacaccgcgcctgtagtccaggctcaacccagcgtgccggaggggtggaagctcgtaccgatggacccgacatcgcagatgacctctgtcggtcagtccctgcgttatgactcggtaaacagcatcggcgagatttaccggcaaatgctcgcagtagcgccctcacccatcgatccggccgcgcatcctcagccgtgccagcaaccacaggcccatcctgcccgctgcgggtgcgagcggtaagtgccaagtaaggagtttatgtaatggaacagcagaaaccttcggaagtagatggagccatcgccatgaccgatctcgatattcgcattcttcgaaaggcgaagccagaagcgcaggacgagtgcgccgtgtccatgttcgcaacggcgatccgccagaaactgcagcgctcccgcgataaaggccgaggcggctggatcgactgcgacgaagatattctgatcaacggattcgccgaacatgcgctgaagggaaatgagaacaacctcctggacctggcgacgttcctgatgttcatgtgggtgcgcggcatcgatgatgcgaagattcccccggcgctcgaaaaggcgagacagcacaagatcatggaagcctggagtcgaatccatgaagacggcctgaactccgccagaaaggcgagtgctgcgcgacagttcgtggaagtgccacgacgcaaggggcgcccggagcgacttgcatgaagcctcacgaaataagactggcccaggccgaagagttcctgcgcgaactcggccgagggattccggacgacgaacgggtaatggtcggctacgctgaagaggccacagtccagaccgacgagaacggccgcaagctcaacgccggctggtggcctgtgccctggaaggaagggaaatacatcaactccagatccaacgcctacgcgtgcatctcgtcgtccatcaagacgcccaacccgaagaccggccagatgcgatactggcgcggcgaagcctctttcggccacggcctggcgttgatggtcgatgacatcggctcaggcaaagggtccaagggtgacttcgaccgcgacgagttccgcgagcgactggagccgaccgcgattgtggagacttcgccgaacaactaccagttctggtatttcttcaaagagccgatgtcccacatgctccagttcaaggcgctgctctattcgttcgtggaccaggtgctaaagaaaggcggcgacaacaccgtcaaggacgtcagccgttacggccggatgcccttcggcttcaacaacaagcgcgggaaagacggcaagttcaaatatgccgacgaaaacggcaagcccgaactcgtgcgactgttcagcgccgactattccaagcgctactcgccagaagagatcgcccaggcattcggcgtccgcatcatcatgccacagatgaagaaggtggagataaaccgcgacgattgggtgtatgaccaagtatggctgaagtatgccgagcacatctgcacgaaatacaagatgggcgaagcggcaggcggccaggtccagcagaatatgtccggcaaataccgcatccgctgcccgtggggagacgagcacacaaatggcgatccattcggcgcctactttcgcggaccgatccctggagccgagcacgaatatgtgttcggctgcggccacgatacttgccgcaaagagcatcgccggacgtgggcggccttcacggatgaagtcgtgctaccctatatcgtcgaacaattggaaagaatcaaccgccgtcatatcggtgaggagtagacaatatgcaaaacgatcctggaatcctgattaccgccatcggcttgctgttcctcggccttatcatcttcttcgaaggcctaaagggatggaaaatacaagtcgcaaacttcctcgcgtcgcttctgtgcttcttcttcggcctttctgctttgacgttctggttcgtcgttgcgtttgacgtattttaatcgacgaacggtacagaaattttcggatgggggcggaacttattagctatgccggtttaggtaggagataatagccgtccctttcgcctcaatgtgtagaggcaatgttgaatccgatcatgtaaagcagaaggcggcaaacctaacatgattatcgacgaagataatatttttgatgatggcgaatcagggtccagtgagtttgatctcacgcagatagaagatgctggaatggaccctttgatgaccgccgcgagcaaggcggccgatgatgcgattgcgaggaacgaaacgcatcgcgcgagcaaggcggcaagatacgccgaggcgtatgctgaaccagacttgaggaagcgagcgcggttactgatgctcgaccaggcgttcgatcttccggtcagccgggtggtgaaagggccgttcgatgacttcatcacgaaatacagctcgacgtcagacagcaactacctcgcggtctatgatacgttgttctgtaagggcgacggaaccgtcccacacccgcacttcgacgagtttcgcggccggctggtggaccatcgcggcgtggcgttcaacaacaagaccctcgatccgattgacctgatgggcgccctcgcggctgcggccttggacgatccatcgatcaagaagacgattgagacttgctgcgtttgggcgcgtcgatatcgccgcaactcgctgatcgagacgtttgagaagaagataccggattgggacggcgaagagcggatcgaaacgctgctgatcgacttgttcaaaccgttcgacaccgagcttaaccggatggtgagcaagtatttctggctgagcttgtactgccgcatcaactaccctggaatctcggcgccgatctcgttggcgttgattggtgggcaggatgcggggaaatcatatttcggcttgctgatctgtaaggaactgtccggtgggcgcgatctggctccagttcagctcgacctgagccgacacgaccagacgccgttcctgcgcaacatcaccggcaactcggttattgcgaacgtcggcgaaatgtccggcttcaaaaagggcgacatggaacgcatcaaagaattcctggtgcgatcttcggatacattcgatcagaagtttgagcctggcgaaacgatcaagcgacaatggatcaccatcatggacggcaacggatacgatggactccagcgggacgactccggcaaccgtcgattctatccgatgttcgtggcacaacttcccgacgaagatggaaagccgaactgggttaagccgggcgatggtaatgaaccgttcaaggtggacttcaccgacttcggccgcaaattctggcaagcgatggctgaatgccgcgcatggatcgaagagcatggtgtcgatggatacttgaatatggtgtctgaagcgaaccgcgaagtgcagaacttctctatttcggaaatggagaatgcgcgtggcgtagttcgtgacgatacgattgacatgtatctgatcaatgttctgatcagttgcgagttcgaagagatcaagcctggcaggaatgccaagaatcctggatggagggctgacaccgtcgccattctgaaatggttcgatattctcgccaggaagaagccgatttctcgtcaccttactccgcacctgaaggcgctgggattcatcccgaataagaacggcctggctggttggtgcttacctgtcgataaggttgcgcctggatggacgaatggcatgcacacgacgttgccgccgttcaatgatgcgcttgtgtacttgctgagaaagggcgacccggatatcactgatgaggctgccatggcaaaaattcgggcagtccgggccgagcgagccaagattttgggcgaggatttctgatgggctgatggaaggtactgatggagtgtacttggactaggccgccttcgggcggtcttttctttggcgcggcgtacattcgatttaggttgtggccgagtgagattcggaagctatctggtaattagggtggggtggcggttgtgtattatggaaagttagtggacggtggaccgaggattttgtgtggtgagtgggtgaattgtggaaaatcgacgattctgactggatttttgggtcggccgcgtcgagcttaccggtaatttacgaaaccaggaattagggtcgagccttagtgccgcgtgggtttgaagggcttaaccggatactttccggtttcggatgcagccgcaaaagtatactacagcgaaaatcgattgcac

SEQ ID NO: 12 - protein, 641 aa, Sphingomonas sp.
MPLACLATTRVGAAREKSGDSSMFDIPFPGHGRRLAVAALAFAGCAFAGSLQAHPFDQAVVKDPTASYVDVKARRTFLQSGQLDDRLKAALPKEYDCTTEATPNPQQGEMVIPRRYLSGNHGPVNPDYEPVVTLYRDFEKISATLGNLYVATGKPVYATCLLNMLDKWAKADALLNYDPKSQSWYQVEWSAATAAFALSTMMAEPNVDTAQRERVVKWLNRVARHQTSFPGGDTSCCNNHSYWRGQEATIIGVISKDDELFRWGLGRYVQAMGLINEDGSFVHEMTRHEQSLHYQNYAMLPLTMIAETASRQGIDLYAYKENGRDIHSARKFVFAAVKNPDLIKKYASEPQDTRAFKPGRGDLNWIEYQRARFGFADELGFMTVPIFDPRTGGSGTLLAYKPQGAAAQAPVSAPAAAHSSIDLSKWKLQIPVDPIDVATRDLLKGYQDKYFYVDKDGSLAFWCPASGFKTTANTKYPRSELREMLDPDNHAVNWGWQGTHEMNLRGAVMHVSPSGKTIVMQIHAVMPDGSNAPPLVKGQFYKNTLDFLVKNSAAGGKDTHYVFEGIELGKPYDAQIKVVDGVLSMTVNGQTKTVDFVAKDAGWKDLKFYFKAGNYLQDRQADGSDTSALVKLYKLDVKHSS

SEQ ID NO: 13 - protein, 331 aa, Sphingomonas sp.
MDVKARRTFLQSGQLDDRLKAALPKEYDCTTEATPNPQQGEMVIPRRYLSGNHGPVNPDYEPVVTLYRDFEKISATLGNLYVATGKPVYATCLLNMLDKWAKADALLNYDPKSQSWYQVEWSAATAAFALSTMMAEPNVDTAQRERVVKWLNRVARHQTSFPGGDTSCCNNHSYWRGQEATIIGVISKDDELFRWGLGRYVQAMGLINEDGSFVHEMTRHEQSLHYQNYAMLPLTMIAETASRQGIDLYAYKENGRDIHSARKFVFAAVKNPDLIKKYASEPQDTRAFKPGRGDLNWIEYQRARFGFADELGFMTVPIFDPRTGGSGTLLA

SEQ ID NO: 14 - protein, 368 aa, Sphingomonas sp.
MHPFDQAVVKDPTASYVDVKARRTFLQSGQLDDRLKAALPKEYDCTTEATPNPQQGEMVIPRRYLSGNHGPVNPDYEPVVTLYRDFEKISATLGNLYVATGKPVYATCLLNMLDKWAKADALLNYDPKSQSWYQVEWSAATAAFALSTMMAEPNVDTAQRERVVKWLNRVARHQTSFPGGDTSCCNNHSYWRGQEATIIGVISKDDELFRWGLGRYVQAMGLINEDGSFVHEMTRHEQSLHYQNYAMLPLTMIAETASRQGIDLYAYKENGRDIHSARKFVFAAVKNPDLIKKYASEPQDTRAFKPGRGDLNWIEYQRARFGFADELGFMTVPIFDPRTGGSGTLLAYKPQGAAAQAPVSLEHHHHHH

SEQ ID NO: 15 - protein, 360 aa, Sphingomonas sp.
MHPFDQAVVKDPTASYVDVKARRTFLQSGQLDDRLKAALPKEYDCTTEATPNPQQGEMVIPRRYLSGNHGPVNPDYEPVVTLYRDFEKISATLGNLYVATGKPVYATCLLNMLDKWAKADALLNYDPKSQSWYQVEWSAATAAFALSTMMAEPNVDTAQRERVVKWLNRVARHQTSFPGGDTSCCNNHSYWRGQEATIIGVISKDDELFRWGLGRYVQAMGLINEDGSFVHEMTRHEQSLHYQNYAMLPLTMIAETASRQGIDLYAYKENGRDIHSARKFVFAAVKNPDLIKKYASEPQDTRAFKPGRGDLNWIEYQRARFGFADELGFMTVPIFDPRTGGSGTLLAYKPQGAAAQAPVS

SEQ ID NO: 16 - protein, 356 aa, Sphingomonas sp.
MHPFDQAVVKDPTASYVDVKARRTFLQSGQLDDRLKAALPKEYDCTTEATPNPQQGEMVIPRRYLSGNHGPVNPDYEPVVTLYRDFEKISATLGNLYVATGKPVYATCLLNMLDKWAKADALLNYDPKSQSWYQVEWSAATAAFALSTMMAEPNVDTAQRERVVKWLNRVARHQTSFPGGDTSCCNNHSYWRGQEATIIGVISKDDELFRWGLGRYVQAMGLINEDGSFVHEMTRHEQSLHYQNYAMLPLTMIAETASRQGIDLYAYKENGRDIHSARKFVFAAVKNPDLIKKYASEPQDTRAFKPGRGDLNWIEYQRARFGFADELGFMTVPIFDPRTGGSGTLLAYKPQGAAAQ

SEQ ID NO: 17 - protein, 288 aa, Flavobacterium sp.
MSIQFSKILLLTVLATATISNAQDKKSKSKTAKIDWSHWTVTVPEENPDKPGKPYSLGYPEILNYAEDKIASKYMYDDPKDKSVVFYAFPSGVTTANTHYSRSELRETMETGSNKVNWTFAKGGKMRGTYAIDDISKEPDGKYSRVIIAQIHGVLTDEQRDLIGQKDNNAPPILKVYWDKGKIRVKTKVLKDLNAPYKEMLLEHAWGDDEGRNFKEKIDLNTRFTLEVKVSDGRMEVILNDTESLVYDDIHMKKWGIFENYFKAGNYFQSKTPGTFAKVKIYSLQVTH

SEQ ID NO: 18 - protein, 296 aa, Flavobacterium sp.
MSIQFSKILLLTVLATATISNAQDKKSKSKTAKIDWSHWTVTVPEENPDKPGKPYSLGYPEILNYAEDKIASKYMYDDPKDKSVVFYAFPSGVTTANTHYSRSELRETMETGSNKVNWTFAKGGKMRGTYAIDDISKEPDGKYSRVIIAQIHGVLTDEQRDLIGQKDNNAPPILKVYWDKGKIRVKTKVLKDLNAPYKEMLLEHAWGDDEGRNFKEKIDLNTRFTLEVKVSDGRMEVILNDTESLVYDDIHMKKWGIFENYFKAGNYFQSKTPGTFAKVKIYSLQVTHLEHHHHHH

SEQ ID NO: 19 - protein, 267 aa, Flavobacterium sp.
MQDKKSKSKTAKIDWSHWTVTVPEENPDKPGKPYSLGYPEILNYAEDKIASKYMYDDPKDKSVVFYAFPSGVTTANTHYSRSELRETMETGSNKVNWTFAKGGKMRGTYAIDDISKEPDGKYSRVIIAQIHGVLTDEQRDLIGQKDNNAPPILKVYWDKGKIRVKTKVLKDLNAPYKEMLLEHAWGDDEGRNFKEKIDLNTRFTLEVKVSDGRMEVILNDTESLVYDDIHMKKWGIFENYFKAGNYFQSKTPGTFAKVKIYSLQVTH

SEQ ID NO: 20 - DNA, 1080 bp, Sphingomonas sp.
  source 1..1080: mol_type = genomic DNA
atgcaccccttcgatcaagcggtcgtgaaggatccgaccgcgtcctacgtggacgtcaaggcgcggcggacgttcctgcagagcggccaactggacgatcgcctcaaggcggcgctgccgaaagaatatgactgcaccaccgaagcgacccccaatccgcagcaaggggaaatggtcatcccgcggcgctatctgtcggggaaccatggcccggtcaatccggattacgagccggtggtgaccctctaccgcgacttcgagaagatcagcgcgacgctgggcaacctctacgtggcgaccggcaaacccgtctatgccacctgcctgctgaatatgctcgacaaatgggccaaagcggatgccctgctcaattatgatccgaaaagccaaagctggtatcaggtcgagtggtcggcggcgaccgcggcgttcgccctgagcacgatgatggcggaacccaacgtcgacaccgcccaacgcgaacgggtcgtgaagtggctcaaccgggtcgcgcggcaccaaacgtcgttcccgggcggggacacgtcgtgctgcaacaatcacagctattggcgggggcaagaggcgacgatcatcggcgtgatctccaaagacgatgaactgttccgctgggggctcggccggtatgtccaagccatggggctgatcaacgaggatggcagcttcgtccatgaaatgacgcgccacgagcagtcgctccattatcaaaactatgccatgctccccctcacgatgatcgccgagaccgcgtcgcgccagggcatcgacctctatgcgtacaaggaaaacgggcgggacatccatagcgcccgcaaattcgtcttcgccgccgtgaaaaatccggacctgatcaaaaaatacgcctccgaaccgcaggatacgcgggcgttcaagcccgggcggggcgacctcaattggatcgaatatcaacgggcccgcttcgggttcgcggatgagctgggcttcatgaccgtgcccatcttcgatccgcggaccggcgggtcgggcacgctgctggcgtataaaccccaaggcgcggccgcccaggcccccgtcagc

SEQ ID NO: 21 - DNA, 1080 bp, Sphingomonas sp.
  source 1..1080: mol_type = genomic DNA
atgcatccgtttgaccaagctgtggttaaggatcctaccgcaagctatgtagatgttaaagcacgtcgtacctttctgcagagcggtcagctggatgatcgtctgaaagcagcactgccgaaagaatacgactgcaccaccgaagcgaccccgaacccgcagcagggtgaaatggttatcccgcgtcgctacctgtctggtaaccacggtccggttaatccggactacgaaccagttgttaccctgtaccgcgacttcgaaaaaatctctgcgaccctgggtaacctgtacgttgcgaccggtaaaccagtgtatgcgacctgcctgctgaacatgctggacaaatgggcgaaagccgacgcgctgctcaactacgatccgaaatctcagagctggtatcaggttgaatggtctgcggcgaccgctgcattcgcgctgtctaccatgatggcggaaccgaacgttgacaccgcgcagcgtgaacgtgttgttaaatggctgaaccgcgttgcgcgtcaccagacctctttcccgggtggtgatacctcttgctgcaacaaccactcttactggcgtggtcaggaagccacgatcatcggtgttatctctaaagacgacgaactgttccgttggggtctgggtcgttacgttcaagcgatgggtctgatcaacgaagacggttcctttgttcacgaaatgacccgtcacgaacagtctctgcactaccagaattacgcgatgctgccgctgactatgattgcggaaaccgcctctcgtcagggtatcgacctctacgcctacaaagaaaacggtcgtgacatccactctgcgcgtaaattcgtttttgcggcggttaaaaacccggacctcatcaagaaatacgcgtctgaacctcaggacacccgtgcgttcaaaccgggtcgtggtgacctgaactggatcgaatatcagcgtgcgcgtttcggtttcgcggacgagctgggtttcatgaccgttccgatcttcgacccgcgtaccggtggctctggtacgctcctcgcgtataaaccacagggcgccgccgcacaagcaccggtgagt

SEQ ID NO: 22 - DNA, 867 bp, Flavobacterium sp.
  source 1..867: mol_type = genomic DNA
atgagcattcaattttcgaaaattttgcttcttacggtgctcgcaacagccacgatctccaacgcccaggataaaaagtctaaaagtaagactgccaagattgattggtctcactggacagtgacggtccctgaggagaacccggacaagccaggtaagccgtattcactgggttatccggagattctcaattatgcagaggacaaaatcgcgtcaaaatacatgtacgacgatccaaaggacaaaagtgtcgtgttctacgcattcccgtccggcgtgactaccgctaacacccattacagccggtcagagttacgggaaactatggagaccgggtcaaacaaagttaactggaccttcgctaagggtggcaaaatgcgtggtacttacgctatcgacgacatcagcaaagagccggatggtaagtattcccgcgtaattatcgcccaaatccacggcgtactgaccgacgagcaacgtgatcttattgggcaaaaggacaataatgcccctccgattctcaaggtgtactgggataaaggtaaaattcgggtaaaaacgaaagttttaaaggacctgaacgccccttacaaagagatgcttctggaacacgcttggggtgatgacgaaggccggaactttaaagagaagattgacttaaatacacggttcacattggaggttaaagtgagcgatgggcggatggaagtcattcttaacgacaccgaaagtttggtctatgacgacattcacatgaaaaaatggggcattttcgaaaactactttaaagcagggaactacttccagtctaaaactccgggcacttttgcaaaagttaaaatttattcacttcaggttacccactga

SEQ ID NO: 23 - DNA, 804 bp, Flavobacterium sp.
  source 1..804: mol_type = genomic DNA
atgcaggacaaaaagtcaaaatccaaaacagccaaaattgattggtctcactggacagtcactgtgccagaagaaaacccggataagcctggcaagccatactctctgggctaccctgagatcctgaactacgctgaggataaaatcgcaagcaaatacatgtacgacgaccctaaagacaagagtgtggttttctacgcatttccaagcggtgtgactacagcgaacacgcactattctcgttccgaactgcgggagacaatggagaccggctctaacaaggtgaattggacgttcgcgaaaggggggaagatgcgcgggacatatgccattgatgatatctcgaaagaacctgacgggaagtactcgcgtgtaatcattgcacaaatccacggcgtactgacggacgagcaacgggaccttatcggtcagaaggataataacgcacctccgatcctcaaagtctattgggataagggtaagattcgcgttaagacaaaagttctgaaggatttgaacgctccttacaaagagatgctcttagaacatgcgtggggggacgacgaaggccgcaatttcaaggaaaagatcgatctcaatacccggttcaccttggaggtgaaggtgtcagatgggcgcatggaggtgattctgaacgatacggaatccctggtttacgatgatatccatatgaagaaatggggtatcttcgagaactacttcaaggctggtaactattttcaatctaagactcctggtactttcgctaaagtaaagatttattccctccaagtgacgcactaa

SEQ ID NO: 24 - DNA, 804 bp, Flavobacterium sp.
  source 1..804: mol_type = genomic DNA
atgcaggataaaaagagcaaatctaagacagctaagatcgattggagtcattggactgtaactgttccggaagagaacccagataaaccgggtaagccatacagcttgggctatccggaaatccttaattacgccgaggacaaaatagcgagcaagtacatgtatgacgaccctaaggataagagtgttgtcttttatgcgtttcctagtggagtaaccacggcgaacacccattactcacgaagcgaattgcgtgaaacgatggagacgggtagtaataaagtgaattggaccttcgcaaaaggaggtaaaatgagaggtacatacgccattgacgacatcagtaaggaaccggatgggaaatatagccgcgtaattattgctcagatacatggcgtcttaactgatgagcagcgagacttaataggccagaaggataataacgctccaccaatattaaaggtttattgggataaaggtaaaattcgtgtgaaaacaaaagtattgaaggacttgaacgccccatataaagaaatgctactagaacacgcctggggggacgacgaaggacgtaatttcaaggaaaaaatagacttaaacacacgattcacattggaggtgaaggtctcagacggacgaatggaagttattttaaatgacactgagtctctagtgtacgacgatattcacatgaaaaagtggggcatattcgagaactacttcaaagcggggaactacttccaaagtaaaacacctgggacctttgcaaaggtgaaaatctatagcttacaggttactcactaa

SEQ ID NO: 25 - DNA, 804 bp, Flavobacterium sp.
  source 1..804: mol_type = genomic DNA
atgcaggataagaaaagcaaatccaaaaccgctaaaatcgactggagccattggaccgtgactgttcctgaggagaaccctgacaaacccggcaaaccatattcgctgggttaccccgaaatcttgaactacgctgaggataaaattgcgtcaaaatatatgtatgatgaccctaaggataagtccgtggttttctatgccttcccctcgggggttaccacagccaacacgcattattcacgtagcgagctgcgtgagacgatggagacaggcagcaataaagtcaattggactttcgccaaaggtgggaagatgcgcggaacgtatgcgattgatgatatttctaaggagccagatggaaagtattctcgtgtcattatcgcacaaatccacggggttcttacggacgagcaacgtgatctgatcggccaaaaggacaataatgctcccccaattttgaaggtttattgggacaaaggcaaaattcgtgttaaaacgaaggtcttgaaggatttgaatgcaccatacaaagaaatgttgttggaacatgcgtggggtgacgacgaaggccgcaattttaaagagaagattgatctgaacactcgttttacattagaagtaaaggtgtctgatggtcgcatggaggtgattttaaatgatactgaaagcttggtttacgatgatatccatatgaagaaatggggaatctttgaaaattactttaaggccggtaattactttcaatctaagactccagggacattcgccaaagttaaaatctactctcttcaagtcactcattaa

SEQ ID NO: 26 - DNA, 67863 bp, synthetic construct
  source 1..67863: mol_type = other DNA
ttgcacaatcctaatagaaaaaatctatcacggacgttacctatctttaaaattaataaaattaatagtaatttggtaatttggtatactttagtatttgaaagccttgcggcactaagcctgtacacttcccgtcaagtttccgattccgctcaactcgcggcagggtcgccggaaacttccggacttccaatccatgggtcgcggcaacaccacggcggactaagcggcaagtgccaaaactcgacgaacggaaccggaaatttggaagcgcgatagaatcgctcagctggacatatttctaacattcgatttaacactcaatccaaacactcaccgccatcgtctcccgccaaccgccgactcgatcctcacccaccagcggatcgcccgtataacatcctataacaccacctaacactcattcatcatcaaacccacccagacctacagcccacccacaagcagcccatagacgcgatccctggccccatagtacaatcgcgccatactcagtgtcgcggcagagcaccaggggccatccgccaaccaagccaccacgacgactccagaatcgaactcagggacgcagcaccaaatgaccaaattctacagccccgacgatctagtcacgccacaggaattcgcagacccgcatttcgcggcgatcaaccaaaagcgattcgacctgtacatcgacctgcgcgtccaaggttacagctcctggcgggtcttccgggccatctggggcgaggagcatatggacggtcccgcgcaggcccgcatcttcgcgatggagtccaacccgtactatcgcaagcagttcaaggccaagttgaacgcgaccaaaacgtccgatttgtggaatccaaagacggcgctccacgaactcctccaaatggttcgtgaccccaccgtcaaggactccagccgtctgtcggccatcaaggaattgaacgttctggctgaaatcacgttcgtggacgagtcgggcaagacccggatcggtcgcggtttggccgatttctacgcatcagaagccgaggctcagaccgcgaccgtcgctgctgcggccgaagccaatggctatgtgccggaaggtgaagagggagatttcccgtctccgtctccggaaccgaccgaggaagaccgcgccaaccccatttagacataaaataacggctaaggatttaaggtaaggaggtttatttatgcatccgtttgaccaagctgtggttaaggatcctaccgcaagctatgtagatgttaaagcacgtcgtacctttctgcagagcggtcagctggatgatcgtctgaaagcagcactgccgaaagaatacgactgcaccaccgaagcgaccccgaacccgcagcagggtgaaatggttatcccgcgtcgctacctgtctggtaaccacggtccggttaatccggactacgaaccagttgttaccctgtaccgcgacttcgaaaaaatctctgcgaccctgggtaacctgtacgttgcgaccggtaaaccagtgtatgcgacctgcctgctgaacatgctggacaaatgggcgaaagccgacgcgctgctcaactacgatccgaaatctcagagctggtatcaggttgaatggtctgcggcgaccgctgcattcgcgctgtctaccatgatggcggaaccgaacgttgacaccgcgcagcgtgaacgtgttgttaaatggctgaaccgcgttgcgcgtcaccagacctctttcccgggtggtgatacctcttgctgcaacaaccactcttactggcgtggtcaggaagccacgatcatcggtgttatctctaaagacgacgaactgttccgttggggtctgggtcgttacgttcaagcgatgggtctgatcaacgaagacggttcctttgttcacgaaatgacccgtcacgaacagtctctgcactaccagaattacgcgatgctgccgctgactatgattgcggaaaccgcctctcgtcagggtatcgacctctacgcctacaaagaaaacggtcgtgacatccactctgcgcgtaaattcgtttttgcggcggttaaaaacccggacctcatcaagaaatacgcgtctgaacctcaggacacccgtgcgttcaaaccgggtcgtggtgacctgaactggatcgaatatcagcgtgcgcgtttcggtttcgcggacgagctgggtttcatgaccgttccgatcttcgacccgcgtaccggtggctctggtacgctcctcgcgtataaaccacagggcgccgccgcacaagcaccggtgagtctcgagcaccaccaccaccaccactgaagaagcgacaaagccccggactctagttcagaatccggggctttcttttgggtttcttattctccagcttcgatgatttcgaagttgtatttgacgccttcgtgctcgaaagtcaatttgccggacgctttcagctgcatgcggaatcggatgcacttagaggaaggcaaaccgaactcgatgaaggctgcgttgcaggatttgaactcgccgcgcttgcctttcacggtgaccgccacgccatgacgctcggtgcgcttgcgggcgacttccgggtctttccaggagttggcgatggctgctgacaggtctttggtctctttggttttctccggcgcgttcttcgcctcttcgcgcattttccggatttcttccagcgcttcctcttcggtgatttcttcttccggcttcagattctcttcggccttctcttctgccttcttcttggaagtgcgggttttgtaaaccttggccggggtttcctcttcctggaaggcctcttcctcggccggcagagcgttcaggatggcgaggcagcgacgctcagcggtcttgcggtcagagaagcgcttgacagtcgcatcggcgttgtgagcgttgtagaaggcgaccagttctttcatttctgcgttctggatgtcgccgaaggttttgatggagttggtcattttgcgatcctctgttttggaagatttcgtttgggcttcagtttgtcgccccgttgaaagagattatgcctaggtcgatgctgcgtgtctacatctatttcatcagattgatcacaaagccgacgaacggttgtctgatgtgaaaacaccgcagagcaggctgcggtgtttgttggcgttggggtgatgtcagaaagtcgggactgtgataggctcgatgggcggatcgccgggcctgtcgttgtccgatgcgggcgccgggctggaagggatcgcacccgaccgaagcgccagcgattccgactgcctgcttacctgcggagctggaggcgcttttggcgcatgaggcgcgggcggaaccggcaggcctggaggagccatcggcgccctgggcggctccggaagatcgggcagatcaggaagactcggcgctatgccgccaaaggaccgctgcgaccgctgcgacggattgtcgccgaacatttcggcggatcggttgtccttgatgacttgacctatggccgtcttgtcgccacccggttctgctggatcgaagcccgtgaatggagtggtaacgcagcgcatgttcggatgggtcggcagattgttcaggacgatggagtccgcccagacatacgggtttttgtggttgccgggtccgtggctgatgatctcggcaggaatatggccgttcatggtgagccattccgccatcccttgccgagtcagcgggcttaccacgatctgaccagtggactctttggcgatggcgaacagatcaccgaattcgaatccgatgattgtgtagttggacctggactcgccgacgaaagccagagtttcgatgttgtggtggatatcttggtcttcccagatgtacagcatggttcgctcctcaataaggttgcttttggtgttcgaccagagacataccggccggaactttgaagcggacgtattcgatcatcatcgccgttcgacgccgattcgtgcccgactcgtcattgacgaatagttcgcactggtgcggaatgactcgcgtcaccaggcactcacctttcgagccgtagaacttgctgtaggctgcgacgcctcgcgtcatgttcagacggatcgtttcgcagagtcgctgcgcggccgacgcgctggacagatcggtcggactgaccgtcacccagtaatggccactttgttctttatcggacataagctgccctccaatgagaaagcctctgccgagtcgcagaggctggttgttgttagtcgcgcttcaacagaacgactttgtcatatgcgcgatatttaccgcgccagtcttcccagtagtcgccggccgggcaggtaagctccagggtgatttcgtcgcgccagcattcgacagaaaggacaatcgccttgttcctggctgcggaatccgccctgagcttaatcagaatttcgtcgccagttttcaactcatcaactcttacaacttttgccatggtgttctcctattgggcagcgccgcgagggcggatcgggtcgatgtcatgtaagcagatggtaggatagtccctggccaacttgagcttgaagtccacccagtcagcgccgacaagtgccgagacttcgacacttattttgttgtgcggagcaggactggtgcgcaggactatggcccgacgccgaacgggatcgttgacgtcaacatgagtgagtatttcgtcgccgacgagcaactcacaggccatcaatattttggccatcatacactcctatgagaaggcgcggccaggacgatcccagccgcgccgatggattaacgtttgtgaaggatggacactgcgtccacgtcgaggatgctaatggtacggcgacggcgcggattgctgcgttcatggatgcgaatcaggttcgcagctggagcttcgtccaccacccatacgtcttccggtttctgcgtccggagcaggaccgtcacttcagtattctgggcgaggccgttgcagatgaaagtgaacttggacgagggagttctgtacatttcgagattcctttttggacttctggttcggcttctcagccggtgaagagattatgccctgattctcaccgccgagtaaagcatttgtgtaccaattctcccgtcaggtggaaccaaagtgcggtatcgcttatggctacgctaccgcgccatggcccttcttgctcgcacactgcgaaccacaggctgatttccatccttgccaggactcggccgaaagattcgaacctgcgccgactggacaggatgtcgacattcactcgtcgattgacctcataccggcgaccgttgatgacgaagaccagccgcagggtttgtccgtccagacattcccagtatctggtttcataccgaagccagtagcgcttgccagccgggcctaccatggtcatttaatcgatgctcctggccgcgccacgcggtccggtcggcgggacgggatcgaaccgacccaggatgtagtcgggccggcgcgcttcctgaggacacacggcgagaaggcgccatcctgcgtccagggcagactggagttcgtccgtgcagcagtcttccttgagcagcagacggttgacgttctggagattcggaccaggtatggccgatcctgtgagtgagttccaaccctcgattccactcaccatctccggttggttgatgtagcttacggacataccggccaaccggctcgcggccagctccagacgctccagcatgggtcgcagagcagcttccgggtcaatgtcgtcccagagaaggaccaggctgatgatggtatacggatagtccttgtccagatcccaggctgaagcggtcagacggcccaggccgatttcattacacatcacgggaacgtcgttgctccaggtggacggctcccagttccgctcaccaggattcccgattgttacgccttccaggttccccaggagaacgtggagcttgctgacatattccgcctccaaggctttccgctcttcgtcggtcttgttgtggcgatagaaggatggagggctgactttggcatggtagagtttcataactgttcctcggttttggaagatttgaaagttagagaatggtgtcgcagtatttctcgaaaggactctggcgcttcttctcgcagatcgcgcaggtgatttccaggtcgggcagctcgctgtaagtcttgccgagatacagccagcgcttgcacagactgcggccgtccgacgtgaagaagtggactttgcgagcattgccgggttgcgcccagccgcttggtgccggcttcctgctcataccatcaccacgtcaatttcgtcggcgaagaagttaaagccaactccatctgcgtagccagtgtaacgcagacgaatcgtcccatcaatgtgggcttcctcgacgccgatgacttccagggtggtatcgttgcagtacagcttgacgaacatcttgatgccggagccaatcgccgcgaaggcgatctgcttgtacaggtcttgcttgatcatgctttacgctcctgtttgcggatgtattctgccctgacttcggcttcgaacttcgcccagagcgcgttgtctactggaccccagggaccggtctgagttccgtccaccggttcgaacttgccaccggcgcggcgatatttggacagagttttcaggctgatgatcttctcatcttgggaatcgaattggacgatcatttgacgtacttcccgaagtagcaggtgtggatgatttccagaccattggagatagccttcagcttgatgccgaaattcttgatcgcccagtccagatcgtggtgatagaactcgatgatgttgacgatttgaccggcgctgtagtggatgacgcgaaccttgccgttccagcggaagtcttcgcggctgtttacggcctcgactgcgatggtgtcgtttctgccgatgttccatttggagctagtcatgtcgcaatcctctttttggagtgtttcgcgtttcgatgaggtaactatacctcagtcacctcatcgagtaaagcacttttgaacatattatctgaaatttctgtgagacggatccatcggcggattcagtcagtggaaccgagactccatccgttgcgggcgaaggccgagcgaccagacagcttgcggcactggatggagctgccatcgtcgaaggtgtaagatacggcccagtccaggcgctcgcgacgcactgacgccgcagcgatatcttccagacgggctttgagaagctgttctgctttggtcatttcgagttcctctttggggcgcttcgtgtttcgatgagatgactataactcagtcacctcatcgagtaaagcgcttctgaggaattatctgaagtttctggaggccagaaattgccgccagagccagtcaacgtgatcgttgaggtagcgctcgccatcggacgacagagccaggcatccatcctttatgccgagcttggaactggaaatccattcgaactcgaactggagcgttcctgggcgagggatatgggacaggctgtacttttgcacggtcaggaatcctctaaaggtttggagttcgcgatggacgcgactttctgcatgccgatgcgatagaattcggcctcttccctggccttggccagctgctccctggcttcgcacgccagcttgtgctggttattggcattctggatgcttccgtccagactcctgtccaactcttcccgaagagccttctgcgacgctagctcggcctccaaatcctggattctgatctgaagctggcgattcctttcagaaacatcgttttcgcgagcgatggaattctgaaggcattcgtcaaggcgagtattttcgcgcaccagttgatgcttttctactttcgcctttctgcacgtctctcgcattgctgaaagctcactcgcatgcagatcgtcatccgggtctttacgctcttccttcgactccatccgcaggtagtactggccggctgcgaaggcgagcactgcctggtcggcatacgctgcggcatcggtcatgtatctggatttgtagcgaggcagaaacttgcactcctctggatcccagaggagactatcggcaataggccagaatttgcggaaaccatcaggatcgacttctacattgaccatttgcagctggccggcctccacttcgacttccagaggaacctgaatagtgccggtgatgtactggaagtacactatgctagacataacacaaactccatgagaagtcgcggccgggaccatcctggccgcgcatcgtaatcaatcttcgccttcgtccgcgctcagccactcttcgaaggcgaagtttaccttcgactcgacccaatcctgaagctcatcggcgaactcgtcactgtcgatgtccatggtgatgcccatgacttccatgttccatagcgcggcattcagttcaaactgcaccatccgctcgccatcgacttccataaggatgcggtctgcgacttcatagtcgtctacatcgaacaggtggccgccagtcaggaggtgctggacgaaagcttcatcgaggttggtgacttcgatctggacttgtttggtcattttctgcgatcctctgttttggagtttgggcgcccggcgaaccggggcagggtgtttagcgcggagagtgccgatcttccaattttcaagctcgtcttgcgctgcgatctcaatatctaacagcgcttcctgccgctcgcctgccgctcgcctgcggtaagggtagagttccaagccaaatccttgatggccttgatgatttccttctttgtcatggtcatgcccgtggctcctatgtgcggcgggttggttaggcgaacagaaggcgattgacagcagcgtccacgtcccagccgcaagcgaacagcgccatcgcggcttcgtattcggttgcaaagccggtgtctgccatgaccacttcaacggcggttttgctgtaatgctttgaaagtttcagggcggcgagagagtccgctttgtcggccacagcacaagcctcttgaacagtttcaaatcggcccacctctttgcagcgattttccagaacggcccagccaaagacgttaccagcgccatcagtgattttgtgtactgtgttcatcgtcttaccctccaggtgtttgttcgtttcgatgaggagattatgccgatagtcagaatggaagtaaagtgtctgagtgagaaaaattctgcacaccgacgaacggttgtgctcgaccgtctgctgcggtgtcgatatactcggcctattgcgaacaatggactgattaaatgtacaaactcaatcctgcgctgcgagcggtctggcgaactcgtgcccgttacaaagtcatctatggcggccgggcgtcttcgaagtcacacgacgcaggcggtatcgccgttttcctcgcggccaactacaagctaaagttcctctgtgctcgccagtttcagaaccgcatcagcgaatcggtctacacgttgatcaaggacaagatcgaaaactcagagtataatggcgaattcatcttcaccaagaactctatcaagcacaagagtaccgggtcagagttcctattctatgggatcgcccgtaacctgtcggaaatcaagtccaccgaaggcatcgacattctctggcttgaggaagctcactatctgacccaggagcaatgggaagtcatcgagccgaccatccggaaagagaactcagaaatctggatcatcttcaacccgaacgaagtgaccgacttcgtgtatcagaacttcgtggtcaagccaccgaaagattcctgcgtcaagatgatcaactggaatgaaaatccgttcctcagtgagacgatgctcaaagtcattcacgaagcatatgagcgcgaccgggagcaggccgagcacatttatggcggaattccgaagactggtggcgacaaatccgtcatcaatctcaagttcattcttgcggccatcgacgcccacaagaaactcggctgggagccggccggatcgaagcgcatcggcttcgacgttgcggacgacggcgaggatgcgaacgcaactacgctcatgcacggcaacgtcattatggaagtggacgaatgggacggcctggaagatgaactgctcaagtcgtccagccgcgtttacaacctggcgaagatgaaaggcgcctcggtcacttatgactccatcggcgtcggcgctcacgtcggatcgaagttcgccgagttgaacgatgccagtcccgacttcaaactgatctatgatccattcaacgcgggcggcgctgtcgataagcctgatgatatctacatgaagctgccgcacacgacgatcaagaacaaagaccacttcagcaacatcaaggcgcagaagtgggaagaagtcgcgacccgattccggaagacttatgaagcggttgagcatggaaaggtttatcccttcgacgaattgatttcgatcaactctgaaacgattcacccggacaaactaaatcaactgtgtatcgaactttcgtcgccgcgcaaagacctggacatgaacggccggttcaaagtcgagtccaagaaggatatgcgcgagaaacgcaagatcaagtcgccgaacatcgctgactcggtgattatgtcggccattctgccgatccggaagcccaaaggtttcttcgacttctaaacacagaaaagcccggatcgctccgggcttcgggtcttactcggtgtggttcctggcgctgagtgtcgacgcaacggcctcgccgactcccagggcttcctggccggccgcgagcgcttcggcttccgactcgacgatgaagtcatcaccttggccgtcgcctggcggaacctcgaccagcacggcttcttcgccttcgaaccgcaggtcataagtcttttcgacggacagtccgtaacgggcattgagcgcatcccagagctgagcttcatagttgcgcaggtcttgcagagatttctggtggctgagcatcgccatatcgacggcccgttgcagggtttcgtccaggacgttgaatcgcatgcgaagagaacgaatccgctcgaccacttccgcatccactacatgtctttcgatcatcgcttttcacctttgctgaatgttacgttgtagccattgtcggccaggtaggtcagggcgccttcgaaggaagttccgacgagatgcttgagctgcatttcgcgttgcgcggcgatccagaatgccgttccggagaactctgcgtggccttccgacaataccttgccatcaggcccgtcgatccgaacgtgaacggaagatagcttcagtaccatcaatgaatccctccactggcttgcgacggcatgctttcagcgcgagcggcttcacagtccgggcagggacaggcttggcggacgcgctccaactcgtcggcatccatgacatagagcttcccatcggaagtgtcgtgcgccatggcgatgttcgggaagtcggcagcgctcaggccggcgacagcgcggatttcgtcccagagcgccacatgctcggcattcaggcgagctgcgagcgcttcgtgctctttcgctacacgagccatgaactcgtccatccggaatgcgaattccgcatcgatggatcgggccgaggccatggagttgaggcgaatcggttctttcttcatggtaattctcttttggttggcggttgttcgctgctcaggcctattacagtctgagcagcatgatgaagatgaacgcaaggaacgcaaacggcacaagtatgccggacatcagctttgacaggcgctgcatctcagcgtatttctcggttgacattccgtgctgcgccgcctcagctgcgaagcgggctttcgcctcgataacttccgggcgcagcgacaggacatattctaaggcctcttcccgcgctttttcggcctcgaccgacctagggtcgcgggccgagacttcgctgtgccctggcctcgcgggatgggcctgcagcgatggaggaagttcggcggccacgactccatagtcggcgcaggcccaagcgatcccgatgaggatcgcgaggatggattggacgattcgcagcataactttgtcgctagggaagctcatgatcaatcctccacagaccgaacgatttccaggttgcgcccggcattggtcccggcattgaaggcgcgccgaccgtcgctatcgtccaggcgcatgagcttggtaacatttgacttcttgtagccaggatcgccgaaatgttcgtgcaccgcagcttccttcaccacaaccagagacgttccggcagaagataccagctccatgcgcttcctggtgatggcctgaaggcgatagctgatttcctgggtcgcggccagcttgaattgcgcggcaaccttgacgttgaatcgtccgtatccttgagccttctgatactcccggcacagacgatcaaccgcttcgacaagggagttgaacatgttcaccgccagctcaacgtccgatttgtagcctttaaagcggacggcatgcccccagcgcttcgtagtcccgccgtttgcggcgtgccaagaagccttggcggtcgctcggtgatcgttgatgccaccggcgaaatccatgatgcagtcgttgtacgtcgccacggccaccgagaagaacttcatccagttcgggattgcggaatagtaacgagtcgcgatctgctcatcgaactcttcgcgaatctcgccggtcacttcgaagtcgtgaaggtcatatttgtccttcagcttcttcacacgctcggctgcaatggcggcttcgtgcgggctggaggagtcggccgccatggcagtcagtttgcggatgcggtctttcgccttctcgatggcttccggggtgaattcgttctggtcggtcatggtcggttcctttgtctgaagggtttcgcgtttcaatggagctattctgccttcattcagaattgaagtaaagcactttcttccactatttcggcatcgactggaagaaattccagatccaatcacctgctaccagcaagaggatgagggcggcaaagaacaagacagcggccgcgagctgtgcgcccggcttcagtttgggatggctgagcttgggctctacgggaacggccggagcgctagcgctgcaaccggcgtctcctgggccgtagccgatgccgcgttcacacgcctggagcgacaccagggatttaagatactcggtctgcttttgcgactcttcgtagatgccggcgacggcgaaccagagggcgaacactacggacgtacacacaacccaggcgccggtcagcaggagggccagcgggccgatgacgaagacggtagcagccaggacgattgcgccgccccagatgatgaagccggccagaccattagtgatgtcgacacagaactttttcattttcagattccttcggttacgggatggaggggatttgaaactctgcgccgccgagaacatcaatgacgacttcccagagcgtcggaacagaccactggtaacggtcgaagtcggtttcaggatcgacgcccagcgtcacataggaagtggcaggccatttatgaacactgcctttccgcatgagagtcgccacgcggccgtcaccgagcggattcgttctgtgcggaacgtacgcagacatcgaatattgctgcccggcgtcgacaacaaatctttgcctctggcgcagacatacagagcccacaggattccagccgcgaccgccgcaagcctggcgagccgaagagtgttcataaccttcgtgagtcatttcgccgaggcaagccgagcgatcctcgtaatagttgatgttctccatcgatccaaccagtaccagagactcgaaatcgaatctatgatcgtggatggccgagtgattgaagcaaagccggcgcggcaactccgggtgccaaacatggaggcgccctgccgggagctggacttgaatgaaccccaggccgtgcagcgtgatcttgtccttcatcgggtcatggacggtgctcatggataatcctcagtagcagaaatgtatggtgagagttacgatggccaagccggtcgcccataggagggcgaaccaggccatggctttgatggttatgtagatcatccgaagaactttccggcacagatcggtccaatgcccatttcgatggatgcgtggttggtcaactcgcgaccgcagcaggagcattgaccagtcttccggccgtaggcgactgccgattccatcggcttttcaaacatcttcagaacgtcgtcatgctcagtgtcggtgcagtcgcgactcttgatgaatttgccattggtgatccggccgaggtagatgtcgcccaagacgtacaagctaccggcgttccggctgtgagcgctagcctctttcacaataacgatgagcggctcctcgccttcgccagccaggcggattttcgggcgcttgatgccagattctttcgccttctcaaacgccttctcgatgccggaaatgtccagagtcggtgcagcagcttcctgcgcggccactttctcgcgatatttggcgaggttttcgatggcgcgcttcgcagcagcgatctgattttctgtcaaggagccgtatttatacaacgactcctgaaggctctgagcgaagctgaaggaatttccagtccaccactcgacgatgtccgggtgcgcagcttcgaaggctttaattttgaggtcgcgctcttgcgcagcgctacatattttctcgatgcgcttttctgccgccttagcacgactcttggcgcgctgctccgggctggttttgtactctttgtatccaacaccgccgcaggcgaagcaggcgcgaccataagacgaagggccacggtacaggccggtgcctgcgcatttggtgcacttgtcgcgatacagcttcacttccttccgggaattcgggcgagcgcccatggacgcgtcttccagggtcttcggcgcttcgttgttgatcgctacggtagcgaagtcgtcacccaggtcttcgaagccggtgaacagattctctgctgcgttcatatcgattctcctgtttggaaagttcgtttcgatgggttgactatacgccagaaatggaaaacggtagcactttcgcactaccgttcgtcggatcgcagagggtcaggctacacggatcaactgcgacatgactgccaggttccgctcggcgacgccgatgatgacgttggttccgatgatgaacttccaagggtcttccctgttcttgtcgtagaacggatttctgaacagggtccgccatgtctcttcagtgaagaacgttttatggtccaggtcttggtgggcgatgttggagttgtagaatggaacaacgacattgagcgtcgcgccgactgccatggcccgctgcaggtctttcaccaaatcgatgacctgggctccggtgagatgttcgaagaagtgaaatgcgtagaccgccgtcaattcgccgtcttcatacggcactcggccgctggcgccgtcccagttcggccagtcgagcgattcgacgccgggaatcggcgaattgcctgcgcccaggtttactgcgcggcggtgatccggctcgatcaactgagcgatgtcgcgcttcatgccgagtttgaacaggttttgaatatccatttggttctccaggttgctgttagtaaatgtcgctgttgatcttgaatccatgctcagcgccgtcgttgtggtcgtactcagcatagctgtcgcagtagtcattcaaatgctgaatgatgccaagaacgtcgttcgcggccttgtgccgtttcgcggcgatggtcttggcgatgttgtcgccgacttccagggtttcggccgtccggcgatggatcagcaggcgactccaaagatagagccggacgcgacgaatgatgtcgcgatggcgctccagtcgtccgtgcaactcttcaatttcgtgctcgcgagattttaatactcgtcgaagctgctgaacttctaattccaaatcggccttagtagccatgttcacctcaaaaaggaaaatcgtctgggactccaggaagctcgacgactattgttgagcctgatcgatctagaatgcatccgaccgagccagccctgtggggatagggtctacacgaactataacaggtgacttccatgactattcgccaggtcgatcctccacaccatctacaaattggcggtcgcttcgacttcagttttcgttcgtccaagacggcgcgtctgtcgcaggaaaggcagcgcgccttaaccgacgtaaccatgggtatagtcgatcattcggatgaggccatcatcctctgattccctcgacttcagaccgcccaaagagtccgactggccgttgcatttcgcatcgatatccatcgaagacaagaatcctgccgatactacggtgatatcaactttgtcgccggccttcttgaagtcttcgcactcagcatcgagggccacaaccgcactcgcagccatgttcacatgacttatgaggtcggggaagatcacaggaacttcacgcgacatgccacggaccgtcatcttcagtactacatacttcatactcactatcccttttgtatgtgaggaaagaatttgctgttttccggatggtggaagcgctcggccgcaggctgtctttcttccggacattgaatcgtcgaaggcgggaaaaccgcgccggcgataatcgccgcgaggagtgcagcggatgtcgacatccagagggcggtttccaggctcacccgaacttccggacggcgcggcttcattcgctccaccctcttcccggttcataggatggtagactgccgccgcgaacccagtcgtcccacatgtggttcagaccagtcggtggctggggcggcggactgtagaatccgggagtctcagtgctgctcaggaaataaggtgtgcaaacggcctggacggccagttggtgccgctcccacatcttatcaatcgctcttagcatgacgtcttcgcactgagtcttactgtcgaaccgtctgctagtatggtccggtatctggacacatccgtctccagtgcaaaggaaagcagtagcaatccatacggtgatactcgccatttcgtcacctctttagttgatgagcagagtctattccatctgctcgccaggagtaaagcgcttttcgtcgggataaatgccgatgatgtctgcgtcgagcatccaaatgtccacggacggatcgtcgctgctgatttgatatagattgtacagctcccgtccgcctacagcacgctcgcctcgcggctcaaccgccagaaccttgccgtggccttctccgtgctcgtccaggtatatgacgtgatcaccgacttcatagctttctttcgtgacgaggcgtgaacgcgagttgttctgcgattcaaccacccaggaatccagcacgccgcctttcatgtcgcggaacaatcttgccgatttgtcgcaatcgaacacgcccagaacttcgccgtctttcaacacgatgtgtacgataggaagaagagtattcatgtttaatctccattgactgataattagagtctaatctgccgaaaagttcccgtaaagaattatttctcagaactgattagttgtaactgttaatctgatgtatgtgtttgaatctcttttgaacgtttgatgtttcccctataataagcgcacacagccaacaaccacgtggaactacaatgtttaaactttcctggatattcgggcgcaaaaaggatagtgctgcctgttctgaatcggcgccggagaaagtcgcacaaatccctcaacacgatccgctcgaccctatgattaagctgggcagaattcgcggctggaacgtcgagccggagaaagccccggtcatccgtagcgtgaaggattttctggaaccgggcctatccgtcgcaatggacagcgcgtatggtgacggaccgactccggccgcgaaggttgctgcgggcggccagaatccctatgtcgtcccgaccatgctgcaggattggtacaactcccaaggtttcatcggacaccaagcttgcgccatcatttcccagcactggttggtagacaaggcttgttccatgtccggcgaagacgccgcacggaacggatgggaactcaagtcggacggccggaagctatccgatgaacaaagcgcgctgatcgcccggcgcgacatggagttccgcgtcaaagacaaccttgtcgagctgaaccgattcaaaaacgtcttcggcgttcgtatcgcactgttcgtcgtggagtccgacgatccggactactatgagaaaccgttcaatccggatggaatcacgcccggctcctacaagggaatctcccaggtcgatccatattgggcgatgccgcagcttactgctgcctcgacggccgatccgtctgccgaacatttctatgagccggatttctggatcatcagcgggaagaagtatcaccgcagtcacctggtcgtcgttcgtggaccgcagccgccagatatcctgaagcccacatatctattcggcggcatcccgctcacccagagaatctatgagcgcgtgtatgcagcggaacggacggcgaacgaagccccgctgcttgccatgtcgaagcgaaccagcaccattcacgttgacgtggaaaaggccatcgcgaatgaagacgctttcaatgctcgcctggcgttctggatcgccaaccgtgataaccacggcgtgaaagttctgggaattgacgaaggcatggagcagttcgacacgaacctggccgacttcgacagcatcattatgaaccaatatcagctggtcgcggccatcgccaagactccagccacgaagctcctcggcacttctccaaaaggattcaacgccactggtgagcacgaaacgatttcttatcacgaagaactggaatccattcaagagcacatattcgacccacttctcgaacgtcactatttgcttctggcgaagtcggaagaaatcgatgtgcagctggaaatcgtctggaatcctgtagactccacgtccagccagcaacaagccgaattgaacaacaagaaggccgctaccgacgaaatctacatcaactctggcgttgtgtctccggatgaagttcgcgagcgtctgcgcgacgatccgcgttccggctacaaccgactcaccgacgatcaggcagaaaccgaaccgggcatgtctccggaaaacctggccgaattcgagaaggccggtgcacagtcggtcaaggcgaaaggcgaagccgagcgagccgaagcccaggcgggagccgtagagggcgcaggcggcccggttcccgccgctccacgcgcgactaagcctctcgcgaaggcggccgaggaaggggccagcgaggccgctgaaccgccgtcgcggccggaccccaaggccgagctgcggaacttgttggtcgatcttttgtcgaagctccaagacctggacgacattaaggcgccggacggcgtagacatagagcacaatgatgcgcctggcttaaagcgcacgtccaaacctggcgtgtctggcatggagccttcagtgttttcgtccaaccgcatcgtcgggcctcgtgatcattcggaactccagagaatcaaggtgaatggaataaccaccttgatcgaaaatccgcgaggaagcattcgacaaggaaaggatgggagttggcgagttcagatgaaacaccactacgggttcatcaagggaacgaaaggcgctgatggggatgaagtcgattgcttcgtcggtccgaatctgggatccaaacgggtcttcgtcgtcaaccaggtgaacaaggaaggtcagtttgacgagcacaagtgcatgctcggcttcaacaacatcaacgatgcgaagtccggatatctgtcctgcttccgtccgggctgggatggtctcggctccatccatgaagttgacctgcccgctttccgtcgctggctggcgaacggcgacaccaccaaaccattcgggggcgagtgatggcattcaaggcctccaaaaagcgcgagcgccgggcacctcttccagtcggaagagggaagcccataattccatcggcaggaatcgaggcctggtatcgaaagcagatgaaggatatgtccaagctcatgatctccgactatcgaaacgagattgagaaggcgctgtcccagcctgcggccgaacggttcttcgccagagacgaatccgttaacgtcctgttcaagatgacccttcgaagcctacagcagcgatggagccgcatttttgaaggtttcgcggccaagatcgccccagagttcgtcaaccggaccgaagaagccgccactgccgcgacccttcacagcttgtcggtggccggcgtcgatcagccacgagctgcgtataatgagagcgtcaggaacaccctggaggccgcaaccacttacaatcatactctcatcaccaagatccaagaggaagtccacgagaagatttacacatcagtaatgctgtctctgacttccccgaatccggaagagcaaggaacttccggcataactaacgcacttcgcaaagtcgggaagttttctgaagatcgaatcgaactcatcgcaagagatcaaacaagcaagctttacagttctctgagcgatgagagaatggcggaaaatggagtcgaggagttcgagtggctacactcttctgccggcaagactcctcgccacacccacctggagaaagatgggaagaggttcaagctgaatgaccccagactttgggagggtccgaaagcagaccaggggccgccaggatgggcgattaactgtagatgcagaaagataccagtcatttgacgtcgataggagcgctatatgccgttagttcatggcacttccaatgaggctcgttctgaaaacatcaagcgggaaatcgaagccggtaaagacccaaagcaggctgcggccatcgcttattccatccagcgcagtgagaaagggaagacggcgaaagattgttcgcctgagctcgtcgccgatcttcgcgccctggtggacgctctgtcgaggctcgtgaaatgaaccgcaagacgtgccggcgccgactcgtggtcgatgtaatcagggccaatattcacggcggattcttcagcctgaagtttgccgccatcgatttggcaatcatcggcttcgccatcttgatggcttttggccgatgatgctgagaaaatctggattctgactaaaaattctagtccggatagccgcaaattaccgtttacggaaaatggcagtaatttggaaatcctactgccgcgaggctttaacagagccagttcctaatttccgatttagccgcatgcttcaaaagtatatagcctgggaaattagaagtaacgttccaatagaattcatctataagcaacgttataatataacgtcaatctatatgctctagacgtattgaaattcaatttttaatcggtaaattggtaatttgaattagtttagaagttgaaagtctcgcggcagtaggcttagacaaatcccgtcaagtttccgagaccaaattaccggattttcgcggctgaggaaactggtaattagatcataatacaaattataatgtaagttaacagtcgcggctacatctaattattgttccgcttatttacccttagatgtactgcgtatataatacagccatagtccacgactcttcgaattaacgatggcaaagtcgaaaagaaaaattgacgaaaatggatatatgaccatagagggctgcccgatcagctcttatggcgttttccaatattctgctggtcaactcggtcttccgggcgatccgacgcggattgtcaacgtatatcgcccggagtctgccgtcagcgatccggagtacatcgaatctctgaagaatctcccgttgatcgacgagcatgagatgctgtcgggattcgacgatgatgacgatagcgtggcccccgaagacaaaggggtggagggcatcatcacatccaacgcttactacgaagccccatgggcacgcggcgatatccgcatctattcccgcaacatgcagaatcagctggaaaggggcaaagaagacctgtccctaggctatagttgccgctacactgagcaacccggcatctggaacggaacgccttatgaagtcgtccaggacaagatgcgcggcaaccacattgccctggtaaaagagggtcgtgtgccgggggccagagtattggatggtctgtgttttgaccatctcagttttgatttcagaccatccgatgagggtaatgaaatgagtctcaagaaagccaagcggaagccccctgtccagcgcgtagggcaagctgctgactcggcggtcgaagagttgcgcgccctgtggccgaagctatctgcgtctgtccagaagttcctgggcgaagaagagcaggagccggagcatcaggaaggcgcagctccggccgaaccgaccgacagcgagcacctgaccgagcatccgactctggaaggtgctcagaaggatgacgaagagcaggaagaggagccttccgttgtcgatccggccgtggccgccgtcgagccggagcatcaagaaggtgccgcatccgaaatgtccggtgaaggcgaagtcgccgaactgatctctcaagtcaaggccattctggctcgactggagggcacggtagccgaaggggcggacgaagagcatggcgaaggtcaagatgtcgtcgagggcttggaagagcagagcagcctcagcggcgcgcaaaccgccagcgacgatggtggtgagggcaaggataacagcgaggaacttcctgaaatggcacagaagaacgcgcaagatgctgcaattcgcggtctctatcgcgacattgctgctaaagatcgcctctacaagcgtcttagctccgtggttggtgcgttcgatcaccgagctatggactcggctgaagtcgctgtttacggcgtgaagaagctgaatatcagctgcgcgaagggccaggaagcactggcgctcgacatgtacctgaaaggtgtcgaagccgcgcgcggcgcggccagccgtcaatcgaaagcccaggattcggccggttctgctccgcagtgcgccgagctggacagctacctgaagggggagtaactcatgttccagaaacaagtttaccgccagtacactcctggttttccgggcgatctgatcgaggacggcccgaagcgggcgcggccgggtcgaatcatgtctctgtctgccgtaaatccggctgccaccgccaccggccccaaccgcatcagtcgcgctttcggttacgccggtgacgtcagctccctcggcgaaggtcagccgaagactatcgcggctcgcgcttctgaagtcgtgatcggcggcgccaacttctttggtgtcctcggtcatccgaagcactatgcgctgttcggttcggccggagactccctggctcccagctatgatctgcccgatggcgccgaaggcgagttcttcgacatggccaccggcctggtcgtcgaaattttcaacggcgccgcaaccgccctggacctggactatggtgacctggtcgcctatgtaccaaacaacctgcctaccgccgacaacgcgcttggcctgccggccggcgccctggttggcttcaaggctggctccatgccgaccggcttggtccagattcccaacgcacgcatcgttaacgccatcagtctgccggcccagtcggcggggaatctggttgctggcgttaccatcgtccagctcacgcagtaaggaggcgtcatgagccagatcagcaagacccattcgcgcctcgcaggccgcaatgcgaaacctttcgacctgaaaaacatcaccaatgacgccgtggcgtctctgcgccgcatcggcctggtattcgatcacgccgtcgtccaggaccagatcaaggccttggcgaaggccggcgcgttccgctccggctcggccatggacagcaacttcaccgccccggtgaccacgccgtccatcccgactcccatccagttcctgcagacctggttgccgggcttcgtgaaggttatgaccgctgcacggaagatcgacgaaatcatcggcatcgataccgttggctcctgggaagatcaagaaatcgtccagggcatcgtggagccggccggcactgcggtggaatacggcgaccacaccaacatcccgctgaccagctggaacgccaacttcgaacgtcgcaccatcgttcgtggcgagctgggtatgatggtgggcaccctggaagagggtcgtgcctcggccatccggctgaacagcgccgaaaccaaacgccaacaggcggccatcggtctggaaatcttccgcaacgccatcggcttttatggctggcagagcggcctgggcaaccgcacctatggtttcctgaacgatcccaacctgccggcattccagaccccgccgagccagggctggtccactgccgactgggcaggcatcatcggcgacatccgcgaggccgttcgccagctgcgtattcagagccaagatcagatcgatccgaaggcggaaaagatcactctggccctggccaccagcaaggtggactacctgtcggtaaccacgccttacggcatttcggtttcggactggatcgaacagacctatccgaaaatgcggatcgtgtcggctccggaattgtccggcgtccagatgaaaaaccaagagccggaagatgctctggtgctcttcgtcgaagacgtgaacgcggccgtcgatggcagcaccgatggcggcagcgtgttcagccagctggtacagagcaagttcatcaccctgggtgtcgaaaagcgggcgaagtcgtacgtggaagacttctccaacggcaccgccggtgcgctgtgcaagcgtccgtgggctgtggtgcgctacctcggcatctaacagatgcctattcaccaaaggccgggcttccggcctttgttcactctgactctaactcggttgtaggggccggttagggcataattactaggactacgccaatgactgtttatatcgtttcctccatgactcaatcggtgtcttacaatgcgtatgacacctctgatccgtccaatcctcgcctccagcgaaagattctgattcgcggccgcgcaggcatcgcatccgaaacttccggcttcggcgacatgatttccgacgaggcaggacgtccgatctggaccccacagggcgattgcactgccgtgagcgattcggatttcgagctgcttcaggccaataagattttcatgcgtcacatggagaagggttatctgcgagtcgtgaagaccgacatcaccagtgaccaccagcggatttccaaagagactcgcaccatggagcgcgatggattccagcctctggatgctactcgcctgcagcagaaaatcaaggtgaccacagccagcgcttcccaggaacaagagttccggatttaaccgagggtttcggtatggtgattttcgacgaaaataagtttcgcacgctgtttccggagtttgctgatccagccgcttatccggacgtgcgcctgcagatgtatttcgacattgcgtgcgaattcatttctgatcgcgattcgccataccggattctcaatggcaaagccctggaagcgtgcctgtatcttctgaccgcccacctcctgtcgctgtccacgatgcaagttcagggcgcggctggaggtggcgtcaccgccggtggaacccaaggcggtttcatcaccagcgctacggtcggcgaggtcagcgtggccaagctcgcgcccccggccaagaatggttggcagtggtggctttccgggacgccttatggccaagagttgtgggcgctcctcagcgtcaaagcggtgggcggattctacatcggcggtcttccagagcgccgaggcttccggaaggttggagggacgttctggtgatccctggtgcgaatcttctgcgaatggccttcggggtcatcggtactcaaattgtgaaatatcgcaagtttgagcagcgagtgaagaatgatcaagcccagtatgtctccatgttcggggagcctttcgacctggcagcgtctgtccagcgagtccgacgcgatcagtatgcccagtttaatctggagttccaacggaattatgttatgatcttcgccaactttgatatggttgacttggatcgcaatatggccggtgaccagttcctctggactggaagagtttttcagctggagtctcaaggctcctggttttatcaggacggctggggagtttgcctggccgtggatatcggtgcggccaagttcaccgatgacgggaaaccgactttctaggtggtgtatgtttgacggcgaactgatagcgaaaatggttgtcgagctgaatgcggcgatggcatctgctcaagaggctttgcagttcccggattttgaagtcgtccagaaagctcagccgacccaacaggggacgtcaaccaggccgaccatctttttccagaaactgtttgacattcctcgcggctggcctgccaccgattggtacctggacaacacggcccgcaaatatgtggaaataactcgacagcatgtagagacgactttccagatcagttcccttcattggcagaatcctgaaatcactcacgtggttacggcttctgatatcgccaactatgtgagagcttatttccaagctcgatccacaattgagcgcgtaaaggaactggacttcctcattcttcgcgtgtctcaaatttccaacgaggcattcgagaacgacaatcaccagttcgaattccacccaagttttgacatggttgtcacttacaaccaatatattcgcctgtacgaaaacgcagcatattcggccgatggggtattgataggcatatgagtctgaggcgcgattcagagctaatcgccgcgcacctccagatgttaagagccatgcgcggcaggtccgtttcagccggatggtattccacggctcgatatcctgacaaggcaggcggatcggtcggaatacaagtcgcgagaatcgcacgtctcaatgagtacggcggaactatcgaccatccgggcgggaccaggtatattagggacgccattgttcggggccggtttgttggcgttcggttcgtcagaaacgactttccgggagaaaccgaggtaactaagcctcacagaattaccatcccggctagaccgtttatgcgatatgcttggaacttgttttccgcagatcgcgccgcaatccagaaccggatagccatgaggctggccagaggacagatcactccagatcaagctcttgcccagatcggcctggcattggaaggatacatagccagaagcatcaggaccgggccatgggtggctaactcagcatctacggtcaggagaaagggattcaacagaccgctggtcgatacggcgcacatgcttcaatcgattagcagcagagtaacataaccaggagatcatccagtgatcagtcagagccgttatatccggatcatttcgggcgtaggcgcaggcgctccggtcgcaggccgaaagctgattctgcgcgtcatgactaccaacaacgtcatcccgcccggaatcgtcatcgagttcgacaacgccaacgcagtcctgtcatacttcggcgcgcagtcggaagagtatcagcgggctgcggcttatttcaagttcatcagtaaaagcgtgaattcgccgtccagcatcagcttcgctcgctgggtaaacaccgccatcgcgccgatggttgttggtgacaatctgccgaagaccatcgccgatttcgccggcttctcagcaggggttctgaccatcatggtcggcgcggccgaacagaacatcaccgccatcgatacgtccgccgcgacttctatggacaacgtggcgtcgatcatccagaccgaaatccgcaagaacgctgacccgcagctggcccaggctaccgttacctggaatcagaacaccaaccagttcaccttggtcggcgccaccattggcaccggcgttctggccgtggcgaaatctgccgacccccaggacatgtccactgccctcggctggtccacctccaacgtcgtcaacgtcgccggccaggctgccgatcttcccgacgcggccgttgccaagagcaccaatgtcagcaacaacttcggttcgttcctgttcgccggtgcgccgctcgacaatgaccagatcaaggccgtgtcggcctggaacgcggctcagaacaaccagttcatctacacggtcgctacttccctggcgaacctcggcactcttttcaccttggtgaatggcaacgccgggaccgccctgaacgtgctgtcggcgactgctgccaacgacttcgtggagcagtgccccagcgagattctggccgccaccaactacgatgagccgggcgcttcgcaaaactacatgtactaccaattccctggccgcaacatcaccgtttccgacgataccgttgcgaacaccgtcgacaagagccggggcaactacatcggcgtcacccaggccaatggccagcaactcgcgttctaccagcgcggcattctgtgcggcggtccgaccgatgcggtggacatgaacgtctatgccaacgaaatctggctgaagtcggctatcgctcaagcgctcctggacctgttcctgaacgtcaatgcggttccggcgagcagcactggcgaggcgatgaccctggcggtgctgcagccggttctggacaaggcgactgccaacggcacgttcacctacggcaaggaaatcagcgccgtccagcagcagtacatcacccaagtcaccggtgatcgccgcgcctggcgtcaagtccaaaccctgggttactggatcaacatcaccttctccagctatatcaacagcaacactggcttgaccgagtggaaggccaactacacgctgatctattcgaagggcgatgccatccgcttcgtcgaagggtcggatgtgatgatctaatggtttgcggcggactcgatccgccgcaaccttccataaatggagtgaggaataagcaatgatcaacatttctgcgttcggctcgatctgccagttcacggcaagcagaactttcccgaacggattcaccgtcaccgagttcgccgacgatgccgatcccatcgacagcccgccgttcaccgctgccgataccggcgtcggtctcaacggtgacatggtagtttggaaccgggcgaacatcctggaagtagtcgtcaacgtcattccgaataccgagggcgagcgcaacctggcagtcctgctggatgccaaccgcaccggaaaggacaagtcgggcgctcgtgatgtcgtcggtctggtcgtggcgatgccggacggcagcaaaatcacctgcaccaacggcacccccatcgacggcgttctgatcaacgcggtggcaagcgtcggccgtctgaagaccaagccgtatcggttccgatttgaaaaagtgatcaaagccggtactagctgatgaagaaaattccgctgacagcagtccccaatcaagcgatctcatttaacgccggtagcagctattggaagattcgcctgtaccagaacatggacatgatgaatgccgatatcagtcgcgacggcgtgatcgtttgccatggggcccgctgcttcggcgggattcctcttctccagtacagccatcagtaccgacctgactatggcaatttcgtcttcgaccgcgacgccgattggacgttgttcggcgacggaatcaacctgttctatctggacggcgccgaattcgcagagtatcaggcgctcgccacgaggaaagaatgagcacatcaacgatcagaaccgggacgaacaatgatatccttttggacgacaatggaaacatggtcatcctcaggggtgtcgaagcgtgcgcccaggacgttcgggcggcgatgctcatgcgcaccggcgaaaatattttcgatgtgaactccggcgtgggatatttcgaatacatcttctcgccgcagaaaagctatgatgacgctcgcaaatccatcgcggatgcaattttgtcctcgccggatgtgaccggcatcgagcagctggacatcgacatcaccggggaagtcttcggcgtcgatgcgaaagtcatcaccatccacgggcctgttaccacaggagtttgaaatgagtaccatccgcatccaatacgccaacggcacccaactgttcctggacggcaaaaatccgccgcccctggacccgctgccctcgtttaacccgtctgtcgaagatctggaaggcctgggccgcgaaaagaacaccgacaagggcgactcctcgccggccggtcttcccgttcccccggtagacgtcgattccaatgtcgacaacggcggaaccatcccggctccggtatcgaccgacgctcctgcggccgaatcggccccggaaggcgcccaggaagctcctgcagcaggccaaggcgacgagaaaggcgccgaggaagccccgactaccgccccagtagaaaaggccgaggaaacggcctcgccggccgctgaagaggcaaccccggctcccgccaaggccacctctcgcaaaaccaccagcaagtaaggactcgacatgatcaacgtcagcggcttcggcacaggaattgtaatagtttccgcctcatcgttcccgatggggttttccttgtcgaagttcgctgatgatgagagtccgatatcctccaaagagctggagccgttcggatatgagatgctttatgacggcggcctattcgcctttgacaaggctgctcctctggaagtatctgtatccgtcatcgcagggagcgaggatgatattaaccttcgcatccttctcaattccaaaaagggatcattcagatttcttccgggaatcatcccggacatgacgactctcgtggccactcttcctgatggcggccgcaccgttctgtccaatgggaccatcctcaagggtccggccatcgacaccatacagaacaccggacggcgcaaaggcaacacgtacacttttgttttcggtagctatcttggcgcccagactgcgcgtcaagccatttctaacgttatccaatcggtactggaggtggtctgatgttagggattttcaccagcctcctaagttcgcgatctttttcgattgtggaccaaaacacaaaccagctagttgctgcggatttgaggataagccgggtcaacacccggttttcttctgtaggacaacgccacatgctggaagatggtacgaccaagatggattccagaacgatccaccctatggaaatcatcgtcgaagtattttgcccttcaattggtgtcgtcgatcagatcaatcaattgctcctggatcgcgacacactgtacaaagtcatcactcgcggcatggtattcgaacggatgatgtgtaccagcgaagcgctcaatcagactccggatgtgatatcggcgactcctgcacggctgacattctcccaagttctcgtccagaatcccaagcctataatgttccgaaatgcaggggactcttctatgatcgaccgagggctggccctagctgaagacgtggttggctcggccggcgatctgttcgactacgcagtgaacggcgtccagaacgccgcagacttgttctgaggtgccaattgaactctttcctcaagtctattctcaacacgcctactctcaccatacgcgatgatgttaccaaacttcctgtctggaagagtcttcaagtcaagaaagtggaaatttactcgccggcttccgtagtgtcgaaacctctggcgacgaaagaccagacggaagctcaagtgtacaccgaagctctggacattgatgtgaagaatggaaagatcatccaaccggtgcgactccgcatcaatgctatctgtccggacctgtccaccgttgaaagtatcatgaacgctttcaatgataacacctcgactttcgctatcacttctaagtcgatattggccgataaaatggccatcatgacgctcgatgtagatcagtctccagacatgttgaacgcggctgagatcaatatggaattcgagcaggttgagcctccagtattgaataaattcgatcctgcgttccctcaagatagtccgacttatggggtacagattcaatctctttctgatgctaatttgctggattttggcgccatcggcgattcgatatcttcggccgcaaaatcgctatataatcgcgtgaccagctacttctgaggatgtatcatgcttgaaatcaatcttcccgatggccgtcaaactcgcgtacaaatcgaggcgtggtcggcattggatggctgggaactccagcgccgtttcgtcgaattcgctgtcagccaagattccgacttccgccgctctttcaccatggaaatcctgggctatgcgaaagtgctgcttggcgacgatgacaccggcattccgctgaccaccgcggcagtcatcaacaaccacctcggccactggaagaacgtggaactggttttcaactctgttctcaagcacaatggcatcgacccggccacgcacgccgaccggccggactattgggaacaagtcggatcgcagatggccatcgcatttctggccgaggcgtccaagctcattggtccagcaatgaagatcgccgaaggactcgccaacaagccggagtgattcatgtctagtgatttggatgaattcatacttcggtatgaggccgatactgccagagccgagcgcaatctggagcgcctccagaaccagatcaggcgcgtgaacagcgcatcgacgagtggccttcaggatttgcgccacttcgcagacggcgcggccactgaactcggccgagtcgttccgcagatcgattctgtgacgagcgcgattcgcgggatgaacgcgcaactggcgataggcgccactggcgtggccctggtcgcggccggcgtcaaggcgttcatgaacaccagggaccagtacaatcagcagcgcatccaggcgatggacatcggcatcgccccggcacgcttggaagagtaccagagaaaattcgttcgccagtccggtggaaccatcagccgcgagcagggcgcggagatgaccaaaaatctggcagacactttccggcgtgcttatcgcgatattgggcgagtcggcccggaagcgcgaattctgcgtatggccggcgttgatgtcgggagcttccaaaagggcatgcgcccgctcaacgacatcattactgatctggccacgaaaatggccaagctgaagccggacgaaatttctgcctacgctgatgcccttggcgtctcgcgagactacctgagcaccctggctaagatcggcccggccatgggaaaagtcaccgagatgacgactgcggaactccagtccagggtccagggcgagtccaacattcagaaattcaacgatgctctggcgaatctcaaccagacgttcaccaccctggaaaaccgagtcggcgaaaagctcgcgcctgcgttcaccaagctgatcgaaatcatcgacaagatagtccaggctattcccaatgaagtggaaagcttcgcgaaggacaccaaatcccgttgggaagatggagtgctcgggaaggcgaccgttggcagtgatatcctatccctcctcagccccggcgccctgctcggtcgcctggcagcgtgggggactcgtcgcggcatggaagaatcagggctcatcgacaaggacaaggttcccggcgctcaaaccagcgaagacctggccaagaaacaagaagaccaggacaaggctactaagtccatgaaagagctagagaagctggctgaccagaccacgaagtctaccaatgattttgcggtggcgatcaacatgttcagtggcgcggtatcgtcgttcgcgaatgccgttgacgagcgccaagcttgggcagcctgggcgggggaaattggtcgggcggtcggtatgggaagcaccgcgccgacttcgcgggcaaccggcgtctatccgcacgcgatctatgatcagtcgaagagtggcgcggccggacaagtcttcggcgagccaatcggcgcccagtctcttcgcaatcgcatgttctcgccgcagcgcaaggcagagccggtcaccgttccatcgtacatcaacgatatcatcaaagatgcttcgaagatgtacaacattcctgagctggacatcaagaaactcatatacaccgaaagccgattcaacgccagggccaccagcgaagccggagcgaaaggcctcatgcaactgatgccggaaatcgccaaggcgtatggtatcactgacgtatatgaccctcgccagaacatcctcggcggaacgcgcctactgcgtgaaaacctagatcgagcaaatggcgacatgcggttggccttgacatactatcatggcggactcgatccgaagaactggggcccaaggactcgcgcatatccgggtttggtaatgagcgctccaatcgagctgatggaagaggctcagcgcaagcagaaggctgcggccatgaccgtcgccaacgagacgttcgccccggaaggcggcgacatggacattcgtccctatgatggcgggcgactggaaaccccagaccagggcaagaaggaagatgagcgccgcgaagcccgtcgatatgacgacagggttgtgcgaccggaaattcgcatcatcgaccgcatgccagaccgcagcgacggcgaaatcctcaagatgtctagacgtcaagaggccgaccgggcagattctggattccggaagttcccgaatcaagttcgcggcgagaccaagcagaacatccaggctcaactcactgcaggagccatcgcgcaagtgatcggcgttaaccccaaccagatcatgcgccgcgaaatcagccgttctgacttgctgttcggatacaaccaagccatcctgggcaagcaacaggagatcaaggccgccgcgaccgaagccaacaacgtattcctgtctccagccaagcttgccgaagccacggccaaggtgaacgccgcatcgcgagaaatggatattctcaggacgtacggcgagcaacttctgaagagcgctccagagcgcggccaggagctgaccatcggtcggatcgacatgttggtcaacgtcaccggcgcgaattctccggaagaggctcgtgagatattcagcaagcagactgcagaccagctgactacggcaatccaggacgctcaaaacgattccgcaactaagatactctactgatgaaaaagagaattctgcgagtaacattcaacatgccttatggacccgaagtcatccgcgaagatctggatgttcgggtccggattatgaaggctgcgttgcggattcagaaccgggcgacgatggaaattttcggcctcaccactcagctgcgcgagtctcttctgtcgcagttcaccgcgtggaagcaccggcaacgtcaagtgggcagggaagatgaattgatgatcaaggtgtcggtggaagccggctactctgaccaggggcgcgagcaagtttccagagtctttgtcggcgaagttgccattgtcgatatcatttctccgccacctgacattggaatccgcatccagtgctataccaggcaaatcgacaggacgaagaccattcggaatatgccgcccgccaacacgacgtttgtcaagttcgtcgagtggggcgcgaacgaaatggggttgaacttcatctgcgataccagctacaatgatcaagttttgaagaatccgggccgttcgatcactgtcgcgtcggcaatcctggcgtcaattcaggatatgtacatgccggatgtggccgcgttcgtcgatgatgacgttttgatcgtgaaggatcgtgacaaagtcattcgtccggatgaagtcgccaacattaactcattcgtcggcatcccttcatggtcggaatggggtgtggaatttcaatgtctgtttgaaccgtcgattcgcgtggctggcggtgtcgcggtcgaatctctcatgaatccaagcgtcaacggcaactatgtaatcaccgctctagagtatgatttggccagtcgggatcggcctttctatatcaaagtcatggggagtccagcagcgtaatggccagggaaatcaaatcgttcaatatgttcggcgtgcactacaactcgcggcaattctctgcggtcgatggactcaggatgatgtcgggaatccatgatgttccgccggaagaattgctcaaagggaccgacgtgctggcccatacagaggaacaaccggaaggcgtttggcttcccttgatcgctgcgaacataaatctttatgtcattgaccgggcgaacgtaatcgctcccgtacaagtgcttgcgcttttgtctgaactggtcatagattggaactttggcttcctcaaagattggacaggggtcaaaattccagcccgatttgtcgaagatatcaagagtgtaaaaacagcccattcaccttctgtggtcgcaagtttggtggcgaatgggtcagcttctatgcgcgagctggaagaatattattcgactcaagatgcctttaagatgattgacatcatgacggcgaagagcgtgaatgaggctctagcgtccgaagcatcacagaacagaatcaaaaagggataattcctaagcgagcctgggaaggctatactagacctgccaaatcagaggctttcccatgtccaatattcctttaacatcagcaaaatctaccgacagaacgcgactgatcgccgctcttgacgctcggtcgcggcgggacgcgctcgactttgaagtcatgattcccgcccaggttgttcaatatgatcggaccgaaaatatcgctacaatccaacctctcatcacctgggttgatacggaacacaatgccgtccagaggcaccagctggttgatatcccggtgatttccatgggcgctggcggcttccacataagtttcccgatccagcagggggatatcggctggatttacgcggccgaccgcgacacctcccagttcttggagtcgctatcgatgtcgaagccgaacaccggccgcatccacaaatttgagcatggtatgttcataccggacgtattccgccgatataccatcaattctgaagactcggcagcgatggtcatccaatcgactagtggagcgacccggatttccattcgcggcgacaacatcaagatcactgcgccgtcgaatgtcaccgtagatactccgcaggcgaatttcactggaagtgtgactatcgccaacaccctggttgtaaacggcgtcaacgtgaacaaccacggccacctcgaaaacaatccgcctgatgcccggacgaaaggcggcatgattgcctaaggagaatttcatggctagttttgatttttctgatttaacagcgggggggggttgtaatggctaattatgactacatagtagatactggagtcatagtcgccgataccgctgacgttttgaaagacgttgaagcggaattcagagcggccctcggcgccaatatcaacctggcggcttcaacaccccagggaactctggtcgcggctgagaccattgcgcgttctagcgtgatgaggaatgaagctcgcattgccaacaccatcaacccaaacgtttccttcgggacgttcctggacgccatctgtgcgctgatgggaatcgagcgcggctctgatctttcgacgttcggctatggcgtccaagtgaccggccgcagccagacccgaatttccaccgggtcgcgtgtgcagactccggccggagcgattttcacggtcatgagtgacgttctgattccggcaaccggagtcgccaccatcgacgtaaaatcgcaggaatatggaaacatccctcttcccgtaggaaatctgatcatcatcgatggaaccatcggttgggccggagcgaaagtaatcgcttcaactcgcgtcgatcctggcagccgccaaatgaccgatgcagaattgaagaatgctcgcgtcaatcgtttggcgatccaaggtcgcaactcgactttggccattaaagcgtatgtcagcgccgtacccaatgttacctcggtcaacgttatcgaaaacaataccggcacggttcaagttgtcaacggcgtatcattcacccttccgtatgcggtctgggtctgcgtcgccggaaatccggataaacaggctgtcgcagatgctctgtgggcagcccacaacggcgggactccctgggactatggcgcggccaacaacggcgtcccggtggatgggcctactggcgttcctgttcgcgatccggcatccggtcgaaagtatgtcgtgaagtggactactccgatcatgtatgacggatatgtaaacgtcaccgttcagcaaggctcttcctcggtcgctccggaagcaatccagaacgcagtcgtgaattacgcccaggggaaagtggagggtgaagagggattggtcgtcggcgcgagtctgtctgcctttgaagtggctggggctatcgctcgcgagattcccggtatctacatcaaactatgccaggtggcttgcgtcccggctggatcgccggccccggctcccggcgacttctcgcctgaatacgtcatgagcgcattcggtcaggctaccatttcggttggtaacgttagggtgactttcgtatgactctgcctgcgtacaattctgatattcaacaggcgctgaagtggctccacaaccaggcccctgggatcaccggcttggttcagcgaaaggctcaatggtatgatcgtttcagccgtcagttttgggtgaactgggagcgcgacgttttcaacttgaagactgccaacccgttcggccttatggtgtggtgcatcatcctcggcacgccttcgaaaggcttcggcctgtatccaaaaaacagctcttgggcgttcggtcggctgcgccagaacttcgtttatagcgggaatcaggttccgccgcctgcagacgcatcgccgggcggcaacttctacggtggcggcaatgccgaaatcctcaacttggacgaaatcaggaaagtgcttcagctaagatatgtagcactgatttcgaacggctcgattgcatatatcaatcgcatgcttcgctacatattcaacgatgatgagccgtgggacgaggcgaccgggttgtacttctatctcatggactcaaccggcgagaatggacctgtggagaacttggccatatatcggaaagattgggaagggatggttttattgtctagctcgcccaggacgaaccatgtgctgatatcgacccctgccagtgacgctgattggcctggtgtcgatccggccgcgagcggccgtccggtaacggtcgaaacggcgtccgctacggccccggacggctccgctacggtgtgcaagcttactaagccggccgggagtaccgcctacgtctccgcgccgatagatgggccgctggggtccggtagcactgtaacgttttcgttcttcgcgaaggccggatccacccgtttcattgcaatccagtcggctgccgatttccccagtcgagccgatgccgttttcgacctggattccgggaacgtaatcagcgatcagatgctggacagcagcgtggtaagcgcccgaatgattcgtctggaaaatggctggtggcgctgcgttctcacgaccaaaaccgtcagctcttcgttccgcgctgcttacgtcgccccggcagaaaccaacttcagctggatcgattcgaattccagcacggcgattgacgtgcttatctggggcgctcagatcgaactgggtgatactccaaccggatacttggagactaccggggcgcccgtaaccatcaccgattatgttttgcagaacacccagaccggaacaatcaagttcacacagccccttccgactggagcagaagcgtattggactggagactggaaaggcgggtctgagaccgagccggccagattcgcagtaggggatgggactcaagatacattcaatctgtccagccctgcatacatcggcctacccactagtggggcgttcaagctagaatacagagttggtccggcgcttaatttgtcgccgcaattgatcaacctcatgaatgaccgggcggtcggtatcatgccgacttgcgccggttgcgatgtaaaagtcattcaggagtaatgacgtgatcacacccgaactgatacccagtccgtttgctgcgcagggcgacaaagacccgatcccgcagacttcttccactggcttcgctaaccttcgcgacggctacacgccggactacgaaatcagcctggcgtcgaacaacccgcaggccaaagcggtcgagcgaaagattcaaaaccaactcttcttcatcgcgacccagaacgcacaggcgtggcagcggcaaatggcgccgccgtggtttcagggcatgcctggcggctatgaacagaatgcagaagtcgtgcgcgtcggaaatgacggcataatgcggcgttatcgttccatggtgaatgccaatgcgagcgaccctctcagcagcacgacttgggaagagcaacccgcatggtcggtgatgcgctccaacatcccgatgccggccggaggctcaggcctatcttctggcggagaagtcatcacgaccggccgcaacttcaacgacctgttaaatgggacgtgggagttcttctctgattcagtggttgtcgcttctcagaatgcccccgtatatccggcttctgctggtgccgctgctggcatgttggaggcgaaatcttgggtgtccggggccaatacgttctgcgtccaacgctacactgatcgcgtcgggaacgtcgctgtgcgcgggcttaatgccggagcgtggaccaactggatgtatgcggtaaacgtcatggcccttcaacaaggtcgggtcacctatggagtcgcggccggatcggcgaacgcttacacgttgacgctagttccgcagctccaaggcggcctggtggacggcatgatccttcgggtcaagttcaacaccatgaacaccggcgcctccaccatcaacgtctccggactcggcgccaaggccatcgtcggcgcggccaacttccctctcaccggcggcgaacttggccaaggactcatcgctgagcttgtattcgacgcagcaggcgaccgctggagaatcctcgcaggcgcgccacgcatccaagttggcaacgccgatcaagattaccaggcccccagctggaaacaggtgaaggattacgtcgcgtcccaaaagctgactgaagtggactgggctgacgtcgtcaacaagccgaacgtcgctatccaagacaccacgccgtggttcgccaatctggagctgtccgatgctcggcctttcatcgatttccacttcaacagcaaccgcgccaaagacttcgactatcgctttatctctgaggctgatgggtcgatggcattctattctcgccaggggtctgccagtcctacccaggacatcctgttcagcaggtcgaatgtaacattcctccagccgcgactggatgttgcgaaaaacctcgcgtacatcgccaactctggtcccctttggcagaacaccactgccgatcagcctggttggaaattcaccttcgcacaaggtgtggacgccaacaacaacgcggttatcgcagtcaataccaccaacccggacggctcttatcgctcgcaggtcatgcgatgggactgggcgtccacgaacgtcatattcaacaaccgtccgctcttcgccggtcaatacaccccttgggattctgggaacttcaatccttccaccaagttgacggtgaatgccgtgaaccaaatcgccggcccaaccgggattcggaataccaacggcaacaccggcaacatgaacacctggggttccggctccacgacggcatcctatggcaatgctgccattcaaatcttcggaaaagggggcggtgagcctgccgcgatctatttcgacaactcccagaccggatggtatctgggcatggacaaggatggacagctcaagcgggccggctggtcgctcggcaacaactcttatgtcatcacagatgaattcaacatcagaaaccatatcaacacaatggctgcgcgcccgatttgggggaatgtcgagttctggggtccgtggaacttcgatccgaatcttaaactcactttgaacgctttcaatgatagctcattcaccaggatgaccaacagcggcgcgaaagacgttggtatcgcgtccatgacgagttatgctgatgcggccatgtcattcttcaactatgaagcctcgaatccgaccgggccgcgcgcggccgttatttcgttcgtgagaaatggatcgcgtggagtgctattcggcttggattctgacaacaagctgaagtggggcggatattccctaggggacgtcgcgttcgagattgccgactccaacaacctcatgagcctgtggtcatcccacgctgccgcgccgaactggaacgggcagaccatctggaggtcgggaaacttcaacccagacaccaaggcgactttggcagctcgcaatacgacgtcatcccctacaatattcagttatggggcgtccggaatcgcatcaaccggacaggtcggtgcgttggttgtggaaaacaacagcgtcaccaataccgcagccgccatcacgttccattcgccgcagaaatatcaggtcaacttcggcctggatgcggacaacgtggtaaagatcggtggcggcacaatgggcggcgtagcatatcccatcatccactccggcaactacaacaactacatcaaccaggcgctggttcaggtgggtcttggcggagtcggttcctatggaattttcgcggttctggataatgccgctccaaccgcaaccgttcaacccggagtggtcgtggacggttccattctcatctactcgtcttgcgccgcaaactacaatagcggtaaaagacctgccggaacttggcgctgcatgggatatgtagtcaaccgggatgccaacacccctgactccgcgacccttttccagcgagtgacgtaaaatgaaatggacgcggatcagaaacccacgttggctggacgcagtaaacatccacgccatggtgactttcgagggaatcggtgaagtgccgttcaccgccaatccgcaagacgtggaggcccacggaagggccatctacgctgcgattctatctggggagcacggacctatcgccccggtcgattcgaagcgggagaaggccttgcaggacgctatacgagccagggaaaagcgggctatccttcgggatacccgctggcccatagatcgccacgacgagcaaagacggctgggtatcgaaaccacggacggccctgggctgatcgcagcccttgttcactggaggcagcagattcgcgattggaatagcggggatcggccgcgacttcccatggctctgaaaacaatgttcaaaaatcaggagtattgatgaaaatcacgaagggtgttctgatcaccggaaccgggtgcaccacggatcgggcgatcaagtggctggatgatgtacaggcggccatggacaagttccacatcgagtcaccgcgagccatcgcggcctacctcgccaacatcggcgtcgagtccggcggactggtaagtctggtggagaatctcaactacagcgcccaagggttggccaacacctggccgcgccggtacgcagtagacccgcgagtccgcccgtatgtcccgaatgctctggcgaaccgcctggcccgtaacccggttgccatcgccaacaacgtgtacgcggatcgtatgggtaatggctgtgagcaggatggtgacggttggaagtatcgcgggcgcggcctgatccagctgaccgggaagtcgaactattcactgttcgccgaagactccggcatggacgttctggagaagccggagcttctggaaactccggccggcgcgtcgatgtcttcggcctggttcttctggcgcaatagctgcatccccatggcggagtcaaacaacttctccatggtcgttaaaaccatcaacggcgccgcgccgaacgatgcgaaccacggccagctccggatcaaccgctacctgaagaccatcgccgcgatcaatcaaggatcctgacattcgcccaaagaaaaggccgcttattcagcggcctttttgctttctggctttgcctcttcaaccatcttggcctcgaccggcgcggcggactcctcctgagttaccgaatccacatagttccctagtgaactcagaacgccgattaacagcgctcttactaccttgtccttgactgtctcgcctatgatcttggtcagaacggatattaactcttcccggagtctggggctgattcttggccgaaagcgcttgcgatgctctttgcgtttcatgtttagtcctctgtctgcggtcttctcctcaccccgataatggcttggggatgcgttgtgttaatcggaagggtcgggcgctattataacccgtcgaaaatgctcgcgcttaactgtttaacgatacgcaccgcgatactaaatcgccttctttctggccaaggaactctggcggcctggtccggtctaaggcctaatttgtcgacattaaaacgagaaaacccggatcgcctgtaggacaaggcgtccgggtttatttcgatctagtgtacgctagaatcagtggcttccgccccaaccgtccagccagcaatcgaagacggcgtgtctcggcttgtccttggcgccatgggagaagtgcttgaaccggatgacctggcccttgagatgctccctgtcattccagcggcgctgtttctcatcgtgggtcaggctggaggccgacacgttgaaggtgactccaggccacagacgttcgttgcggcagacgaacgcaccgaccattccggacggcgacaggttttctgcgtggctggagcgggccgtgtggccaagttcattgatgaaagcttcattgttgttgtgcatcaactcttccacgtcgatgatctcagcttcatcgtagtcgtatcgcttgactttcacacagtgcccttccttggcagtcgagcgaccgaacttgtacagtccatcagcgcgcttgcccatggaaccttcgaatcccagcattgtgtggcggcgctcgacttcgctgaactgttcgatggaagtcaccagttcctgctcgaccaggtgaatcctctcatagccgaggcagtgacgaaggaagttcacgcgctcggccgccctggctaggcgatcttcggtcggtgcgcgaggatcggtgaaatcatcgaacacatggaaagaccagtccggctcaccgctgtggcggcgaagatcgccggacgacttctggaaaactttcgggtcgctgatgtcgccgcagaccagctcgccgtccaggccgttgaacagtttatcgctgaggtattcgtagatcgattgattgttctgccgcttgagttgacgagtcagcgcctcgccttcgaatacgaagcagcgaaatccatcgatcttcggcgagaaatacatcggcagttggccttccagcagcttcgggtcaaaattcgatgcgagcatgggtttcatacagttctccagaaaagaagcccggcgaaccgggctaaatggcggtaagccggctcagatggtttcgttggcgtggttcagttcggccatgatcgacgcatagagctcatccgactccttgatgaacacgccgtcgtacatgacgcctttgcgatccttgatggtgtcgtaggcagcagcgtagcaggcgagcatggtggtgtcatgctcttccgtcacgtcgaacagagtcatggcggccgataccaggctcttgatggccaacccatgatttccacgtgccagagcgcctgccagatcgccgaggcgctgcaaatcgtcgccgtaggtgggatgtacttcgccgctctcgatgaaggccgacagatgatcgaacagattttcgccgagttgcgcggccatgatcgtggcaaccaccattacgtcgccgatgccatctttcacatcgaccgggttgttctgaacccaggcttcgcatacttctgcgaactcttcgaccaacttcaggaattgatctttcgcagacgagcctttgatcaggttacggtcggaagcccatttaaccaccaggtcgtgaagttcgcggctcatgatttgttcgatgttcattctttcgattccttttggatttgggatttgactgcgttgattatggacgccgtgctctggcgcgatccatccttggtggtgccgaagtagaaggccattaccgacttcagctcggcgaaccaatagccgatgatggtgccgatggcgaccgaggatgtcgggtccatcagagcctcgcggccgaatgtgaagattgcgatgatgatgagaatggagcctgtcagaagagcgaatgtgatcgccgggcgaacgaaatcgttctgctgcgccgcaagcctcctcgcagaatccctgtcggccgcctctgcggcgaactggctaagctcggcctggagctggttctgctcagactgaaggcgattttgttcggcttgaatcgcaagctcctggagacgaacgcgctcggcgctctggagttcggcgagacgcgctagagcttccggattcgcgtctagagcgctagcgaccgaggctgggtcggccttcgaccccagcgccgtcgcgacgatagcgccaacggcggcgcctgcaggcccacccaggagcgaccccagagccggggcagccgcgccgatcttactacctatgtctttccagtccatttcgactcctcaaaagaaaggcgccattacagcgcctttctccggccggtgatttagaactcttcggcttcggtcgcatcgccgacgccaccggcgtcactgcgaggctgttcctgcttgctgtagtccaccttcacctcgccgccgacgaacgacttgtacaggtcggccgcagccttgaagtgatccgggttcttcaccaggccttccagctcgaactggacgccggaccagctgcccttgtcgttcgacatgcctacggtggtcatacggaccaggttggcgaaagtcggcggggtgcgcaggccctgcggggtctgaacctttttctgggacagcgcggtcatgagcttcttcgaggccttgatctgcgaagacgacagggagatcagagcctggccgaaatcgccggtgtccggatcgatgacgatgacgtaatgaccacgggtgtcggcgaagtagtcagacttcttgtcgctgaccgaaccgtcttcgttcggcgcgtacaggcgtccttcgacttccttcaccttggtcgggtctttcatcatttccttgaagtcttcgacgctgatggcacccttgaaaccgccctcggcctcgcgaccggcccagcggatgaactcgcggcggtacgcggccggaatgatcagcaggccggtcttgccgtcgtaaaccttgccggtgacggtgttcaggaacatgccggccttcgcgccttcgatgtacttcgggtcatcttcatcgacctggggagacatcttctgcaaaacctggatgaaggggatggcataggactcggcatcggcgccttcgaagcctgcgccgtcatacgatcccaaatccatgaagtcgggaacttcggtagtcgcgacggcgccgccaccggtggcaactgctacggccttggtttcttcggttgcttcggaagtttcggttttcttaccagccatgttaggctccttgtttgtcgaatttcagttatcgctaactgtgggtttataataacggaagttgcaactaagtaaagcaaattacatattaagatttgctctttttcaccttcggtttcgtgatcttggcctctttgtattcgtgtacgccgatgaaatctggcagctcttcgcccttctccaggtactcgcgaccgaacgcctggagggtctggtaatggacatcgcggttgatggtggcgtcatagccggcttcgatgatggcctcggccgccttcttcgcatcttccatttcgccgcgaccgaattcggccagaaccttggtcttgatgatgccgtcgttgtcggtgtcttccagccacttccagaacttcgatttgttctcttccttgacggaaatgatggccttcggctctacttttaccgtgcgaccgtccgccagagtagtggtcttctgaccaagctcctccaacagctccggaatggtgttacgcttgagggtcttcagctcctcttccttttcggccagcgccttttgaagatcgaggatttcgccgtccagctgcgaagccttgtccaccaagttcagcagtcgatggccgatgtcggtggcttcaaccgccatttcatccatgacgccaaaatagtcgatttcgcccggcgcgttctctttcaagtattccgggatttcaagctcttgctctttcatgtccgcctccaacttagtgatgttcccttacttgaaccaagtattgagtagatattatgccgcatcttccttgatacggctactgatttacatattaaatttcgtcgcgagtgctaacgtcagcctcaaacacgccatcaacgacataacttgccaggttgcgtttccactccaagctgacctggattttctcgtcgatggaatccagacagatcaggtcgaagtacagaaccgagttgacggtgccgattcgatgatttcggtcttcggactgcatccgcagctcgttgtcttcgtcggtcgtgtagtagatggccacgtctgcggctgtgagtgtgatcccgatccctgctgcggccgggttgcccaggaacacctggacgcgcttggcctggaaatcgtcgatcaatttttcccgctcggcctctttggtctcgccgtagtaggtgccaaacgaaatcccttgggcctccaaatacgccttgatctggtcgatttcctgaatgcgcatggcccagacgatgatggaacgctccgggtcttcctccagcagaccctccagaagatcagtaaacacggcgaatcgcgggttgtcttcgggcggcaggatcaccggctcaccatagacgttgatatagccggacgccacttgcttgagcttcgagcgcgctgccgcagcatcgaaagatacatcaagcatgaaatcttcgttctggagaacaaagtggtagtcttcttccacgcgctggtaaacctttcgttgctcaggcgacatttcgaagtatatgcgcttgtacactttgtccggcaggaatgggagtgcttctttcttcgttacacggaaactgtgcggctcgatcagggaccgcagcttgtccaggttccggaataccgggcgcccacactcgtctttttcgaccagttgcggcggcatggtttgcttcccttccagcttgcgcatgatagcgatcattcgaggatcgtcactgggcaccaagacggaaaattcggccacaaacgcccgataggatttagtccccagaattccattccgcaagaattggaactgcatgaacaaatcggtcggtgcccgcgtcagaggagttccggaaaggatgcgacgggccacggccttctcgcccagctttacgatctttttcgcacgcttggcttgtgggtttttgatcctcgttgactcgtccacaattgcgcaaactttgaatgtatcaaggaatcgctcgacctcatcatagccagcctggtggttgattgcgtcaacgttgatggcgaagacgcgaagaactttttcatctgcgaacgtctcggaatacagacggtccaagcgcgccctggcctttttggaagtcggtcggccgcgccaatccacgctcaaagtcttgatcgcgacgtgggtgggaatctcgcgcagaatccagttggtgtggacgcctttgggggcgacgatgagcagcgcgtccacgcgcccctgtaggaagaggcgaacggcatcggccaaagtcgtccaagtcttcccggtgccctgctccatcaggtatgcgaagttccgtttgttcagggacgctgccagggcattgaattggtgctgcatggcctcggtcttcatgcccttgacgggatatgttttggctttcatttgttctccaaatcggcgaggaactgaacaatgttatccagtccttctgcatagctcgcaacttccaccaagtcgcggctgttaagctcgaacaaatcgagcataggattcagcagcagccaatcggttccgatcttggccaggacgaagccccggccaccccagccgatccgctcccgaagaaaagggatttgcccaggttcgaaacatctggccattgggcaggtggaagcgcgtttcggccactcctccaaagccttgaactcgacccagaactggacacctcgacgattcaggcagatcgaatcggacatgccagaccgccgcgtctccagaaagtcgatcaggattcggccgagcgagcgctgcttaaacgcattcgccgctttcgtttcgcgatcattcatcaccttcgccctctttggaaactttctctgcttgcgctgccagctttgctttttcgcgttcggtcaaaatccgcttgacggccttcacgatgaacatatcgattccgctgagcttccagcctttgatgaggaaccaagaacctgtcggcgtcccttcagcaatctgctttccgtattgcagatatttttcaggccgaattctgaaacgtatcggctgatcaaccgagtcatcaacgcacatgatgtcgagaaactgcgactggcccttgtacaccgggtttttcccttgatcggccctcttcttctggcgaatcggttcgttctcatcagacagaacttttttcaccatcttgacaatgaccagaccatcatctccatcgcggatatcccgaatgttccgaatggggtttccggaagttactccaaccagctccggattgtcataagcatgaccccagagcgtgtgagcttcgttcaaatctgcgaattgaacttcagaattcgacagactcgcggcgactttctcccaatcctgaagcgtcttcaggtgggtgcctgccagctctttatattgagccttcagccccttaagatcggccttcaactccttcagatcggccttcaacagtttctccagttctttgtcttggctgattttcgccgaaagaatctgggcttccagagctgctacatcagcagccttgtcctcaacatcctgtgccgatatcgggcaattggccagggcgatcctcgcggccttgacgtcatcacgaaggcgcaggaacttctctgccttcgccgggccaaagcctttggcgttcatgatgccgccgatcaagcgtccatccgccactacccagttaagttcggaatgctccgggtccagggccgtatattctacgccttccttggccaattcgcgaaggatggacacagtttgctggtcgtctttcgccgcccgaagacacgcggccgcgtattccaggcgatgatatcgcttcatgtagcaggtccagtacgtcaccacagcgtagctgaccgagtgggagcggttgaatccccaggcgccgaaagtcaccatttcctgccacacacggtgagcatcgtctggggcgacgcctatggtcttggcaccctcgatgaacaattcccggcgcttgttgaagaactcttcaccctttcgcgcagacatggctttcctgattgccgatgtctgctcccagtcgaactggccgatgtccttgacgatggacatgatctgttcctgatataggaaaacgccgtatgtccctgacagatattgctcgacctgcggaatggtataggtcacaggctcgcggccggccacgcgctcgatatacttggttgccataccagaagacaacggacccggacgggcgagcgccgtgatgtggtcgatgttctcgaacgcggtgatgttgatcgcgtttgctaccgagcgaacggcctgcccttcgaactggaagatgccggacattttgtcttcattgagaacgtccagaaccgccttgtcgttcaaaggcaagtcgtacaactcttgcgcggtcacgcagttcgcgtcctggatgactcccaaagttcgaagtccaagcgcgtcaattttgaggagattcagatattccgaatcgggcttgtcgagctgcgcaacgccttcggaagtcaccgtacagaagtcgatgacttcatcgttgcagaccaggatgcctgccgcgtggacgccagagtgggatgggtgaatttcgaggtcgcccatgcaggcggacgcgatctcatacttttcacggaagtcgcggccgggctgagttttttcgaaagtgtcctccaatccttttccatatcgttcgtccgctgatgtatattcgatgatcgagtttttgatgttgtcggtatcgtggaaggggatgccgaagcgctttccgacgtgagcgataaccgacgcggccttgagtgtgttgatgttacccaacttcacaacgttccaagtgccatacttctgctggagatattcgaacactagatagcgatgggtatcggcgaagtcgatatctatatcgggaagatcggaacgggaaatgtcgataaagcgctggaagagaaggcgatgcgggagcgggtcaacctcggtaatgcccaggaggtagcagaccaaagagccggctgaagagccgcgagccgggccgaccagcatatgcttcttggcgaacgcaaccagatcggcgaccaccagaaagtagctgtcgaagtctttcagctgaatctgcttgatctcttcttggaatcgatcctcatactcctgggtccattccttgatgtggccgcgactgaggcggtaggcttgcccctcgcgagccagagcgacgatatcaccatccaagtggatcatcggcgccttcgccagtttcacatccgccaactgctcgactaccgcacgagtattggcggcggcggcatcgaactcttcgcgagtcatgatgtggcgtaaacggctccacaactcctcttcggtggcgatgtggcgaaggccgaccgattcccgcaccttccaggccgacgcgaaatcagcatggtcgatggacggcatgtcgttgtaagaggtaatcaccaccggctttccgaatgctctggacgtctccatagcaccgtgcgcggcgaccatcgacgcgggattgatgtcaatgtagtcgattccggccagatccagatgggcataggcctcgccagcgaatttgatgacgccgtcagcttcctggaattcttgcggagtcaatccttgattctggaccgacttggaagtcaagcggtagaacttcttggtgtccttggcgagcacccaggctttgagcttcagctctttctcgccatcgtcggcgcatttgatcgggatttccatgccgaatccgcgaggcagttctgccttggcagcggcttgttcccaacggacgtggccccatgttccatcatcgacgatggcgacgaatggggattcgatctctttggcgcgctcgatgatctccgggaatcgaccatatgcggcgccgtaggagtaaccagagcgaacgcggagctgagggaaagacatcatgcggcctccattgcttgatatgcccgatatacgcccatgcgcttgcaaacttcgtggagcagccgcacgtcgtcgagcgcccggtgtttctgtacatatgggccgcagtagtgctcataaagatgctgcagccgcatgcggtggccgaacaacggcgccgactcttccacagtacagatatcgagcgatgggaaattgacttcgtccaggccgagcttgccgcgagccagatcgcaggtaagcatgaacttatcgaatggaaggttgtgagcaatattcgcgtcggctctggaaaagaagtcgcgaactttctgacgctgatcgaggaaagatgggtgcttgatcagatcttcgttcttcaaccctgtgatcttggtgatgatttcctcgataacgattccaggattgcagatgaactctacttcatccaaaatcttttcaccatcagttatcacgccggcgaattcgatgatcctcggctgcttcctcaaactcaccctctggtggaacgggagtcctgtggtctcagtatcccacacggcgaatatcatgtttgttccctcttatgtcgaaagggccggctgctttcgcgaccggcctgaggagtataccgcgacggctgaagatttacgccttctgtccgtctttcggcgtgatacggccggagcgcatggtggcgtggacaaacgccgaatagttgatcgagtccaaggccgaatcggcatccttgaacccgctattcgccaggcgagtgagtttgcccaccatgtgcatcacgaacagggcgagtcgatggtcatcggcggttttcgccaccaggccgttcgggaagaggatttccatgatctttccgtacatcagatcattgcgaccataggtgctctggcggtcgcggaagacttctgctgcggcgtacagattgttgagaacatcttccgcgaaatcatctggatgggaatcatcttcgcccggccagacggattccatggcgaacggcgcggcgtcttcggtcgggtcttcggactgagccgtttcagcgagcggagacggggctttcgcaaacgcctcgtcgagggtaggggcggagttcggggctgccgggaacggctcgtcgagggtaggggcggagttcggggcggccgggaacggctcgtcgagggtaggggcggagttcggggcggccgggaacggctcgcctgccatgtcgttgggcgcgctatcggggtcgctatcggccgcgacggcgaagaacggcgcatcgcaaccttccaggttcaggatgtaggagtcgatccccaggctattgtaggcatcgatgatgtcctggcgatcatcgaacgccgcgacgatcttggtgacgccttcgattttcttcagtatgtcgagcgcgactgcccgcttgaactgaggcgccggctcggtgttaccatacggccgcatgatgagttcatactcgcgatgttcggcgatgccgagttcgcggtggagcttggccctggtctggaaaaagtggttgtcggttcggccggtgacgaagaaaatcatgaggtcggcgtcgatggcattcctgatgcgacctacagcgtgcgggttgagagtgtccttgtcgagacgagaatgatactcgtcccattgccgttccaaggcgaagctcttgcggtggctatcgtcgaatacgcagccgtccaggtcgaagatgatgatgccattctttggtttgcgttccatattcagatttccttactggttgctttctgggtgacggttttatcgatgaacgtcccatcagaagtgaggcggaaaacttcgccattctggatgaaatcgaacgattgcacgttcatcgtgatgcgaatggattcgctgccgttggtcacttcgacttgtgcgatgtcgccaactttctcgacaatgatcttcatgttacatggacttcccattgacggccacagggttggcctcttgtttttccgatccccagaaatcgcggcgcagttcttcctgctcggccgagcgatccatccaggggcgatagaacttgcactggtagataggttccaacggaacatcaatcacaggaatctgacctggctttgtctccagagcggccatgaaccggtcataggatttctgctggatttcctcttcattcatcaccttcgacccatagcgcgggaaggcgcaggagccggtggcgacgcagtgcggctggagcaggctgtcgaacataggatagacttccagaaccagccggcgcatttcgcggaatacttcctgatattcaccctgggtccgaacgcacaggcgaaccttcgccatgtcgctgagagtccgcagattgaacttggccgcgatcttcgtttccatgttggaagggatgatggcacgagcgtcctggagcgacgcgccggcctccagaagcttctggtagctggtttgcgcgtcggcaatggcgtcatgccacagacggttcagctcttcgcggacatggtaggtcgggtcaggctcgccatttaccgtagccggttcgtcgaattcccagcggaaggcttccggctgaacgacggcgctgatttccagagcgcgactggtttcctgctggtaagccccggtacgggtccgaacgagttgatgggtgaagttcttgctgacaccctcgatctggaaaatgaagtccacgaactcgaacggcgagcggatggtgtccagcatgtacttccagtggtcaagcttttcggcctcggtcatggtcgccgggtcttggccgcgcatgcgagtggatttcgtccccaggagaagttcccaggcgttctgggtgtaactgatcagagaaattttcatcagaaatcttccggaattggcgtgaagtggaattttttggttagagccagggccaggccttgggcttgctctttacgaaggccatactgctctatctcttccttgagcagttcgcaggcctccagacgcgactcatactcttcagcctcctgaacggatgagaaaacggttccatcagaggttctgtacacaagttcaatcgacatgatgacctcagtagcagcggatgatttcggcgcggatatctcgacggtcgaggtagtgctcacgaatcttatcgcgggcgcgctcggcctcttctcgactgccgaacgacaggttgaacgaagtgaaaggcttatcgtccaggcgcccatcgccaatcaggtacaggatgcctaccagcacgaaagacggcgctgtctgtcgcgtttgcggcgggtcgatttgcatttcgaggaaagacatgggaacctcttcaggatgatctggtgcgtacattaatagcgctcctgctgagcagctacggtttccggctcatagatgagcatgtcaacgatttccgggcactggcctttcacccagtcgatggccgcgaccagtgtggtggaagcggagaaagagaaagtgcggtaagactcatggatgtacggcgaccccatcgaatcgcgctcggtcgtgcgagaaatgactgctttgatattaacgatccggcccatcttcggcctccactttagcgattatatctgacaggctcagcttctcgccattcaggaaataactggcgcgaaacttcctgtcaccctctggcccgacgatccgggccgttatggtgagactcccgccgccaagggcatcggtgtccctgaagaaagccagcagcgcccgcttgagcgctgcctcgcgaggatcgacggccattaacctaccacgttccagccgtgctgagcgcaccaaaccgcaccggcccctgcaggaaggctattcagaaggaacacaggagtcaggcgaccgtcctcggtcatatgtatgaagtagcgggcgccttcaccgagccattcggccttggcgatagcgcgttcgagattggccttggtggcgtaggttttggtgtggttcttgtcggtggagaaggttacttcgcgggccatttgtcgattccttttggctgaagggtttcgcgtttcgatgagggaatattacgcccacctgatccagaagtaaagcacttttgtaaattacttcacgaacatctgcttggccttctgataagacgaagaagtcatcaggcgctcgatgacgtccatgtccgaaaccagatcatccagaaggacattgcgccaggtagcgaaccggccgagcgagaagatgccagcctcatgggtgagattccagatcatggattcgcgctcgtcgcggccgagaggaacgattttgcctttggtctggatggtcggctcgccgtcctcgattagctgtttccttctgatcccgaaggccgcgcagacttcatccaggtcccatgccggattccattcgatggtttcgatctcaccatcagcattctccaaaacgccattcgcgacggattccacgatcagagtatcgccggtgatggacgcgcgaaatgtcccgaagtcgggactggggaaataaacggtctggaagacgtcacaagggatggaaagcttgtatcgactcacgatgatggatgtgcctttaccgaatgacgggtcgatacccaggtccatccccgccgcagccaggttggcgcggaacggcgcggtgcttatgacattcacatggtcatcttgccggcgaaggtactggaagaaagaggcgtcgaaaggacgactccaagtgatgcggttcgccagcttggcgacaagctgctcatagaagtcggccggtgcgatccaacgcttttcagtcgccagattccagatggaccggtccgacaggccgcccgttactttcctggagtacatgttgcagtggtcgatgcgcggctgggaaatgaattcgccgtcgatgtagatagctttgtgtacagtgacttcgcggaacgggataccggtgagttggccaattactggcgagcggaatcgcaagagtgcgttgtgacgctccttgttctccggcgtcgccgcgtcgatgatttgggcttgagggaaacgatgcgcggcgatcaggccggcgagtccagcacctacgatgatgactttctgatcaggaatcatgatgtgttccttctgagtgtacaaaacttgagaggataaaaaagggacccattttcatgagtcccttgaagagctagacgattcagtctcagaagagcggcggcttactcttcttcaccatcggaaccgtcggcgccctgatcttcaccgtcgtgctcctggccttcatcaccggccttctcgtcatcgccctggccagcttcgtcttccttcgaagcgatggcaaccagatcgacccagcccatgacttccagcttgctcagatagctgcgaaccgaggctccatacagcaggtgtgccactttctcgccaaaagcttcgatttctaccggctcaccgacggcgcagttctcgttgatgtaggcaaacaccttgccgcgaatcgaaatggcctgcggggtgccatggccgtcgccggtcgggatgaagtgggtggcgcgagggcgacgcgagccgttggacttcagttcctcgcgacgggcttcggccttcgcacggcgctcttcctgctcttccttgcggcgctgcttctcggcttcgcgctcggccttcttctgctcggccaggcgcttgcgctcttcttcacgagcgactttctgggcttcctgcgcggccttcttctcttcggccttcttggcgcgctcggcttccttctcggccttcttctgctcgcgctcggcttccttcgccttcgccttctcggcctgctcagcttccttcgccttggccttttcagcgcgctcggcttccttggcggcggccttttccttcgccttctcggcgcgctcggcttctttcttctcgcgctcggctttgcgcttctcttcgcgctcggctttcttctgctcggcttccttggccttggcttcggccttctcggcgcgctcgcgctctttacgttggcgctcagcggccttctcggccttgcgcagggcagcggcttgttccttggtcagctcttcgccttgggtctgttcgttctggtccatgttcttactccgggaatgtttgaaaggatggcttattggcctgtgagaggattatctctaaactaattgaagaagggaatacctttcgcctgaacttctctaaatatttttctttcgggaaagtccagactccagggaacttatttatgttagcgaagtttttaactcttacgcaaaaacaacaagtattcgattgcgcgagttatcccagtatacatcaactgactataagggatggacggcaagttttcttctaacatggcaacccgtttccattctgaaccctgcgacttgtggaacgtcatcgcccagccgaagtcgaatccgccaatagccttctgcgcctccagccgcacgtcttcctcgaccgaaaagctcagagggttgaacttcacccatcgttcatagttcgtgccgataatgcgaactttggcgaacaacatttcatcaggctcgtcgtcatcttcttgcccttcaggaactggcttgaagtccagcagaatggcttgttcgccgttcatgattccatattcgtgctggttcccagtgcacaccagcttctcaccgattcctggctgcacgcctttgtagccgaggattcggcgagcgcgtgcgttcaagcgacggcgagtattgttgtaagcgcaaagaatcacaccatcgttgtccaggaacgtccgcatttcatcatccgacatatcgaagccggcccggaccactatgtcatcatactcgcggcagggcaggcgctttccctggcggacgaacatcgacgcccgaacgatattgccggcgttgcgctcgatttcggtcatgatggtatcacaactgttctcgtggaagatctggacgccgcgcacaggaggcacctggccaaagtcgccgatttccaggaccggaattcggtgcgacaggaggcgctcttcatcccactcgccgatcatggacgactcgtcgagcacgaccaacttcggcttctcgtcgagcgagtctttgttggcaaacatgatttcgccgtcttcatcttcgccaatcggccgatagatgaagctgtggagggtccgggcattggtgcagcccttctcgcgaagccgcgctgctgctttcccggttggcgcgacgaagaccgtccagtccatcgagcagcaaagttcggcgatgatcttcgcgatggaagtcttaccagttccggcgaaaccagcgagtcgatagacctggcggcggtgcgctcgatcacaccaaccgcgataccagtccacaacggaattgatcgcgtcgatctgctgactgtttggtcgaaagccgaatcgctcttcgatctgatcgacggtgaagttagatgctgacatatttgcgttctccaacgctaggtttaattgaatcgaggctcagtttaagcacgccgtccacagaccagccagtatcacgacgatacttgcggccttgcgggtcgacatagaagttcttcgtgcgccgcagcagaacataatgccaagcagctccaagcgcgtggacccttcctttatacgggaaagccttcgcctgctctgcggcctctttggccccagggagccagcggacggtagaaaggaccaggaccgcacccttaatagcctgggaagcggcgcggccgtcctgtgggctatagcgatgtctatcgaagtctacccagtggtggttgccgcgccggagcttgaccgttcgggatcgcccctcgaacaccacagtgccttcgtgagttaaaatatgttccgccatcgaatgttcctttataacgtacagttatgctttacctctgcgcaggaagagtatactatcagctgactcgccaaagcgagcgaatttaatccaactttacttcggcaggaaagtggccgatactagagccgccgcctgtactgccctccaaaacagaggatacattaaatgcaagaatgcaagatttcccgcgaccaactcccggtcggtaatccgaatcccaatgtcgacaagacccgcgacccgaaccttaagcccggtttcctgcgtcgcagccgcgagctggacccggcgctggccgttcgcatccgtcgcgagctgatccacgccgaagcatccgacttggccaaggccggatgggtcaattcacagtccagcctttatggatcgaaagccttcccgcgccattccgtcgttcgcgtgaccggagttccggaagatggagctttcatcggcatgctgatcggcttcatcgagcatcgcgagcatggcgaatgggcggtcatggaagccggaacgaaagaaggcggcgccgtcattattccagtcgatcacatcatgcgagcgtcattcgccgaagccgaagagttcgccgaaaagtgggagcggaacttggggtggcgtctcctgcgccaactccgcgagtgcggcgccctggccgggactgaagacgagttcctgcggcggatcatcaatcgatacgttcgtgatcgcacgatcctcgatcaccacaaagtcggcgcggacaaaacctatactgatgcagtactcaaaagcatcggcgaaacatggccgaagattccttcggggaaattcgtcggacaccgagtcgcgcagctcctgatcggccacaagctaggtcgagcggggaccatcctgaatgacctggtggacttcctggagaagttcgcggccgggcgcgataaaattctcaacatcgccatctgtaattgaggtgaatgaaatggttgacttggaaaagctgagtccaaagctgagtcctcggcagcatgccgttctactggagatgtacaggcatcctgagcatccagttcacagatcgccaacgaatttaactcttaaggctttgagacgaagggggcttgtcgagctatcctggaaggattccgtggctggatatatgttcggtcgccaaccttgctggaaaataactgatgccggcataaggcgaatcctgggagtgctggggaataatatggaaaaagaacaaagcgaagatcgcccaagcatccctgagtttgagaagaccgacgccaacaaactctatgatgctctggagacgatttcgctgctggagaagaagttggacgaatccgaaaagcgcgggagcgagctggccgcgagctattgtgacggcgtagtcggcgatgaatacggccatccttattgtcgttataaagtggaacgcgacgccgccttggccgaagtagagcgcctgcgagaatcaaaaggcgatccctctggcagcttcgacaggtgtatgaagatgatgtacgagcgcgacgagaatgcaaaacgactcgacgccgccttggccagggtcgcggagctggaagggaagttgacggactgggtgcacgaagggttccggctcaacgaggcgctagcggtcgccaaggctcaacccagcgtgccggaaatatctggcatcggtcgcgatgccgaacatcccagagctgtagtgctgtatctgcgtaacgaacccagcgatgaagatatgcgagcaattcagaactttttgcgcgccatggccgcccccgctcagcacagcgtgccgaaagcatggctcgacgttcaggcagagcgccgccggcaggtcgaggcccaggcgctaaggcaggaagtcgcagcactgcgcgcaagggcggatgttgtgccggaggtgttcgggcttgagcggtaccgcgtagaaaaaactgggaagggtttctggccatactgcgtgcgtgcgggggatggaacgcgtgaactgttcgtcggccacttgaagcagtgtcagcgggtagcgaccgaattggctacggcgtttgaagatgggaagtttatcgccgcgcccggcagctcggctcagcacagcgtgccggaggggtggaagctcgtaccgatggacccgacatcgcagatgacctatgtcggtcagtccctgcgttatgacgcggtaaacagcatcggcgagatttaccggcaaatgctcgccgtagctccctcacccatcgatccggccgcgcatcctcagccgtgccagcaaccacaggcccatcctgcccgctgcgggtgcgagcggtaagtgccaagtaaggaattcatgtaatggaacagaagaaaccttcaccagtagatggagtcatcatgaccagcctcgacgttctccggaaagcacagcccgaagcccaggacgagtatgccgtgtccatgttcgcaacggcgatccgccagaaaatgcagcgctcccgcgataaaggccgaggcggctggatcgactgcgacgaagatattctgatcaacggattcgccgaacatgcgctgaagggaaatgagaacaacctcttggacctggcgacgttcctgatgttcatgtgggtgcgcggcatcgacgatgcgaagattcccccggcgctcgaaaaggcgcgacagcacaagatcatggaagcctggagtcgaatccatgaagatggcctaaactccgccagaaaggcgagtgctgcgcgacaattcgtggaagtgcctcgacgcaaggggcgcccggagcgacttgcatgaagcctcacgaaataagactggcacaggccgaagagttcctgcgcgaactcggccgagggattccagacgacgaacgggtgatggtcggctacgctgaagaggccacagtccaaaccgacgagaacggccgcaagctcaacgccggctggtggcctgtgccctggaaggaagggaaatacataaactcccgatccaacgcctacgcttgcatctcgtcatccatcaagacgcccaacccgaagaccggccagatgcgatactggcgcggcgaagcctctttcggccacggcctggcgttgatggtcgatgacatcggctcaggcaaagggtccaagggcgacttcgaccgcgacgagttccgcgagcgactagagccgaccgcgattgtagagacttcgccgaacaactaccagttctggtatttcttcaaagagccgatgtcacacatgctccagttcaaggcgctgctctattcgttcgtggaccaggtgctaaagaaaggcggcgacaacaccgtcaaggacgtcagccgttacggccggatgccattcggcttcaacaacaagcgcgggaaagacggcaagttcaaatatgccgacgaaaacggcaaacccgaactcgtgcgcctgtacagcgccgactattccaagcgctactcgccagaggaaatcgcgcaggccttcggcgtccgcatcattatgccacagatgaagaaggtggagataaaccgcgacgattgggtgtatgaccaagtatggctgaagtatgccgagcacatctgcacgaaatacaagatgggagaagcggcaggcggccaggtccagcagaatatgtccggcaaataccgcatccgctgtccctggggcgacgagcacaccaacggcgatcctttcggcgcatactttcgcggaccgatacctggcgccgagcacgaatatgtgttcggatgcgggcacgatacttgccgcaaagagcatcgacggacatgggcggccttcactgatgaagtcgtcctgccgtatattgtcgaacaacttgaacgcatcaaccgccgtcacatcggcgaggagtagtaactatgcaaaatgatcctggaattctgattaccgccatcggctcattgcttctcggccttctcgtcttcttcgaaggcctgaatggatggaaaataccagcgtcaaactttctcgcgtcgctcctgtgcttcttcgtcggcctttctgctttaacctgctggttcgtcttggcgtttgacgtgttttagtcgacgaacggtccggaaatttcggatagggacggaacttattagctctgccggtttaggtaggagataatagccgtccctttcgcctcaatatgtagaggcggtgttatatccgatcatgtaaagcagaaggcggcaaacctaacatgattatcgacgacgacaacattcttggtgatgataatattcttggtgatgacgaatcggggtccagtgagttcgatctcacacagatagaagatgctggaatggaccctttgatgaccgccgcaagtaaggcggccgatgatgcgattgcgaggaacgaggcgcaccgcgcgcaaaaggcggcaagatacgccgaggcgtatgctgaaccagacttgaggaagcgagcgcggttgttgatgctcgaccaggcctttgatcttccggtcagccggctggtgaaaggaccgttcgatgactttatcaccaagtacagctcgacttcagacagcaactacctcgcggtctatgatacgttgttctgtaagggcgacggaaccgtcccccacccgcacttcgacgagtttcgcggccggctggttgaccaccgaggcgtggcgttcaataacaagaccctcgaccccattgacctgatgggcgccctcgcggctgcggccttggacgatccatcgatcaagaagacgattgaaacttgctgcgtgtgggcgcgtcgatatcgccgcaactctttgatcgaaacgtttgagaagaagataccggagtgggatggtgaagagcggatcgacacgctgctgatcgacttgttcaaaccgttcgacaccgagcttaaccggatggtgagtaagtatttctggctgagcttgtactgccgcatcaactaccctggaatctcagcgccgatttcgctggcgttgattggtgggcaggatgctgggaagacttacttttcaatcttgatctgtaaagagttgtcgagcgaccgaaagttatcgccggtccagcttgacctgagccgtcatgaccagacgccatttttgcgcaatatcactggcaactcggtgatcgcgaacgtcggcgaaatgtccggcttcaaaaagggcgacatggaacgcattaaagagttcctggtgcgatccgatgatactttcgatcagaagtttgaaccaggcgaaactatcagtcgacaatggatcaccatcatggacggcaacggctatgatggtcttcaacgggatgagtcaggaaaccgtcgattttatccaatgttcgtggcgcaacttcccgacgaggatggcaagccgaattgggttaaaccgggcgatggaaatgaaactttccgcgttgacttcacagacttcggccgcaaattctggcaagccatggctgagtgccgcgcctggattaaggcgaatggcgtggagggatatctcagtctagttcgggcgaccaacaacgaagtccagaaattctctatttcggaaatggagaatgcgcgtggcgtggttcgtgatgacacgattgatatgtatctgatcaacgtgctgatcagttgcgagttcgaagagatcaagcctggcaggaattcaaagaatcctggatggagagtcaacaccatcgaaatcctgaaatggttcgatattctcgccaggaagaagccgatttctcgccacttaactccgcacctgaaggcgctaggatttgttccgaataagaatggcttgaatggctggtgcctgcctgtagataaggttgcgcctggatggaccagagatatgcacacgacgttgccgccgttcaatgatgtgcttgtatacttgctgaggaaggttgattctgaggtgactgatgaagaggcaatgattcaaatccgcaaagttaaggccgagcgcgcaaggatattgggtgaggatttctgatgtagtgatggagtgtacttggactaggccgccttcgggcggtcttttctttggtgcggagtacattcgatttcggttgtggccgagtgagattcggaagctatctggtaattagggtttggtggcgatggcgcgttgtggaaagttcgtgaacgttggatcaaggattttgtgcggtgattggatgaattgtggaaaatcgacgattctgactggatttttggggtcggccgcgccggtcttactggtaattaccgaaaccgggaatttgggtcgagccttagtgccgcgtgggcttgaagcgcttattcggatacttcccggtttcggatgcagccgcaaaagtatactacagcgaaaatcga

SEQ ID NO: 27 - DNA, 67863 bp, synthetic construct
  source 1..67863: mol_type = other DNA
ttgcacaatcctaatagaaaaaatctatcacggacgttacctatctttaaaattaataaaattaatagtaatttggtaatttggtatactttagtatttgaaagccttgcggcactaagcctgtacacttcccgtcaagtttccgattccgctcaactcgcggcagggtcgccggaaacttccggacttccaatccatgggtcgcggcaacaccacggcggactaagcggcaagtgccaaaactcgacgaacggaaccggaaatttggaagcgcgatagaatcgctcagctggacatatttctaacattcgatttaacactcaatccaaacactcaccgccatcgtctcccgccaaccgccgactcgatcctcacccaccagcggatcgcccgtataacatcctataacaccacctaacactcattcatcatcaaacccacccagacctacagcccacccacaagcagcccatagacgcgatccctggccccatagtacaatcgcgccatactcagtgtcgcggcagagcaccaggggccatccgccaaccaagccaccacgacgactccagaatcgaactcagggacgcagcaccaaatgaccaaattctacagccccgacgatctagtcacgccacaggaattcgcagacccgcatttcgcggcgatcaaccaaaagcgattcgacctgtacatcgacctgcgcgtccaaggttacagctcctggcgggtcttccgggccatctggggcgaggagcatatggacggtcccgcgcaggcccgcatcttcgcgatggagtccaacccgtactatcgcaagcagttcaaggccaagttgaacgcgaccaaaacgtccgatttgtggaatccaaagacggcgctccacgaactcctccaaatggttcgtgaccccaccgtcaaggactccagccgtctgtcggccatcaaggaattgaacgttctggctgaaatcacgttcgtggacgagtcgggcaagacccggatcggtcgcggtttggccgatttctacgcatcagaagccgaggctcagaccgcgaccgtcgctgctgcggccgaagccaatggctatgtgccggaaggtgaagagggagatttcccgtctccgtctccggaaccgaccgaggaagaccgcgccaaccccatttagacataaaataacggctaaggatttaaggtaaggaggtttatttatgcaccccttcgatcaagcggtcgtgaaggatccgaccgcgtcctacgtggacgtcaaggcgcggcggacgttcctgcagagcggccaactggacgatcgcctcaaggcggcgctgccgaaagaatatgactgcaccaccgaagcgacccccaatccgcagcaaggggaaatggtcatcccgcggcgctatctgtcggggaaccatggcccggtcaatccggattacgagccggtggtgaccctctaccgcgacttcgagaagatcagcgcgacgctgggcaacctctacgtggcgaccggcaaacccgtctatgccacctgcctgctgaatatgctcgacaaatgggccaaagcggatgccctgctcaattatgatccgaaaagccaaagctggtatcaggtcgagtggtcggcggcgaccgcggcgttcgccctgagcacgatgatggcggaacccaacgtcgacaccgcccaacgcgaacgggtcgtgaagtggctcaaccgggtcgcgcggcaccaaacgtcgttcccgggcggggacacgtcgtgctgcaacaatcacagctattggcgggggcaagaggcgacgatcatcggcgtgatctccaaagacgatgaactgttccgctgggggctcggccggtatgtccaagccatggggctgatcaacgaggatggcagcttcgtccatgaaatgacgcgccacgagcagtcgctccattatcaaaactatgccatgctccccctcacgatgatcgccgagaccgcgtcgcgccagggcatcgacctctatgcgtacaaggaaaacgggcgggacatccatagcgcccgcaaattcgtcttcgccgccgtgaaaaatccggacctgatcaaaaaatacgcctccgaaccgcaggatacgcgggcgttcaagcccgggcggggcgacctcaattggatcgaatatcaacgggcccgcttcgggttcgcggatgagctgggcttcatgaccgtgcccatcttcgatccgcggaccggcgggtcgggcacgctgctggcgtataaaccccaaggcgcggccgcccaggcccccgtcagcctcgaacatcaccatcatcatcattgaagaagcgacaaagccccggactctagttcagaatccggggctttcttttgggtttcttattctccagcttcgatgatttcgaagttgtatttgacgccttcgtgctcgaaagtcaatttgccggacgctttcagctgcatgcggaatcggatgcacttagaggaaggcaaaccgaactcgatgaaggctgcgttgcaggatttgaactcgccgcgcttgcctttcacggtgaccgccacgccatgacgctcggtgcgcttgcgggcgacttccgggtctttccaggagttggcgatggctgctgacaggtctttggtctctttggttttctccggcgcgttcttcgcctcttcgcgcattttccggatttcttccagcgcttcctcttcggtgatttcttcttccggcttcagattctcttcggccttctcttctgccttcttcttggaagtgcgggttttgtaaaccttggccggggtttcctcttcctggaaggcctcttcctcggccggcagagcgttcaggatggcgaggcagcgacgctcagcggtcttgcggtcagagaagcgcttgacagtcgcatcggcgttgtgagcgttgtagaaggcgaccagttctttcatttctgcgttctggatgtcgccgaaggttttgatggagttggtcattttgcgatcctctgttttggaagatttcgtttgggcttcagtttgtcgccccgttgaaagagattatgcctaggtcgatgctgcgtgtctacatctatttcatcagattgatcacaaagccgacgaacggttgtctgatgtgaaaacaccgcagagcaggctgcggtgtttgttggcgttggggtgatgtcagaaagtcgggactgtgataggctcgatgggcggatcgccgggcctgtcgttgtccgatgcgggcgccgggctggaagggatcgcacccgaccgaagcgccagcgattccgactgcctgcttacctgcggagctggaggcgcttttggcgcatgaggcgcgggcggaaccggcaggcctggaggagccatcggcgccctgggcggctccggaagatcgggcagatcaggaagactcggcgctatgccgccaaaggaccgctgcgaccgctgcgacggattgtcgccgaacatttcggcggatcggttgtccttgatgacttgacctatggccgtcttgtcgccacccggttctgctggatcgaagcccgtgaatggagtggtaacgcagcgcatgttcggatgggtcggcagattgttcaggacgatggagtccgcccagacatacgggtttttgtggttgccgggtccgtggctgatgatctcggcaggaatatggccgttcatggtgagccattccgccatcccttgccgagtcagcgggcttaccacgatctgaccagtggactctttggcgatggcgaacagatcaccgaattcgaatccgatgattgtgtagttggacctggactcgccgacgaaagccagagtttcgatgttgtggtggatatcttggtcttcccagatgtacagcatggttcgctcctcaataaggttgcttttggtgttcgaccagagacataccggccggaactttgaagcggacgtattcgatcatcatcgccgttcgacgccgattcgtgcccgactcgtcattgacgaatagttcgcactggtgcggaatgactcgcgtcaccaggcactcacctttcgagccgtagaacttgctgtaggctgcgacgcctcgcgtcatgttcagacggatcgtttcgcagagtcgctgcgcggccgacgcgctggacagatcggtcggactgaccgtcacccagtaatggccactttgttctttatcggacataagctgccctccaatgagaaagcctctgccgagtcgcagaggctggttgttgttagtcgcgcttcaacagaacgactttgtcatatgcgcgatatttaccgcgccagtcttcccagtagtcgccggccgggcaggtaagctccagggtgatttcgtcgcgccagcattcgacagaaaggacaatcgccttgttcctggctgcggaatccgccctgagcttaatcagaatttcgtcgccagttttcaactcatcaactcttacaacttttgccatggtgttctcctattgggcagcgccgcgagggcggatcgggtcgatgtcatgtaagcagatggtaggatagtccctggccaacttgagcttgaagtccacccagtcagcgccgacaagtgccgagacttcgacacttattttgttgtgcggagcaggactggtgcgcaggactatggcccgacgccgaacgggatcgttgacgtcaacatgagtgagtatttcgtcgccgacgagcaactcacaggccatcaatattttggccatcatacactcctatgagaaggcgcggccaggacgatcccagccgcgccgatggattaacgtttgtgaaggatggacactgcgtccacgtcgaggatgctaatggtacggcgacggcgcggattgctgcgttcatggatgcgaatcaggttcgcagctggagcttcgtccaccacccatacgtcttccggtttctgcgtccggagcaggaccgtcacttcagtattctgggcgaggccgttgcagatgaaagtgaacttggacgagggagttctgtacatttcgagattcctttttggacttctggttcggcttctcagccggtgaagagattatgccctgattctcaccgccgagtaaagcatttgtgtaccaattctcccgtcaggtggaaccaaagtgcggtatcgcttatggctacgctaccgcgccatggcccttcttgctcgcacactgcgaaccacaggctgatttccatccttgccaggactcggccgaaagattcgaacctgcgccgactggacaggatgtcgacattcactcgtcgattgacctcataccggcgaccgttgatgacgaagaccagccgcagggtttgtccgtccagacattcccagtatctggtttcataccgaagccagtagcgcttgccagccgggcctaccatggtcatttaatcgatgctcctggccgcgccacgcggtccggtcggcgggacgggatcgaaccgacccaggatgtagtcgggccggcgcgcttcctgaggacacacggcgagaaggcgccatcctgcgtccagggcagactggagttcgtccgtgcagcagtcttccttgagcagcagacggttgacgttctggagattcggaccaggtatggccgatcctgtgagtgagttccaaccctcgattccactcaccatctccggttggttgatgtagcttacggacataccggccaaccggctcgcggccagctccagacgctccagcatgggtcgcagagcagcttccgggtcaatgtcgtcccagagaaggaccaggctgatgatggtatacggatagtccttgtccagatcccaggctgaagcggtcagacggcccaggccgatttcattacacatcacgggaacgtcgttgctccaggtggacggctcccagttccgctcaccaggattcccgattgttacgccttccaggttccccaggagaacgtggagcttgctgacatattccgcctccaaggctttccgctcttcgtcggtcttgttgtggcgatagaaggatggagggctgactttggcatggtagagtttcataactgttcctcggttttggaagatttgaaagttagagaatggtgtcgcagtatttctcgaaaggactctggcgcttcttctcgcagatcgcgcaggtgatttccaggtcgggcagctcgctgtaagtcttgccgagatacagccagcgcttgcacagactgcggccgtccgacgtgaagaagtggactttgcgagcattgccgggttgcgcccagccgcttggtgccggcttcctgctcataccatcaccacgtcaatttcgtcggcgaagaagttaaagccaactccatctgcgtagccagtgtaacgcagacgaatcgtcccatcaatgtgggcttcctcgacgccgatgacttccagggtggtatcgttgcagtacagcttgacgaacatcttgatgccggagccaatcgccgcgaaggcgatctgcttgtacaggtcttgcttgatcatgctttacgctcctgtttgcggatgtattctgccctgacttcggcttcgaacttcgcccagagcgcgttgtctactggaccccagggaccggtctgagttccgtccaccggttcgaacttgccaccggcgcggcgatatttggacagagttttcaggctgatgatcttctcatcttgggaatcgaattggacgatcatttgacgtacttcccgaagtagcaggtgtggatgatttccagaccattggagatagccttcagcttgatgccgaaattcttgatcgcccagtccagatcgtggtgatagaactcgatgatgttgacgatttgaccggcgctgtagtggatgacgcgaaccttgccgttccagcggaagtcttcgcggctgtttacggcctcgactgcgatggtgtcgtttctgccgatgttccatttggagctagtcatgtcgcaatcctctttttggagtgtttcgcgtttcgatgaggtaactatacctcagtcacctcatcgagtaaagcacttttgaacatattatctgaaatttctgtgagacggatccatcggcggattcagtcagtggaaccgagactccatccgttgcgggcgaaggccgagcgaccagacagcttgcggcactggatggagctgccatcgtcgaaggtgtaagatacggcccagtccaggcgctcgcgacgcactgacgccgcagcgatatcttccagacgggctttgagaagctgttctgctttggtcatttcgagttcctctttggggcgcttcgtgtttcgatgagatgactataactcagtcacctcatcgagtaaagcgcttctgaggaattatctgaagtttctggaggccagaaattgccgccagagccagtcaacgtgatcgttgaggtagcgctcgccatcggacgacagagccaggcatccatcctttatgccgagcttggaactggaaatccattcgaactcgaactggagcgttcctgggcgagggatatgggacaggctgtacttttgcacggtcaggaatcctctaaaggtttggagttcgcgatggacgcgactttctgcatgccgatgcgatagaattcggcctcttccctggccttggccagctgctccctggcttcgcacgccagcttgtgctggttattggcattctggatgcttccgtccagactcctgtccaactcttcccgaagagccttctgcgacgctagctcggcctccaaatcctggattctgatctgaagctggcgattcctttcagaaacatcgttttcgcgagcgatggaattctgaaggcattcgtcaaggcgagtattttcgcgcaccagttgatgcttttctactttcgcctttctgcacgtctctcgcattgctgaaagctcactcgcatgcagatcgtcatccgggtctttacgctcttccttcgactccatccgcaggtagtactggccggctgcgaaggcgagcactgcctggtcggcatacgctgcggcatcggtcatgtatctggatttgtagcgaggcagaaacttgcactcctctggatcccagaggagactatcggcaataggccagaatttgcggaaaccatcaggatcgacttctacattgaccatttgcagctggccggcctccacttcgacttccagaggaacctgaatagtgccggtgatgtactggaagtacactatgctagacataacacaaactccatgagaagtcgcggccgggaccatcctggccgcgcatcgtaatcaatcttcgccttcgtccgcgctcagccactcttcgaaggcgaagtttaccttcgactcgacccaatcctgaagctcatcggcgaactcgtcactgtcgatgtccatggtgatgcccatgacttccatgttccatagcgcggcattcagttcaaactgcaccatccgctcgccatcgacttccataaggatgcggtctgcgacttcatagtcgtctacatcgaacaggtggccgccagtcaggaggtgctggacgaaagcttcatcgaggttggtgacttcgatctggacttgtttggtcattttctgcgatcctctgttttggagtttgggcgcccggcgaaccggggcagggtgtttagcgcggagagtgccgatcttccaattttcaagctcgtcttgcgctgcgatctcaatatctaacagcgcttcctgccgctcgcctgccgctcgcctgcggtaagggtagagttccaagccaaatccttgatggccttgatgatttccttctttgtcatggtcatgcccgtggctcctatgtgcggcgggttggttaggcgaacagaaggcgattgacagcagcgtccacgtcccagccgcaagcgaacagcgccatcgcggcttcgtattcggttgcaaagccggtgtctgccatgaccacttcaacggcggttttgctgtaatgctttgaaagtttcagggcggcgagagagtccgctttgtcggccacagcacaagcctcttgaacagtttcaaatcggcccacctctttgcagcgattttccagaacggcccagccaaagacgttaccagcgccatcagtgattttgtgtactgtgttcatcgtcttaccctccaggtgtttgttcgtttcgatgaggagattatgccgatagtcagaatggaagtaaagtgtctgagtgagaaaaattctgcacaccgacgaacggttgtgctcgaccgtctgctgcggtgtcgatatactcggcctattgcgaacaatggactgattaaatgtacaaactcaatcctgcgctgcgagcggtctggcgaactcgtgcccgttacaaagtcatctatggcggccgggcgtcttcgaagtcacacgacgcaggcggtatcgccgttttcctcgcggccaactacaagctaaagttcctctgtgctcgccagtttcagaaccgcatcagcgaatcggtctacacgttgatcaaggacaagatcgaaaactcagagtataatggcgaattcatcttcaccaagaactctatcaagcacaagagtaccgggtcagagttcctattctatgggatcgcccgtaacctgtcggaaatcaagtccaccgaaggcatcgacattctctggcttgaggaagctcactatctgacccaggagcaatgggaagtcatcgagccgaccatccggaaagagaactcagaaatctggatcatcttcaacccgaacgaagtgaccgacttcgtgtatcagaacttcgtggtcaagccaccgaaagattcctgcgtcaagatgatcaactggaatgaaaatccgttcctcagtgagacgatgctcaaagtcattcacgaagcatatgagcgcgaccgggagcaggccgagcacatttatggcggaattccgaagactggtggcgacaaatccgtcatcaatctcaagttcattcttgcggccatcgacgcccacaagaaactcggctgggagccggccggatcgaagcgcatcggcttcgacgttgcggacgacggcgaggatgcgaacgcaactacgctcatgcacggcaacgtcattatggaagtggacgaatgggacggcctggaagatgaactgctcaagtcgtccagccgcgtttacaacctggcgaagatgaaaggcgcctcggtcacttatgactccatcggcgtcggcgctcacgtcggatcgaagttcgccgagttgaacgatgccagtcccgacttcaaactgatctatgatccattcaacgcgggcggcgctgtcgataagcctgatgatatctacatgaagctgccgcacacgacgatcaagaacaaagaccacttcagcaacatcaaggcgcagaagtgggaagaagtcgcgacccgattccggaagacttatgaagcggttgagcatggaaaggtttatcccttcgacgaattgatttcgatcaactctgaaacgattcacccggacaaactaaatcaactgtgtatcgaactttcgtcgccgcgcaaagacctggacatgaacggccggttcaaagtcgagtccaagaaggatatgcgcgagaaacgcaagatcaagtcgccgaacatcgctgactcggtgattatgtcggccattctgccgatccggaagcccaaaggtttcttcgacttctaaacacagaaaagcccggatcgctccgggcttcgggtcttactcggtgtggttcctggcgctgagtgtcgacgcaacggcctcgccgactcccagggcttcctggccggccgcgagcgcttcggcttccgactcgacgatgaagtcatcaccttggccgtcgcctggcggaacctcgaccagcacggcttcttcgccttcgaaccgcaggtcataagtcttttcgacggacagtccgtaacgggcattgagcgcatcccagagctgagcttcatagttgcgcaggtcttgcagagatttctggtggctgagcatcgccatatcgacggcccgttgcagggtttcgtccaggacgttgaatcgcatgcgaagagaacgaatccgctcgaccacttccgcatccactacatgtctttcgatcatcgcttttcacctttgctgaatgttacgttgtagccattgtcggccaggtaggtcagggcgccttcgaaggaagttccgacgagatgcttgagctgcatttcgcgttgcgcggcgatccagaatgccgttccggagaactctgcgtggccttccgacaataccttgccatcaggcccgtcgatccgaacgtgaacggaagatagcttcagtaccatcaatgaatccctccactggcttgcgacggcatgctttcagcgcgagcggcttcacagtccgggcagggacaggcttggcggacgcgctccaactcgtcggcatccatgacatagagcttcccatcggaagtgtcgtgcgccatggcgatgttcgggaagtcggcagcgctcaggccggcgacagcgcggatttcgtcccagagcgccacatgctcggcattcaggcgagctgcgagcgcttcgtgctctttcgctacacgagccatgaactcgtccatccggaatgcgaattccgcatcgatggatcgggccgaggccatggagttgaggcgaatcggttctttcttcatggtaattctcttttggttggcggttgttcgctgctcaggcctattacagtctgagcagcatgatgaagatgaacgcaaggaacgcaaacggcacaagtatgccggacatcagctttgacaggcgctgcatctcagcgtatttctcggttgacattccgtgctgcgccgcctcagctgcgaagcgggctttcgcctcgataacttccgggcgcagcgacaggacatattctaaggcctcttcccgcgctttttcggcctcgaccgacctagggtcgcgggccgagacttcgctgtgccctggcctcgcgggatgggcctgcagcgatggaggaagttcggcggccacgactccatagtcggcgcaggcccaagcgatcccgatgaggatcgcgaggatggattggacgattcgcagcataactttgtcgctagggaagctcatgatcaatcctccacagaccgaacgatttccaggttgcgcccggcattggtcccggcattgaaggcgcgccgaccgtcgctatcgtccaggcgcatgagcttggtaacatttgacttcttgtagccaggatcgccgaaatgttcgtgcaccgcagcttccttcaccacaaccagagacgttccggcagaagataccagctccatgcgcttcctggtgatggcctgaaggcgatagctgatttcctgggtcgcggccagcttgaattgcgcggcaaccttgacgttgaatcgtccgtatccttgagccttctgatactcccggcacagacgatcaaccgcttcgacaagggagttgaacatgttcaccgccagctcaacgtccgatttgtagcctttaaagcggacggcatgcccccagcgcttcgtagtcccgccgtttgcggcgtgccaagaagccttggcggtcgctcggtgatcgttgatgccaccggcgaaatccatgatgcagtcgttgtacgtcgccacggccaccgagaagaacttcatccagttcgggattgcggaatagtaacgagtcgcgatctgctcatcgaactcttcgcgaatctcgccggtcacttcgaagtcgtgaaggtcatatttgtccttcagcttcttcacacgctcggctgcaatggcggcttcgtgcgggctggaggagtcggccgccatggcagtcagtttgcggatgcggtctttcgccttctcgatggcttccggggtgaattcgttctggtcggtcatggtcggttcctttgtctgaagggtttcgcgtttcaatggagctattctgccttcattcagaattgaagtaaagcactttcttccactatttcggcatcgactggaagaaattccagatccaatcacctgctaccagcaagaggatgagggcggcaaagaacaagacagcggccgcgagctgtgcgcccggcttcagtttgggatggctgagcttgggctctacgggaacggccggagcgctagcgctgcaaccggcgtctcctgggccgtagccgatgccgcgttcacacgcctggagcgacaccagggatttaagatactcggtctgcttttgcgactcttcgtagatgccggcgacggcgaaccagagggcgaacactacggacgtacacacaacccaggcgccggtcagcaggagggccagcgggccgatgacgaagacggtagcagccaggacgattgcgccgccccagatgatgaagccggccagaccattagtgatgtcgacacagaactttttcattttcagattccttcggttacgggatggaggggatttgaaactctgcgccgccgagaacatcaatgacgacttcccagagcgtcggaacagaccactggtaacggtcgaagtcggtttcaggatcgacgcccagcgtcacataggaagtggcaggccatttatgaacactgcctttccgcatgagagtcgccacgcggccgtcaccgagcggattcgttctgtgcggaacgtacgcagacatcgaatattgctgcccggcgtcgacaacaaatctttgcctctggcgcagacatacagagcccacaggattccagccgcgaccgccgcaagcctggcgagccgaagagtgttcataaccttcgtgagtcatttcgccgaggcaagccgagcgatcctcgtaatagttgatgttctccatcgatccaaccagtaccagagactcgaaatcgaatctatgatcgtggatggccgagtgattgaagcaaagccggcgcggcaactccgggtgccaaacatggaggcgccctgccgggagctggacttgaatgaaccccaggccgtgcagcgtgatcttgtccttcatcgggtcatggacggtgctcatggataatcctcagtagcagaaatgtatggtgagagttacgatggccaagccggtcgcccataggagggcgaaccaggccatggctttgatggttatgtagatcatccgaagaactttccggcacagatcggtccaatgcccatttcgatggatgcgtggttggtcaactcgcgaccgcagcaggagcattgaccagtcttccggccgtaggcgactgccgattccatcggcttttcaaacatcttcagaacgtcgtcatgctcagtgtcggtgcagtcgcgactcttgatgaatttgccattggtgatccggccgaggtagatgtcgcccaagacgtacaagctaccggcgttccggctgtgagcgctagcctctttcacaataacgatgagcggctcctcgccttcgccagccaggcggattttcgggcgcttgatgccagattctttcgccttctcaaacgccttctcgatgccggaaatgtccagagtcggtgcagcagcttcctgcgcggccactttctcgcgatatttggcgaggttttcgatggcgcgcttcgcagcagcgatctgattttctgtcaaggagccgtatttatacaacgactcctgaaggctctgagcgaagctgaaggaatttccagtccaccactcgacgatgtccgggtgcgcagcttcgaaggctttaattttgaggtcgcgctcttgcgcagcgctacatattttctcgatgcgcttttctgccgccttagcacgactcttggcgcgctgctccgggctggttttgtactctttgtatccaacaccgccgcaggcgaagcaggcgcgaccataagacgaagggccacggtacaggccggtgcctgcgcatttggtgcacttgtcgcgatacagcttcacttccttccgggaattcgggcgagcgcccatggacgcgtcttccagggtcttcggcgcttcgttgttgatcgctacggtagcgaagtcgtcacccaggtcttcgaagccggtgaacagattctctgctgcgttcatatcgattctcctgtttggaaagttcgtttcgatgggttgactatacgccagaaatggaaaacggtagcactttcgcactaccgttcgtcggatcgcagagggtcaggctacacggatcaactgcgacatgactgccaggttccgctcggcgacgccgatgatgacgttggttccgatgatgaacttccaagggtcttccctgttcttgtcgtagaacggatttctgaacagggtccgccatgtctcttcagtgaagaacgttttatggtccaggtcttggtgggcgatgttggagttgtagaatggaacaacgacattgagcgtcgcgccgactgccatggcccgctgcaggtctttcaccaaatcgatgacctgggctccggtgagatgttcgaagaagtgaaatgcgtagaccgccgtcaattcgccgtcttcatacggcactcggccgctggcgccgtcccagttcggccagtcgagcgattcgacgccgggaatcggcgaattgcctgcgcccaggtttactgcgcggcggtgatccggctcgatcaactgagcgatgtcgcgcttcatgccgagtttgaacaggttttgaatatccatttggttctccaggttgctgttagtaaatgtcgctgttgatcttgaatccatgctcagcgccgtcgttgtggtcgtactcagcatagctgtcgcagtagtcattcaaatgctgaatgatgccaagaacgtcgttcgcggccttgtgccgtttcgcggcgatggtcttggcgatgttgtcgccgacttccagggtttcggccgtccggcgatggatcagcaggcgactccaaagatagagccggacgcgacgaatgatgtcgcgatggcgctccagtcgtccgtgcaactcttcaatttcgtgctcgcgagattttaatactcgtcgaagctgctgaacttctaattccaaatcggccttagtagccatgttcacctcaaaaaggaaaatcgtctgggactccaggaagctcgacgactattgttgagcctgatcgatctagaatgcatccgaccgagccagccctgtggggatagggtctacacgaactataacaggtgacttccatgactattcgccaggtcgatcctccacaccatctacaaattggcggtcgcttcgacttcagttttcgttcgtccaagacggcgcgtctgtcgcaggaaaggcagcgcgccttaaccgacgtaaccatgggtatagtcgatcattcggatgaggccatcatcctctgattccctcgacttcagaccgcccaaagagtccgactggccgttgcatttcgcatcgatatccatcgaagacaagaatcctgccgatactacggtgatatcaactttgtcgccggccttcttgaagtcttcgcactcagcatcgagggccacaaccgcactcgcagccatgttcacatgacttatgaggtcggggaagatcacaggaacttcacgcgacatgccacggaccgtcatcttcagtactacatacttcatactcactatcccttttgtatgtgaggaaagaatttgctgttttccggatggtggaagcgctcggccgcaggctgtctttcttccggacattgaatcgtcgaaggcgggaaaaccgcgccggcgataatcgccgcgaggagtgcagcggatgtcgacatccagagggcggtttccaggctcacccgaacttccggacggcgcggcttcattcgctccaccctcttcccggttcataggatggtagactgccgccgcgaacccagtcgtcccacatgtggttcagaccagtcggtggctggggcggcggactgtagaatccgggagtctcagtgctgctcaggaaataaggtgtgcaaacggcctggacggccagttggtgccgctcccacatcttatcaatcgctcttagcatgacgtcttcgcactgagtcttactgtcgaaccgtctgctagtatggtccggtatctggacacatccgtctccagtgcaaaggaaagcagtagcaatccatacggtgatactcgccatttcgtcacctctttagttgatgagcagagtctattccatctgctcgccaggagtaaagcgcttttcgtcgggataaatgccgatgatgtctgcgtcgagcatccaaatgtccacggacggatcgtcgctgctgatttgatatagattgtacagctcccgtccgcctacagcacgctcgcctcgcggctcaaccgccagaaccttgccgtggccttctccgtgctcgtccaggtatatgacgtgatcaccgacttcatagctttctttcgtgacgaggcgtgaacgcgagttgttctgcgattcaaccacccaggaatccagcacgccgcctttcatgtcgcggaacaatcttgccgatttgtcgcaatcgaacacgcccagaacttcgccgtctttcaacacgatgtgtacgataggaagaagagtattcatgtttaatctccattgactgataattagagtctaatctgccgaaaagttcccgtaaagaattatttctcagaactgattagttgtaactgttaatctgatgtatgtgtttgaatctcttttgaacgtttgatgtttcccctataataagcgcacacagccaacaaccacgtggaactacaatgtttaaactttcctggatattcgggcgcaaaaaggatagtgctgcctgttctgaatcggcgccggagaaagtcgcacaaatccctcaacacgatccgctcgaccctatgattaagctgggcagaattcgcggctggaacgtcgagccggagaaagccccggtcatccgtagcgtgaaggattttctggaaccgggcctatccgtcgcaatggacagcgcgtatggtgacggaccgactccggccgcgaaggttgctgcgggcggccagaatccctatgtcgtcccgaccatgctgcaggattggtacaactcccaaggtttcatcggacaccaagcttgcgccatcatttcccagcactggttggtagacaaggcttgttccatgtccggcgaagacgccgcacggaacggatgggaactcaagtcggacggccggaagctatccgatgaacaaagcgcgctgatcgcccggcgcgacatggagttccgcgtcaaagacaaccttgtcgagctgaaccgattcaaaaacgtcttcggcgttcgtatcgcactgttcgtcgtggagtccgacgatccggactactatgagaaaccgttcaatccggatggaatcacgcccggctcctacaagggaatctcccaggtcgatccatattgggcgatgccgcagcttactgctgcctcgacggccgatccgtctgccgaacatttctatgagccggatttctggatcatcagcgggaagaagtatcaccgcagtcacctggtcgtcgttcgtggaccgcagccgccagatatcctgaagcccacatatctattcggcggcatcccgctcacccagagaatctatgagcgcgtgtatgcagcggaacggacggcgaacgaagccccgctgcttgccatgtcgaagcgaaccagcaccattcacgttgacgtggaaaaggccatcgcgaatgaagacgctttcaatgctcgcctggcgttctggatcgccaaccgtgataaccacggcgtgaaagttctgggaattgacgaaggcatggagcagttcgacacgaacctggccgacttcgacagcatcattatgaaccaatatcagctggtcgcggccatcgccaagactccagccacgaagctcctcggcacttctccaaaaggattcaacgccactggtgagcacgaaacgatttcttatcacgaagaactggaatccattcaagagcacatattcgacccacttctcgaacgtcactatttgcttctggcgaagtcggaagaaatcgatgtgcagctggaaatcgtctggaatcctgtagactccacgtccagccagcaacaagccgaattgaacaacaagaaggccgctaccgacgaaatctacatcaactctggcgttgtgtctccggatgaagttcgcgagcgtctgcgcgacgatccgcgttccggctacaaccgactcaccgacgatcaggcagaaaccgaaccgggcatgtctccggaaaacctggccgaattcgagaaggccggtgcacagtcggtcaaggcgaaaggcgaagccgagcgagccgaagcccaggcgggagccgtagagggcgcaggcggcccggttcccgccgctccacgcgcgactaagcctctcgcgaaggcggccgaggaaggggccagcgaggccgctgaaccgccgtcgcggccggaccccaaggccgagctgcggaacttgttggtcgatcttttgtcgaagctccaagacctggacgacattaaggcgccggacggcgtagacatagagcacaatgatgcgcctggcttaaagcgcacgtccaaacctggcgtgtctggcatggagccttcagtgttttcgtccaaccgcatcgtcgggcctcgtgatcattcggaactccagagaatcaaggtgaatggaataaccaccttgatcgaaaatccgcgaggaagcattcgacaaggaaaggatgggagttggcgagttcagatgaaacaccactacgggttcatcaagggaacgaaaggcgctgatggggatgaagtcgattgcttcgtcggtccgaatctgggatccaaacgggtcttcgtcgtcaaccaggtgaacaaggaaggtcagtttgacgagcacaagtgcatgctcggcttcaacaacatcaacgatgcgaagtccggatatctgtcctgcttccgtccgggctgggatggtctcggctccatccatgaagttgacctgcccgctttccgtcgctggctggcgaacggcgacaccaccaaaccattcgggggcgagtgatggcattcaaggcctccaaaaagcgcgagcgccgggcacctcttccagtcggaagagggaagcccataattccatcggcaggaatcgaggcctggtatcgaaagcagatgaaggatatgtccaagctcatgatctccgactatcgaaacgagattgagaaggcgctgtcccagcctgcggccgaacggttcttcgccagagacgaatccgttaacgtcctgttcaagatgacccttcgaagcctacagcagcgatggagccgcatttttgaaggtttcgcggccaagatcgccccagagttcgtcaaccggaccgaagaagccgccactgccgcgacccttcacagcttgtcggtggccggcgtcgatcagccacgagctgcgtataatgagagcgtcaggaacaccctggaggccgcaaccacttacaatcatactctcatcaccaagatccaagaggaagtccacgagaagatttacacatcagtaatgctgtctctgacttccccgaatccggaagagcaaggaacttccggcataactaacgcacttcgcaaagtcgggaagttttctgaagatcgaatcgaactcatcgcaagagatcaaacaagcaagctttacagttctctgagcgatgagagaatggcggaaaatggagtcgaggagttcgagtggctacactcttctgccggcaagactcctcgccacacccacctggagaaagatgggaagaggttcaagctgaatgaccccagactttgggagggtccgaaagcagaccaggggccgccaggatgggcgattaactgtagatgcagaaagataccagtcatttgacgtcgataggagcgctatatgccgttagttcatggcacttccaatgaggctcgttctgaaaacatcaagcgggaaatcgaagccggtaaagacccaaagcaggctgcggccatcgcttattccatccagcgcagtgagaaagggaagacggcgaaagattgttcgcctgagctcgtcgccgatcttcgcgccctggtggacgctctgtcgaggctcgtgaaatgaaccgcaagacgtgccggcgccgactcgtggtcgatgtaatcagggccaatattcacggcggattcttcagcctgaagtttgccgccatcgatttggcaatcatcggcttcgccatcttgatggcttttggccgatgatgctgagaaaatctggattctgactaaaaattctagtccggatagccgcaaattaccgtttacggaaaatggcagtaatttggaaatcctactgccgcgaggctttaacagagccagttcctaatttccgatttagccgcatgcttcaaaagtatatagcctgggaaattagaagtaacgttccaatagaattcatctataagcaacgttataatataacgtcaatctatatgctctagacgtattgaaattcaatttttaatcggtaaattggtaatttgaattagtttagaagttgaaagtctcgcggcagtaggcttagacaaatcccgtcaagtttccgagaccaaattaccggattttcgcggctgaggaaactggtaattagatcataatacaaattataatgtaagttaacagtcgcggctacatctaattattgttccgcttatttacccttagatgtactgcgtatataatacagccatagtccacgactcttcgaattaacgatggcaaagtcgaaaagaaaaattgacgaaaatggatatatgaccatagagggctgcccgatcagctcttatggcgttttccaatattctgctggtcaactcggtcttccgggcgatccgacgcggattgtcaacgtatatcgcccggagtctgccgtcagcgatccggagtacatcgaatctctgaagaatctcccgttgatcgacgagcatgagatgctgtcgggattcgacgatgatgacgatagcgtggcccccgaagacaaaggggtggagggcatcatcacatccaacgcttactacgaagccccatgggcacgcggcgatatccgcatctattcccgcaacatgcagaatcagctggaaaggggcaaagaagacctgtccctaggctatagttgccgctacactgagcaacccggcatctggaacggaacgccttatgaagtcgtccaggacaagatgcgcggcaaccacattgccctggtaaaagagggtcgtgtgccgggggccagagtattggatggtctgtgttttgaccatctcagttttgatttcagaccatccgatgagggtaatgaaatgagtctcaagaaagccaagcggaagccccctgtccagcgcgtagggcaagctgctgactcggcggtcgaagagttgcgcgccctgtggccgaagctatctgcgtctgtccagaagttcctgggcgaagaagagcaggagccggagcatcaggaaggcgcagctccggccgaaccgaccgacagcgagcacctgaccgagcatccgactctggaaggtgctcagaaggatgacgaagagcaggaagaggagccttccgttgtcgatccggccgtggccgccgtcgagccggagcatcaagaaggtgccgcatccgaaatgtccggtgaaggcgaagtcgccgaactgatctctcaagtcaaggccattctggctcgactggagggcacggtagccgaaggggcggacgaagagcatggcgaaggtcaagatgtcgtcgagggcttggaagagcagagcagcctcagcggcgcgcaaaccgccagcgacgatggtggtgagggcaaggataacagcgaggaacttcctgaaatggcacagaagaacgcgcaagatgctgcaattcgcggtctctatcgcgacattgctgctaaagatcgcctctacaagcgtcttagctccgtggttggtgcgttcgatcaccgagctatggactcggctgaagtcgctgtttacggcgtgaagaagctgaatatcagctgcgcgaagggccaggaagcactggcgctcgacatgtacctgaaaggtgtcgaagccgcgcgcggcgcggccagccgtcaatcgaaagcccaggattcggccggttctgctccgcagtgcgccgagctggacagctacctgaagggggagtaactcatgttccagaaacaagtttaccgccagtacactcctggttttccgggcgatctgatcgaggacggcccgaagcgggcgcggccgggtcgaatcatgtctctgtctgccgtaaatccggctgccaccgccaccggccccaaccgcatcagtcgcgctttcggttacgccggtgacgtcagctccctcggcgaaggtcagccgaagactatcgcggctcgcgcttctgaagtcgtgatcggcggcgccaacttctttggtgtcctcggtcatccgaagcactatgcgctgttcggttcggccggagactccctggctcccagctatgatctgcccgatggcgccgaaggcgagttcttcgacatggccaccggcctggtcgtcgaaattttcaacggcgccgcaaccgccctggacctggactatggtgacctggtcgcctatgtaccaaacaacctgcctaccgccgacaacgcgcttggcctgccggccggcgccctggttggcttcaaggctggctccatgccgaccggcttggtccagattcccaacgcacgcatcgttaacgccatcagtctgccggcccagtcggcggggaatctggttgctggcgttaccatcgtccagctcacgcagtaaggaggcgtcatgagccagatcagcaagacccattcgcgcctcgcaggccgcaatgcgaaacctttcgacctgaaaaacatcaccaatgacgccgtggcgtctctgcgccgcatcggcctggtattcgatcacgccgtcgtccaggaccagatcaaggccttggcgaaggccggcgcgttccgctccggctcggccatggacagcaacttcaccgccccggtgaccacgccgtccatcccgactcccatccagttcctgcagacctggttgccgggcttcgtgaaggttatgaccgctgcacggaagatcgacgaaatcatcggcatcgataccgttggctcctgggaagatcaagaaatcgtccagggcatcgtggagccggccggcactgcggtggaatacggcgaccacaccaacatcccgctgaccagctggaacgccaacttcgaacgtcgcaccatcgttcgtggcgagctgggtatgatggtgggcaccctggaagagggtcgtgcctcggccatccggctgaacagcgccgaaaccaaacgccaacaggcggccatcggtctggaaatcttccgcaacgccatcggcttttatggctggcagagcggcctgggcaaccgcacctatggtttcctgaacgatcccaacctgccggcattccagaccccgccgagccagggctggtccactgccgactgggcaggcatcatcggcgacatccgcgaggccgttcgccagctgcgtattcagagccaagatcagatcgatccgaaggcggaaaagatcactctggccctggccaccagcaaggtggactacctgtcggtaaccacgccttacggcatttcggtttcggactggatcgaacagacctatccgaaaatgcggatcgtgtcggctccggaattgtccggcgtccagatgaaaaaccaagagccggaagatgctctggtgctcttcgtcgaagacgtgaacgcggccgtcgatggcagcaccgatggcggcagcgtgttcagccagctggtacagagcaagttcatcaccctgggtgtcgaaaagcgggcgaagtcgtacgtggaagacttctccaacggcaccgccggtgcgctgtgcaagcgtccgtgggctgtggtgcgctacctcggcatctaacagatgcctattcaccaaaggccgggcttccggcctttgttcactctgactctaactcggttgtaggggccggttagggcataattactaggactacgccaatgactgtttatatcgtttcctccatgactcaatcggtgtcttacaatgcgtatgacacctctgatccgtccaatcctcgcctccagcgaaagattctgattcgcggccgcgcaggcatcgcatccgaaacttccggcttcggcgacatgatttccgacgaggcaggacgtccgatctggaccccacagggcgattgcactgccgtgagcgattcggatttcgagctgcttcaggccaataagattttcatgcgtcacatggagaagggttatctgcgagtcgtgaagaccgacatcaccagtgaccaccagcggatttccaaagagactcgcaccatggagcgcgatggattccagcctctggatgctactcgcctgcagcagaaaatcaaggtgaccacagccagcgcttcccaggaacaagagttccggatttaaccgagggtttcggtatggtgattttcgacgaaaataagtttcgcacgctgtttccggagtttgctgatccagccgcttatccggacgtgcgcctgcagatgtatttcgacattgcgtgcgaattcatttctgatcgcgattcgccataccggattctcaatggcaaagccctggaagcgtgcctgtatcttctgaccgcccacctcctgtcgctgtccacgatgcaagttcagggcgcggctggaggtggcgtcaccgccggtggaacccaaggcggtttcatcaccagcgctacggtcggcgaggtcagcgtggccaagctcgcgcccccggccaagaatggttggcagtggtggctttccgggacgccttatggccaagagttgtgggcgctcctcagcgtcaaagcggtgggcggattctacatcggcggtcttccagagcgccgaggcttccggaaggttggagggacgttctggtgatccctggtgcgaatcttctgcgaatggccttcggggtcatcggtactcaaattgtgaaatatcgcaagtttgagcagcgagtgaagaatgatcaagcccagtatgtctccatgttcggggagcctttcgacctggcagcgtctgtccagcgagtccgacgcgatcagtatgcccagtttaatctggagttccaacggaattatgttatgatcttcgccaactttgatatggttgacttggatcgcaatatggccggtgaccagttcctctggactggaagagtttttcagctggagtctcaaggctcctggttttatcaggacggctggggagtttgcctggccgtggatatcggtgcggccaagttcaccgatgacgggaaaccgactttctaggtggtgtatgtttgacggcgaactgatagcgaaaatggttgtcgagctgaatgcggcgatggcatctgctcaagaggctttgcagttcccggattttgaagtcgtccagaaagctcagccgacccaacaggggacgtcaaccaggccgaccatctttttccagaaactgtttgacattcctcgcggctggcctgccaccgattggtacctggacaacacggcccgcaaatatgtggaaataactcgacagcatgtagagacgactttccagatcagttcccttcattggcagaatcctgaaatcactcacgtggttacggcttctgatatcgccaactatgtgagagcttatttccaagctcgatccacaattgagcgcgtaaaggaactggacttcctcattcttcgcgtgtctcaaatttccaacgaggcattcgagaacgacaatcaccagttcgaattccacccaagttttgacatggttgtcacttacaaccaatatattcgcctgtacgaaaacgcagcatattcggccgatggggtattgataggcatatgagtctgaggcgcgattcagagctaatcgccgcgcacctccagatgttaagagccatgcgcggcaggtccgtttcagccggatggtattccacggctcgatatcctgacaaggcaggcggatcggtcggaatacaagtcgcgagaatcgcacgtctcaatgagtacggcggaactatcgaccatccgggcgggaccaggtatattagggacgccattgttcggggccggtttgttggcgttcggttcgtcagaaacgactttccgggagaaaccgaggtaactaagcctcacagaattaccatcccggctagaccgtttatgcgatatgcttggaacttgttttccgcagatcgcgccgcaatccagaaccggatagccatgaggctggccagaggacagatcactccagatcaagctcttgcccagatcggcctggcattggaaggatacatagccagaagcatcaggaccgggccatgggtggctaactcagcatctacggtcaggagaaagggattcaacagaccgctggtcgatacggcgcacatgcttcaatcgattagcagcagagtaacataaccaggagatcatccagtgatcagtcagagccgttatatccggatcatttcgggcgtaggcgcaggcgctccggtcgcaggccgaaagctgattctgcgcgtcatgactaccaacaacgtcatcccgcccggaatcgtcatcgagttcgacaacgccaacgcagtcctgtcatacttcggcgcgcagtcggaagagtatcagcgggctgcggcttatttcaagttcatcagtaaaagcgtgaattcgccgtccagcatcagcttcgctcgctgggtaaacaccgccatcgcgccgatggttgttggtgacaatctgccgaagaccatcgccgatttcgccggcttctcagcaggggttctgaccatcatggtcggcgcggccgaacagaacatcaccgccatcgatacgtccgccgcgacttctatggacaacgtggcgtcgatcatccagaccgaaatccgcaagaacgctgacccgcagctggcccaggctaccgttacctggaatcagaacaccaaccagttcaccttggtcggcgccaccattggcaccggcgttctggccgtggcgaaatctgccgacccccaggacatgtccactgccctcggctggtccacctccaacgtcgtcaacgtcgccggccaggctgccgatcttcccgacgcggccgttgccaagagcaccaatgtcagcaacaacttcggttcgttcctgttcgccggtgcgccgctcgacaatgaccagatcaaggccgtgtcggcctggaacgcggctcagaacaaccagttcatctacacggtcgctacttccctggcgaacctcggcactcttttcaccttggtgaatggcaacgccgggaccgccctgaacgtgctgtcggcgactgctgccaacgacttcgtggagcagtgccccagcgagattctggccgccaccaactacgatgagccgggcgcttcgcaaaactacatgtactaccaattccctggccgcaacatcaccgtttccgacgataccgttgcgaacaccgtcgacaagagccggggcaactacatcggcgtcacccaggccaatggccagcaactcgcgttctaccagcgcggcattctgtgcggcggtccgaccgatgcggtggacatgaacgtctatgccaacgaaatctggctgaagtcggctatcgctcaagcgctcctggacctgttcctgaacgtcaatgcggttccggcgagcagcactggcgaggcgatgaccctggcggtgctgcagccggttctggacaaggcgactgccaacggcacgttcacctacggcaaggaaatcagcgccgtccagcagcagtacatcacccaagtcaccggtgatcgccgcgcctggcgtcaagtccaaaccctgggttactggatcaacatcaccttctccagctatatcaacagcaacactggcttgaccgagtggaaggccaactacacgctgatctattcgaagggcgatgccatccgcttcgtcgaagggtcggatgtgatgatctaatggtttgcggcggactcgatccgccgcaaccttccataaatggagtgaggaataagcaatgatcaacatttctgcgttcggctcgatctgccagttcacggcaagcagaactttcccgaacggattcaccgtcaccgagttcgccgacgatgccgatcccatcgacagcccgccgttcaccgctgccgataccggcgtcggtctcaacggtgacatggtagtttggaaccgggcgaacatcctggaagtagtcgtcaacgtcattccgaataccgagggcgagcgcaacctggcagtcctgctggatgccaaccgcaccggaaaggacaagtcgggcgctcgtgatgtcgtcggtctggtcgtggcgatgccggacggcagcaaaatcacctgcaccaacggcacccccatcgacggcgttctgatcaacgcggtggcaagcgtcggccgtctgaagaccaagccgtatcggttccgatttgaaaaagtgatcaaagccggtactagctgatgaagaaaattccgctgacagcagtccccaatcaagcgatctcatttaacgccggtagcagctattggaagattcgcctgtaccagaacatggacatgatgaatgccgatatcagtcgcgacggcgtgatcgtttgccatggggcccgctgcttcggcgggattcctcttctccagtacagccatcagtaccgacctgactatggcaatttcgtcttcgaccgcgacgccgattggacgttgttcggcgacggaatcaacctgttctatctggacggcgccgaattcgcagagtatcaggcgctcgccacgaggaaagaatgagcacatcaacgatcagaaccgggacgaacaatgatatccttttggacgacaatggaaacatggtcatcctcaggggtgtcgaagcgtgcgcccaggacgttcgggcggcgatgctcatgcgcaccggcgaaaatattttcgatgtgaactccggcgtgggatatttcgaatacatcttctcgccgcagaaaagctatgatgacgctcgcaaatccatcgcggatgcaattttgtcctcgccggatgtgaccggcatcgagcagctggacatcgacatcaccggggaagtcttcggcgtcgatgcgaaagtcatcaccatccacgggcctgttaccacaggagtttgaaatgagtaccatccgcatccaatacgccaacggcacccaactgttcctggacggcaaaaatccgccgcccctggacccgctgccctcgtttaacccgtctgtcgaagatctggaaggcctgggccgcgaaaagaacaccgacaagggcgactcctcgccggccggtcttcccgttcccccggtagacgtcgattccaatgtcgacaacggcggaaccatcccggctccggtatcgaccgacgctcctgcggccgaatcggccccggaaggcgcccaggaagctcctgcagcaggccaaggcgacgagaaaggcgccgaggaagccccgactaccgccccagtagaaaaggccgaggaaacggcctcgccggccgctgaagaggcaaccccggctcccgccaaggccacctctcgcaaaaccaccagcaagtaaggactcgacatgatcaacgtcagcggcttcggcacaggaattgtaatagtttccgcctcatcgttcccgatggggttttccttgtcgaagttcgctgatgatgagagtccgatatcctccaaagagctggagccgttcggatatgagatgctttatgacggcggcctattcgcctttgacaaggctgctcctctggaagtatctgtatccgtcatcgcagggagcgaggatgatattaaccttcgcatccttctcaattccaaaaagggatcattcagatttcttccgggaatcatcccggacatgacgactctcgtggccactcttcctgatggcggccgcaccgttctgtccaatgggaccatcctcaagggtccggccatcgacaccatacagaacaccggacggcgcaaaggcaacacgtacacttttgttttcggtagctatcttggcgcccagactgcgcgtcaagccatttctaacgttatccaatcggtactggaggtggtctgatgttagggattttcaccagcctcctaagttcgcgatctttttcgattgtggaccaaaacacaaaccagctagttgctgcggatttgaggataagccgggtcaacacccggttttcttctgtaggacaacgccacatgctggaagatggtacgaccaagatggattccagaacgatccaccctatggaaatcatcgtcgaagtattttgcccttcaattggtgtcgtcgatcagatcaatcaattgctcctggatcgcgacacactgtacaaagtcatcactcgcggcatggtattcgaacggatgatgtgtaccagcgaagcgctcaatcagactccggatgtgatatcggcgactcctgcacggctgacattctcccaagttctcgtccagaatcccaagcctataatgttccgaaatgcaggggactcttctatgatcgaccgagggctggccctagctgaagacgtggttggctcggccggcgatctgttcgactacgcagtgaacggcgtccagaacgccgcagacttgttctgaggtgccaattgaactctttcctcaagtctattctcaacacgcctactctcaccatacgcgatgatgttaccaaacttcctgtctggaagagtcttcaagtcaagaaagtggaaatttactcgccggcttccgtagtgtcgaaacctctggcgacgaaagaccagacggaagctcaagtgtacaccgaagctctggacattgatgtgaagaatggaaagatcatccaaccggtgcgactccgcatcaatgctatctgtccggacctgtccaccgttgaaagtatcatgaacgctttcaatgataacacctcgactttcgctatcacttctaagtcgatattggccgataaaatggccatcatgacgctcgatgtagatcagtctccagacatgttgaacgcggctgagatcaatatggaattcgagcaggttgagcctccagtattgaataaattcgatcctgcgttccctcaagatagtccgacttatggggtacagattcaatctctttctgatgctaatttgctggattttggcgccatcggcgattcgatatcttcggccgcaaaatcgctatataatcgcgtgaccagctacttctgaggatgtatcatgcttgaaatcaatcttcccgatggccgtcaaactcgcgtacaaatcgaggcgtggtcggcattggatggctgggaactccagcgccgtttcgtcgaattcgctgtcagccaagattccgacttccgccgctctttcaccatggaaatcctgggctatgcgaaagtgctgcttggcgacgatgacaccggcattccgctgaccaccgcggcagtcatcaacaaccacctcggccactggaagaacgtggaactggttttcaactctgttctcaagcacaatggcatcgacccggccacgcacgccgaccggccggactattgggaacaagtcggatcgcagatggccatcgcatttctggccgaggcgtccaagctcattggtccagcaatgaagatcgccgaaggactcgccaacaagccggagtgattcatgtctagtgatttggatgaattcatacttcggtatgaggccgatactgccagagccgagcgcaatctggagcgcctccagaaccagatcaggcgcgtgaacagcgcatcgacgagtggccttcaggatttgcgccacttcgcagacggcgcggccactgaactcggccgagtcgttccgcagatcgattctgtgacgagcgcgattcgcgggatgaacgcgcaactggcgataggcgccactggcgtggccctggtcgcggccggcgtcaaggcgttcatgaacaccagggaccagtacaatcagcagcgcatccaggcgatggacatcggcatcgccccggcacgcttggaagagtaccagagaaaattcgttcgccagtccggtggaaccatcagccgcgagcagggcgcggagatgaccaaaaatctggcagacactttccggcgtgcttatcgcgatattgggcgagtcggcccggaagcgcgaattctgcgtatggccggcgttgatgtcgggagcttccaaaagggcatgcgcccgctcaacgacatcattactgatctggccacgaaaatggccaagctgaagccggacgaaatttctgcctacgctgatgcccttggcgtctcgcgagactacctgagcaccctggctaagatcggcccggccatgggaaaagtcaccgagatgacgactgcggaactccagtccagggtccagggcgagtccaacattcagaaattcaacgatgctctggcgaatctcaaccagacgttcaccaccctggaaaaccgagtcggcgaaaagctcgcgcctgcgttcaccaagctgatcgaaatcatcgacaagatagtccaggctattcccaatgaagtggaaagcttcgcgaaggacaccaaatcccgttgggaagatggagtgctcgggaaggcgaccgttggcagtgatatcctatccctcctcagccccggcgccctgctcggtcgcctggcagcgtgggggactcgtcgcggcatggaagaatcagggctcatcgacaaggacaaggttcccggcgctcaaaccagcgaagacctggccaagaaacaagaagaccaggacaaggctactaagtccatgaaagagctagagaagctggctgaccagaccacgaagtctaccaatgattttgcggtggcgatcaacatgttcagtggcgcggtatcgtcgttcgcgaatgccgttgacgagcgccaagcttgggcagcctgggcgggggaaattggtcgggcggtcggtatgggaagcaccgcgccgacttcgcgggcaaccggcgtctatccgcacgcgatctatgatcagtcgaagagtggcgcggccggacaagtcttcggcgagccaatcggcgcccagtctcttcgcaatcgcatgttctcgccgcagcgcaaggcagagccggtcaccgttccatcgtacatcaacgatatcatcaaagatgcttcgaagatgtacaacattcctgagctggacatcaagaaactcatatacaccgaaagccgattcaacgccagggccaccagcgaagccggagcgaaaggcctcatgcaactgatgccggaaatcgccaaggcgtatggtatcactgacgtatatgaccctcgccagaacatcctcggcggaacgcgcctactgcgtgaaaacctagatcgagcaaatggcgacatgcggttggccttgacatactatcatggcggactcgatccgaagaactggggcccaaggactcgcgcatatccgggtttggtaatgagcgctccaatcgagctgatggaagaggctcagcgcaagcagaaggctgcggccatgaccgtcgccaacgagacgttcgccccggaaggcggcgacatggacattcgtccctatgatggcgggcgactggaaaccccagaccagggcaagaaggaagatgagcgccgcgaagcccgtcgatatgacgacagggttgtgcgaccggaaattcgcatcatcgaccgcatgccagaccgcagcgacggcgaaatcctcaagatgtctagacgtcaagaggccgaccgggcagattctggattccggaagttcccgaatcaagttcgcggcgagaccaagcagaacatccaggctcaactcactgcaggagccatcgcgcaagtgatcggcgttaaccccaaccagatcatgcgccgcgaaatcagccgttctgacttgctgttcggatacaaccaagccatcctgggcaagcaacaggagatcaaggccgccgcgaccgaagccaacaacgtattcctgtctccagccaagcttgccgaagccacggccaaggtgaacgccgcatcgcgagaaatggatattctcaggacgtacggcgagcaacttctgaagagcgctccagagcgcggccaggagctgaccatcggtcggatcgacatgttggtcaacgtcaccggcgcgaattctccggaagaggctcgtgagatattcagcaagcagactgcagaccagctgactacggcaatccaggacgctcaaaacgattccgcaactaagatactctactgatgaaaaagagaattctgcgagtaacattcaacatgccttatggacccgaagtcatccgcgaagatctggatgttcgggtccggattatgaaggctgcgttgcggattcagaaccgggcgacgatggaaattttcggcctcaccactcagctgcgcgagtctcttctgtcgcagttcaccgcgtggaagcaccggcaacgtcaagtgggcagggaagatgaattgatgatcaaggtgtcggtggaagccggctactctgaccaggggcgcgagcaagtttccagagtctttgtcggcgaagttgccattgtcgatatcatttctccgccacctgacattggaatccgcatccagtgctataccaggcaaatcgacaggacgaagaccattcggaatatgccgcccgccaacacgacgtttgtcaagttcgtcgagtggggcgcgaacgaaatggggttgaacttcatctgcgataccagctacaatgatcaagttttgaagaatccgggccgttcgatcactgtcgcgtcggcaatcctggcgtcaattcaggatatgtacatgccggatgtggccgcgttcgtcgatgatgacgttttgatcgtgaaggatcgtgacaaagtcattcgtccggatgaagtcgccaacattaactcattcgtcggcatcccttcatggtcggaatggggtgtggaatttcaatgtctgtttgaaccgtcgattcgcgtggctggcggtgtcgcggtcgaatctctcatgaatccaagcgtcaacggcaactatgtaatcaccgctctagagtatgatttggccagtcgggatcggcctttctatatcaaagtcatggggagtccagcagcgtaatggccagggaaatcaaatcgttcaatatgttcggcgtgcactacaactcgcggcaattctctgcggtcgatggactcaggatgatgtcgggaatccatgatgttccgccggaagaattgctcaaagggaccgacgtgctggcccatacagaggaacaaccggaaggcgtttggcttcccttgatcgctgcgaacataaatctttatgtcattgaccgggcgaacgtaatcgctcccgtacaagtgcttgcgcttttgtctgaactggtcatagattggaactttggcttcctcaaagattggacaggggtcaaaattccagcccgatttgtcgaagatatcaagagtgtaaaaacagcccattcaccttctgtggtcgcaagtttggtggcgaatgggtcagcttctatgcgcgagctggaagaatattattcgactcaagatgcctttaagatgattgacatcatgacggcgaagagcgtgaatgaggctctagcgtccgaagcatcacagaacagaatcaaaaagggataattcctaagcgagcctgggaaggctatactagacctgccaaatcagaggctttcccatgtccaatattcctttaacatcagcaaaatctaccgacagaacgcgactgatcgccgctcttgacgctcggtcgcggcgggacgcgctcgactttgaagtcatgattcccgcccaggttgttcaatatgatcggaccgaaaatatcgctacaatccaacctctcatcacctgggttgatacggaacacaatgccgtccagaggcaccagctggttgatatcccggtgatttccatgggcgctggcggcttccacataagtttcccgatccagcagggggatatcggctggatttacgcggccgaccgcgacacctcccagttcttggagtcgctatcgatgtcgaagccgaacaccggccgcatccacaaatttgagcatggtatgttcataccggacgtattccgccgatataccatcaattctgaagactcggcagcgatggtcatccaatcgactagtggagcgacccggatttccattcgcggcgacaacatcaagatcactgcgccgtcgaatgtcaccgtagatactccgcaggcgaatttcactggaagtgtgactatcgccaacaccctggttgtaaacggcgtcaacgtgaacaaccacggccacctcgaaaacaatccgcctgatgcccggacgaaaggcggcatgattgcctaaggagaatttcatggctagttttgatttttctgatttaacagcgggggggggttgtaatggctaattatgactacatagtagatactggagtcatagtcgccgataccgctgacgttttgaaagacgttgaagcggaattcagagcggccctcggcgccaatatcaacctggcggcttcaacaccccagggaactctggtcgcggctgagaccattgcgcgttctagcgtgatgaggaatgaagctcgcattgccaacaccatcaacccaaacgtttccttcgggacgttcctggacgccatctgtgcgctgatgggaatcgagcgcggctctgatctttcgacgttcggctatggcgtccaagtgaccggccgcagccagacccgaatttccaccgggtcgcgtgtgcagactccggccggagcgattttcacggtcatgagtgacgttctgattccggcaaccggagtcgccaccatcgacgtaaaatcgcaggaatatggaaacatccctcttcccgtaggaaatctgatcatcatcgatggaaccatcggttgggccggagcgaaagtaatcgcttcaactcgcgtcgatcctggcagccgccaaatgaccgatgcagaattgaagaatgctcgcgtcaatcgtttggcgatccaaggtcgcaactcgactttggccattaaagcgtatgtcagcgccgtacccaatgttacctcggtcaacgttatcgaaaacaataccggcacggttcaagttgtcaacggcgtatcattcacccttccgtatgcggtctgggtctgcgtcgccggaaatccggataaacaggctgtcgcagatgctctgtgggcagcccacaacggcgggactccctgggactatggcgcggccaacaacggcgtcccggtggatgggcctactggcgttcctgttcgcgatccggcatccggtcgaaagtatgtcgtgaagtggactactccgatcatgtatgacggatatgtaaacgtcaccgttcagcaaggctcttcctcggtcgctccggaagcaatccagaacgcagtcgtgaattacgcccaggggaaagtggagggtgaagagggattggtcgtcggcgcgagtctgtctgcctttgaagtggctggggctatcgctcgcgagattcccggtatctacatcaaactatgccaggtggcttgcgtcccggctggatcgccggccccggctcccggcgacttctcgcctgaatacgtcatgagcgcattcggtcaggctaccatttcggttggtaacgttagggtgactttcgtatgactctgcctgcgtacaattctgatattcaacaggcgctgaagtggctccacaaccaggcccctgggatcaccggcttggttcagcgaaaggctcaatggtatgatcgtttcagccgtcagttttgggtgaactgggagcgcgacgttttcaacttgaagactgccaacccgttcggccttatggtgtggtgcatcatcctcggcacgccttcgaaaggcttcggcctgtatccaaaaaacagctcttgggcgttcggtcggctgcgccagaacttcgtttatagcgggaatcaggttccgccgcctgcagacgcatcgccgggcggcaacttctacggtggcggcaatgccgaaatcctcaacttggacgaaatcaggaaagtgcttcagctaagatatgtagcactgatttcgaacggctcgattgcatatatcaatcgcatgcttcgctacatattcaacgatgatgagccgtgggacgaggcgaccgggttgtacttctatctcatggactcaaccggcgagaatggacctgtggagaacttggccatatatcggaaagattgggaagggatggttttattgtctagctcgcccaggacgaaccatgtgctgatatcgacccctgccagtgacgctgattggcctggtgtcgatccggccgcgagcggccgtccggtaacggtcgaaacggcgtccgctacggccccggacggctccgctacggtgtgcaagcttactaagccggccgggagtaccgcctacgtctccgcgccgatagatgggccgctggggtccggtagcactgtaacgttttcgttcttcgcgaaggccggatccacccgtttcattgcaatccagtcggctgccgatttccccagtcgagccgatgccgttttcgacctggattccgggaacgtaatcagcgatcagatgctggacagcagcgtggtaagcgcccgaatgattcgtctggaaaatggctggtggcgctgcgttctcacgaccaaaaccgtcagctcttcgttccgcgctgcttacgtcgccccggcagaaaccaacttcagctggatcgattcgaattccagcacggcgattgacgtgcttatctggggcgctcagatcgaactgggtgatactccaaccggatacttggagactaccggggcgcccgtaaccatcaccgattatgttttgcagaacacccagaccggaacaatcaagttcacacagccccttccgactggagcagaagcgtattggactggagactggaaaggcgggtctgagaccgagccggccagattcgcagtaggggatgggactcaagatacattcaatctgtccagccctgcatacatcggcctacccactagtggggcgttcaagctagaatacagagttggtccggcgcttaatttgtcgccgcaattgatcaacctcatgaatgaccgggcggtcggtatcatgccgacttgcgccggttgcgatgtaaaagtcattcaggagtaatgacgtgatcacacccgaactgatacccagtccgtttgctgcgcagggcgacaaagacccgatcccgcagacttcttccactggcttcgctaaccttcgcgacggctacacgccggactacgaaatcagcctggcgtcgaacaacccgcaggccaaagcggtcgagcgaaagattcaaaaccaactcttcttcatcgcgacccagaacgcacaggcgtggcagcggcaaatggcgccgccgtggtttcagggcatgcctggcggctatgaacagaatgcagaagtcgtgcgcgtcggaaatgacggcataatgcggcgttatcgttccatggtgaatgccaatgcgagcgaccctctcagcagcacgacttgggaagagcaacccgcatggtcggtgatgcgctccaacatcccgatgccggccggaggctcaggcctatcttctggcggagaagtcatcacgaccggccgcaacttcaacgacctgttaaatgggacgtgggagttcttctctgattcagtggttgtcgcttctcagaatgcccccgtatatccggcttctgctggtgccgctgctggcatgttggaggcgaaatcttgggtgtccggggccaatacgttctgcgtccaacgctacactgatcgcgtcgggaacgtcgctgtgcgcgggcttaatgccggagcgtggaccaactggatgtatgcggtaaacgtcatggcccttcaacaaggtcgggtcacctatggagtcgcggccggatcggcgaacgcttacacgttgacgctagttccgcagctccaaggcggcctggtggacggcatgatccttcgggtcaagttcaacaccatgaacaccggcgcctccaccatcaacgtctccggactcggcgccaaggccatcgtcggcgcggccaacttccctctcaccggcggcgaacttggccaaggactcatcgctgagcttgtattcgacgcagcaggcgaccgctggagaatcctcgcaggcgcgccacgcatccaagttggcaacgccgatcaagattaccaggcccccagctggaaacaggtgaaggattacgtcgcgtcccaaaagctgactgaagtggactgggctgacgtcgtcaacaagccgaacgtcgctatccaagacaccacgccgtggttcgccaatctggagctgtccgatgctcggcctttcatcgatttccacttcaacagcaaccgcgccaaagacttcgactatcgctttatctctgaggctgatgggtcgatggcattctattctcgccaggggtctgccagtcctacccaggacatcctgttcagcaggtcgaatgtaacattcctccagccgcgactggatgttgcgaaaaacctcgcgtacatcgccaactctggtcccctttggcagaacaccactgccgatcagcctggttggaaattcaccttcgcacaaggtgtggacgccaacaacaacgcggttatcgcagtcaataccaccaacccggacggctcttatcgctcgcaggtcatgcgatgggactgggcgtccacgaacgtcatattcaacaaccgtccgctcttcgccggtcaatacaccccttgggattctgggaacttcaatccttccaccaagttgacggtgaatgccgtgaaccaaatcgccggcccaaccgggattcggaataccaacggcaacaccggcaacatgaacacctggggttccggctccacgacggcatcctatggcaatgctgccattcaaatcttcggaaaagggggcggtgagcctgccgcgatctatttcgacaactcccagaccggatggtatctgggcatggacaaggatggacagctcaagcgggccggctggtcgctcggcaacaactcttatgtcatcacagatgaattcaacatcagaaaccatatcaacacaatggctgcgcgcccgatttgggggaatgtcgagttctggggtccgtggaacttcgatccgaatcttaaactcactttgaacgctttcaatgatagctcattcaccaggatgaccaacagcggcgcgaaagacgttggtatcgcgtccatgacgagttatgctgatgcggccatgtcattcttcaactatgaagcctcgaatccgaccgggccgcgcgcggccgttatttcgttcgtgagaaatggatcgcgtggagtgctattcggcttggattctgacaacaagctgaagtggggcggatattccctaggggacgtcgcgttcgagattgccgactccaacaacctcatgagcctgtggtcatcccacgctgccgcgccgaactggaacgggcagaccatctggaggtcgggaaacttcaacccagacaccaaggcgactttggcagctcgcaatacgacgtcatcccctacaatattcagttatggggcgtccggaatcgcatcaaccggacaggtcggtgcgttggttgtggaaaacaacagcgtcaccaataccgcagccgccatcacgttccattcgccgcagaaatatcaggtcaacttcggcctggatgcggacaacgtggtaaagatcggtggcggcacaatgggcggcgtagcatatcccatcatccactccggcaactacaacaactacatcaaccaggcgctggttcaggtgggtcttggcggagtcggttcctatggaattttcgcggttctggataatgccgctccaaccgcaaccgttcaacccggagtggtcgtggacggttccattctcatctactcgtcttgcgccgcaaactacaatagcggtaaaagacctgccggaacttggcgctgcatgggatatgtagtcaaccgggatgccaacacccctgactccgcgacccttttccagcgagtgacgtaaaatgaaatggacgcggatcagaaacccacgttggctggacgcagtaaacatccacgccatggtgactttcgagggaatcggtgaagtgccgttcaccgccaatccgcaagacgtggaggcccacggaagggccatctacgctgcgattctatctggggagcacggacctatcgccccggtcgattcgaagcgggagaaggccttgcaggacgctatacgagccagggaaaagcgggctatccttcgggatacccgctggcccatagatcgccacgacgagcaaagacggctgggtatcgaaaccacggacggccctgggctgatcgcagcccttgttcactggaggcagcagattcgcgattggaatagcggggatcggccgcgacttcccatggctctgaaaacaatgttcaaaaatcaggagtattgatgaaaatcacgaagggtgttctgatcaccggaaccgggtgcaccacggatcgggcgatcaagtggctggatgatgtacaggcggccatggacaagttccacatcgagtcaccgcgagccatcgcggcctacctcgccaacatcggcgtcgagtccggcggactggtaagtctggtggagaatctcaactacagcgcccaagggttggccaacacctggccgcgccggtacgcagtagacccgcgagtccgcccgtatgtcccgaatgctctggcgaaccgcctggcccgtaacccggttgccatcgccaacaacgtgtacgcggatcgtatgggtaatggctgtgagcaggatggtgacggttggaagtatcgcgggcgcggcctgatccagctgaccgggaagtcgaactattcactgttcgccgaagactccggcatggacgttctggagaagccggagcttctggaaactccggccggcgcgtcgatgtcttcggcctggttcttctggcgcaatagctgcatccccatggcggagtcaaacaacttctccatggtcgttaaaaccatcaacggcgccgcgccgaacgatgcgaaccacggccagctccggatcaaccgctacctgaagaccatcgccgcgatcaatcaaggatcctgacattcgcccaaagaaaaggccgcttattcagcggcctttttgctttctggctttgcctcttcaaccatcttggcctcgaccggcgcggcggactcctcctgagttaccgaatccacatagttccctagtgaactcagaacgccgattaacagcgctcttactaccttgtccttgactgtctcgcctatgatcttggtcagaacggatattaactcttcccggagtctggggctgattcttggccgaaagcgcttgcgatgctctttgcgtttcatgtttagtcctctgtctgcggtcttctcctcaccccgataatggcttggggatgcgttgtgttaatcggaagggtcgggcgctattataacccgtcgaaaatgctcgcgcttaactgtttaacgatacgcaccgcgatactaaatcgccttctttctggccaaggaactctggcggcctggtccggtctaaggcctaatttgtcgacattaaaacgagaaaacccggatcgcctgtaggacaaggcgtccgggtttatttcgatctagtgtacgctagaatcagtggcttccgccccaaccgtccagccagcaatcgaagacggcgtgtctcggcttgtccttggcgccatgggagaagtgcttgaaccggatgacctggcccttgagatgctccctgtcattccagcggcgctgtttctcatcgtgggtcaggctggaggccgacacgttgaaggtgactccaggccacagacgttcgttgcggcagacgaacgcaccgaccattccggacggcgacaggttttctgcgtggctggagcgggccgtgtggccaagttcattgatgaaagcttcattgttgttgtgcatcaactcttccacgtcgatgatctcagcttcatcgtagtcgtatcgcttgactttcacacagtgcccttccttggcagtcgagcgaccgaacttgtacagtccatcagcgcgcttgcccatggaaccttcgaatcccagcattgtgtggcggcgctcgacttcgctgaactgttcgatggaagtcaccagttcctgctcgaccaggtgaatcctctcatagccgaggcagtgacgaaggaagttcacgcgctcggccgccctggctaggcgatcttcggtcggtgcgcgaggatcggtgaaatcatcgaacacatggaaagaccagtccggctcaccgctgtggcggcgaagatcgccggacgacttctggaaaactttcgggtcgctgatgtcgccgcagaccagctcgccgtccaggccgttgaacagtttatcgctgaggtattcgtagatcgattgattgttctgccgcttgagttgacgagtcagcgcctcgccttcgaatacgaagcagcgaaatccatcgatcttcggcgagaaatacatcggcagttggccttccagcagcttcgggtcaaaattcgatgcgagcatgggtttcatacagttctccagaaaagaagcccggcgaaccgggctaaatggcggtaagccggctcagatggtttcgttggcgtggttcagttcggccatgatcgacgcatagagctcatccgactccttgatgaacacgccgtcgtacatgacgcctttgcgatccttgatggtgtcgtaggcagcagcgtagcaggcgagcatggtggtgtcatgctcttccgtcacgtcgaacagagtcatggcggccgataccaggctcttgatggccaacccatgatttccacgtgccagagcgcctgccagatcgccgaggcgctgcaaatcgtcgccgtaggtgggatgtacttcgccgctctcgatgaaggccgacagatgatcgaacagattttcgccgagttgcgcggccatgatcgtggcaaccaccattacgtcgccgatgccatctttcacatcgaccgggttgttctgaacccaggcttcgcatacttctgcgaactcttcgaccaacttcaggaattgatctttcgcagacgagcctttgatcaggttacggtcggaagcccatttaaccaccaggtcgtgaagttcgcggctcatgatttgttcgatgttcattctttcgattccttttggatttgggatttgactgcgttgattatggacgccgtgctctggcgcgatccatccttggtggtgccgaagtagaaggccattaccgacttcagctcggcgaaccaatagccgatgatggtgccgatggcgaccgaggatgtcgggtccatcagagcctcgcggccgaatgtgaagattgcgatgatgatgagaatggagcctgtcagaagagcgaatgtgatcgccgggcgaacgaaatcgttctgctgcgccgcaagcctcctcgcagaatccctgtcggccgcctctgcggcgaactggctaagctcggcctggagctggttctgctcagactgaaggcgattttgttcggcttgaatcgcaagctcctggagacgaacgcgctcggcgctctggagttcggcgagacgcgctagagcttccggattcgcgtctagagcgctagcgaccgaggctgggtcggccttcgaccccagcgccgtcgcgacgatagcgccaacggcggcgcctgcaggcccacccaggagcgaccccagagccggggcagccgcgccgatcttactacctatgtctttccagtccatttcgactcctcaaaagaaaggcgccattacagcgcctttctccggccggtgatttagaactcttcggcttcggtcgcatcgccgacgccaccggcgtcactgcgaggctgttcctgcttgctgtagtccaccttcacctcgccgccgacgaacgacttgtacaggtcggccgcagccttgaagtgatccgggttcttcaccaggccttccagctcgaactggacgccggaccagctgcccttgtcgttcgacatgcctacggtggtcatacggaccaggttggcgaaagtcggcggggtgcgcaggccctgcggggtctgaacctttttctgggacagcgcggtcatgagcttcttcgaggccttgatctgcgaagacgacagggagatcagagcctggccgaaatcgccggtgtccggatcgatgacgatgacgtaatgaccacgggtgtcggcgaagtagtcagacttcttgtcgctgaccgaaccgtcttcgttcggcgcgtacaggcgtccttcgacttccttcaccttggtcgggtctttcatcatttccttgaagtcttcgacgctgatggcacccttgaaaccgccctcggcctcgcgaccggcccagcggatgaactcgcggcggtacgcggccggaatgatcagcaggccggtcttgccgtcgtaaaccttgccggtgacggtgttcaggaacatgccggccttcgcgccttcgatgtacttcgggtcatcttcatcgacctggggagacatcttctgcaaaacctggatgaaggggatggcataggactcggcatcggcgccttcgaagcctgcgccgtcatacgatcccaaatccatgaagtcgggaacttcggtagtcgcgacggcgccgccaccggtggcaactgctacggccttggtttcttcggttgcttcggaagtttcggttttcttaccagccatgttaggctccttgtttgtcgaatttcagttatcgctaactgtgggtttataataacggaagttgcaactaagtaaagcaaattacatattaagatttgctctttttcaccttcggtttcgtgatcttggcctctttgtattcgtgtacgccgatgaaatctggcagctcttcgcccttctccaggtactcgcgaccgaacgcctggagggtctggtaatggacatcgcggttgatggtggcgtcatagccggcttcgatgatggcctcggccgccttcttcgcatcttccatttcgccgcgaccgaattcggccagaaccttggtcttgatgatgccgtcgttgtcggtgtcttccagccacttccagaacttcgatttgttctcttccttgacggaaatgatggccttcggctctacttttaccgtgcgaccgtccgccagagtagtggtcttctgaccaagctcctccaacagctccggaatggtgttacgcttgagggtcttcagctcctcttccttttcggccagcgccttttgaagatcgaggatttcgccgtccagctgcgaagccttgtccaccaagttcagcagtcgatggccgatgtcggtggcttcaaccgccatttcatccatgacgccaaaatagtcgatttcgcccggcgcgttctctttcaagtattccgggatttcaagctcttgctctttcatgtccgcctccaacttagtgatgttcccttacttgaaccaagtattgagtagatattatgccgcatcttccttgatacggctactgatttacatattaaatttcgtcgcgagtgctaacgtcagcctcaaacacgccatcaacgacataacttgccaggttgcgtttccactccaagctgacctggattttctcgtcgatggaatccagacagatcaggtcgaagtacagaaccgagttgacggtgccgattcgatgatttcggtcttcggactgcatccgcagctcgttgtcttcgtcggtcgtgtagtagatggccacgtctgcggctgtgagtgtgatcccgatccctgctgcggccgggttgcccaggaacacctggacgcgcttggcctggaaatcgtcgatcaatttttcccgctcggcctctttggtctcgccgtagtaggtgccaaacgaaatcccttgggcctccaaatacgccttgatctggtcgatttcctgaatgcgcatggcccagacgatgatggaacgctccgggtcttcctccagcagaccctccagaagatcagtaaacacggcgaatcgcgggttgtcttcgggcggcaggatcaccggctcaccatagacgttgatatagccggacgccacttgcttgagcttcgagcgcgctgccgcagcatcgaaagatacatcaagcatgaaatcttcgttctggagaacaaagtggtagtcttcttccacgcgctggtaaacctttcgttgctcaggcgacatttcgaagtatatgcgcttgtacactttgtccggcaggaatgggagtgcttctttcttcgttacacggaaactgtgcggctcgatcagggaccgcagcttgtccaggttccggaataccgggcgcccacactcgtctttttcgaccagttgcggcggcatggtttgcttcccttccagcttgcgcatgatagcgatcattcgaggatcgtcactgggcaccaagacggaaaattcggccacaaacgcccgataggatttagtccccagaattccattccgcaagaattggaactgcatgaacaaatcggtcggtgcccgcgtcagaggagttccggaaaggatgcgacgggccacggccttctcgcccagctttacgatctttttcgcacgcttggcttgtgggtttttgatcctcgttgactcgtccacaattgcgcaaactttgaatgtatcaaggaatcgctcgacctcatcatagccagcctggtggttgattgcgtcaacgttgatggcgaagacgcgaagaactttttcatctgcgaacgtctcggaatacagacggtccaagcgcgccctggcctttttggaagtcggtcggccgcgccaatccacgctcaaagtcttgatcgcgacgtgggtgggaatctcgcgcagaatccagttggtgtggacgcctttgggggcgacgatgagcagcgcgtccacgcgcccctgtaggaagaggcgaacggcatcggccaaagtcgtccaagtcttcccggtgccctgctccatcaggtatgcgaagttccgtttgttcagggacgctgccagggcattgaattggtgctgcatggcctcggtcttcatgcccttgacgggatatgttttggctttcatttgttctccaaatcggcgaggaactgaacaatgttatccagtccttctgcatagctcgcaacttccaccaagtcgcggctgttaagctcgaacaaatcgagcataggattcagcagcagccaatcggttccgatcttggccaggacgaagccccggccaccccagccgatccgctcccgaagaaaagggatttgcccaggttcgaaacatctggccattgggcaggtggaagcgcgtttcggccactcctccaaagccttgaactcgacccagaactggacacctcgacgattcaggcagatcgaatcggacatgccagaccgccgcgtctccagaaagtcgatcaggattcggccgagcgagcgctgcttaaacgcattcgccgctttcgtttcgcgatcattcatcaccttcgccctctttggaaactttctctgcttgcgctgccagctttgctttttcgcgttcggtcaaaatccgcttgacggccttcacgatgaacatatcgattccgctgagcttccagcctttgatgaggaaccaagaacctgtcggcgtcccttcagcaatctgctttccgtattgcagatatttttcaggccgaattctgaaacgtatcggctgatcaaccgagtcatcaacgcacatgatgtcgagaaactgcgactggcccttgtacaccgggtttttcccttgatcggccctcttcttctggcgaatcggttcgttctcatcagacagaacttttttcaccatcttgacaatgaccagaccatcatctccatcgcggatatcccgaatgttccgaatggggtttccggaagttactccaaccagctccggattgtcataagcatgaccccagagcgtgtgagcttcgttcaaatctgcgaattgaacttcagaattcgacagactcgcggcgactttctcccaatcctgaagcgtcttcaggtgggtgcctgccagctctttatattgagccttcagccccttaagatcggccttcaactccttcagatcggccttcaacagtttctccagttctttgtcttggctgattttcgccgaaagaatctgggcttccagagctgctacatcagcagccttgtcctcaacatcctgtgccgatatcgggcaattggccagggcgatcctcgcggccttgacgtcatcacgaaggcgcaggaacttctctgccttcgccgggccaaagcctttggcgttcatgatgccgccgatcaagcgtccatccgccactacccagttaagttcggaatgctccgggtccagggccgtatattctacgccttccttggccaattcgcgaaggatggacacagtttgctggtcgtctttcgccgcccgaagacacgcggccgcgtattccaggcgatgatatcgcttcatgtagcaggtccagtacgtcaccacagcgtagctgaccgagtgggagcggttgaatccccaggcgccgaaagtcaccatttcctgccacacacggtgagcatcgtctggggcgacgcctatggtcttggcaccctcgatgaacaattcccggcgcttgttgaagaactcttcaccctttcgcgcagacatggctttcctgattgccgatgtctgctcccagtcgaactggccgatgtccttgacgatggacatgatctgttcctgatataggaaaacgccgtatgtccctgacagatattgctcgacctgcggaatggtataggtcacaggctcgcggccggccacgcgctcgatatacttggttgccataccagaagacaacggacccggacgggcgagcgccgtgatgtggtcgatgttctcgaacgcggtgatgttgatcgcgtttgctaccgagcgaacggcctgcccttcgaactggaagatgccggacattttgtcttcattgagaacgtccagaaccgccttgtcgttcaaaggcaagtcgtacaactcttgcgcggtcacgcagttcgcgtcctggatgactcccaaagttcgaagtccaagcgcgtcaattttgaggagattcagatattccgaatcgggcttgtcgagctgcgcaacgccttcggaagtcaccgtacagaagtcgatgacttcatcgttgcagaccaggatgcctgccgcgtggacgccagagtgggatgggtgaatttcgaggtcgcccatgcaggcggacgcgatctcatacttttcacggaagtcgcggccgggctgagttttttcgaaagtgtcctccaatccttttccatatcgttcgtccgctgatgtatattcgatgatcgagtttttgatgttgtcggtatcgtggaaggggatgccgaagcgctttccgacgtgagcgataaccgacgcggccttgagtgtgttgatgttacccaacttcacaacgttccaagtgccatacttctgctggagatattcgaacactagatagcgatgggtatcggcgaagtcgatatctatatcgggaagatcggaacgggaaatgtcgataaagcgctggaagagaaggcgatgcgggagcgggtcaacctcggtaatgcccaggaggtagcagaccaaagagccggctgaagagccgcgagccgggccgaccagcatatgcttcttggcgaacgcaaccagatcggcgaccaccagaaagtagctgtcgaagtctttcagctgaatctgcttgatctcttcttggaatcgatcctcatactcctgggtccattccttgatgtggccgcgactgaggcggtaggcttgcccctcgcgagccagagcgacgatatcaccatccaagtggatcatcggcgccttcgccagtttcacatccgccaactgctcgactaccgcacgagtattggcggcggcggcatcgaactcttcgcgagtcatgatgtggcgtaaacggctccacaactcctcttcggtggcgatgtggcgaaggccgaccgattcccgcaccttccaggccgacgcgaaatcagcatggtcgatggacggcatgtcgttgtaagaggtaatcaccaccggctttccgaatgctctggacgtctccatagcaccgtgcgcggcgaccatcgacgcgggattgatgtcaatgtagtcgattccggccagatccagatgggcataggcctcgccagcgaatttgatgacgccgtcagcttcctggaattcttgcggagtcaatccttgattctggaccgacttggaagtcaagcggtagaacttcttggtgtccttggcgagcacccaggctttgagcttcagctctttctcgccatcgtcggcgcatttgatcgggatttccatgccgaatccgcgaggcagttctgccttggcagcggcttgttcccaacggacgtggccccatgttccatcatcgacgatggcgacgaatggggattcgatctctttggcgcgctcgatgatctccgggaatcgaccatatgcggcgccgtaggagtaaccagagcgaacgcggagctgagggaaagacatcatgcggcctccattgcttgatatgcccgatatacgcccatgcgcttgcaaacttcgtggagcagccgcacgtcgtcgagcgcccggtgtttctgtacatatgggccgcagtagtgctcataaagatgctgcagccgcatgcggtggccgaacaacggcgccgactcttccacagtacagatatcgagcgatgggaaattgacttcgtccaggccgagcttgccgcgagccagatcgcaggtaagcatgaacttatcgaatggaaggttgtgagcaatattcgcgtcggctctggaaaagaagtcgcgaactttctgacgctgatcgaggaaagatgggtgcttgatcagatcttcgttcttcaaccctgtgatcttggtgatgatttcctcgataacgattccaggattgcagatgaactctacttcatccaaaatcttttcaccatcagttatcacgccggcgaattcgatgatcctcggctgcttcctcaaactcaccctctggtggaacgggagtcctgtggtctcagtatcccacacggcgaatatcatgtttgttccctcttatgtcgaaagggccggctgctttcgcgaccggcctgaggagtataccgcgacggctgaagatttacgccttctgtccgtctttcggcgtgatacggccggagcgcatggtggcgtggacaaacgccgaatagttgatcgagtccaaggccgaatcggcatccttgaacccgctattcgccaggcgagtgagtttgcccaccatgtgcatcacgaacagggcgagtcgatggtcatcggcggttttcgccaccaggccgttcgggaagaggatttccatgatctttccgtacatcagatcattgcgaccataggtgctctggcggtcgcggaagacttctgctgcggcgtacagattgttgagaacatcttccgcgaaatcatctggatgggaatcatcttcgcccggccagacggattccatggcgaacggcgcggcgtcttcggtcgggtcttcggactgagccgtttcagcgagcggagacggggctttcgcaaacgcctcgtcgagggtaggggcggagttcggggctgccgggaacggctcgtcgagggtaggggcggagttcggggcggccgggaacggctcgtcgagggtaggggcggagttcggggcggccgggaacggctcgcctgccatgtcgttgggcgcgctatcggggtcgctatcggccgcgacggcgaagaacggcgcatcgcaaccttccaggttcaggatgtaggagtcgatccccaggctattgtaggcatcgatgatgtcctggcgatcatcgaacgccgcgacgatcttggtgacgccttcgattttcttcagtatgtcgagcgcgactgcccgcttgaactgaggcgccggctcggtgttaccatacggccgcatgatgagttcatactcgcgatgttcggcgatgccgagttcgcggtggagcttggccctggtctggaaaaagtggttgtcggttcggccggtgacgaagaaaatcatgaggtcggcgtcgatggcattcctgatgcgacctacagcgtgcgggttgagagtgtccttgtcgagacgagaatgatactcgtcccattgccgttccaaggcgaagctcttgcggtggctatcgtcgaatacgcagccgtccaggtcgaagatgatgatgccattctttggtttgcgttccatattcagatttccttactggttgctttctgggtgacggttttatcgatgaacgtcccatcagaagtgaggcggaaaacttcgccattctggatgaaatcgaacgattgcacgttcatcgtgatgcgaatggattcgctgccgttggtcacttcgacttgtgcgatgtcgccaactttctcgacaatgatcttcatgttacatggacttcccattgacggccacagggttggcctcttgtttttccgatccccagaaatcgcggcgcagttcttcctgctcggccgagcgatccatccaggggcgatagaacttgcactggtagataggttccaacggaacatcaatcacaggaatctgacctggctttgtctccagagcggccatgaaccggtcataggatttctgctggatttcctcttcattcatcaccttcgacccatagcgcgggaaggcgcaggagccggtggcgacgcagtgcggctggagcaggctgtcgaacataggatagacttccagaaccagccggcgcatttcgcggaatacttcctgatattcaccctgggtccgaacgcacaggcgaaccttcgccatgtcgctgagagtccgcagattgaacttggccgcgatcttcgtttccatgttggaagggatgatggcacgagcgtcctggagcgacgcgccggcctccagaagcttctggtagctggtttgcgcgtcggcaatggcgtcatgccacagacggttcagctcttcgcggacatggtaggtcgggtcaggctcgccatttaccgtagccggttcgtcgaattcccagcggaaggcttccggctgaacgacggcgctgatttccagagcgcgactggtttcctgctggtaagccccggtacgggtccgaacgagttgatgggtgaagttcttgctgacaccctcgatctggaaaatgaagtccacgaactcgaacggcgagcggatggtgtccagcatgtacttccagtggtcaagcttttcggcctcggtcatggtcgccgggtcttggccgcgcatgcgagtggatttcgtccccaggagaagttcccaggcgttctgggtgtaactgatcagagaaattttcatcagaaatcttccggaattggcgtgaagtggaattttttggttagagccagggccaggccttgggcttgctctttacgaaggccatactgctctatctcttccttgagcagttcgcaggcctccagacgcgactcatactcttcagcctcctgaacggatgagaaaacggttccatcagaggttctgtacacaagttcaatcgacatgatgacctcagtagcagcggatgatttcggcgcggatatctcgacggtcgaggtagtgctcacgaatcttatcgcgggcgcgctcggcctcttctcgactgccgaacgacaggttgaacgaagtgaaaggcttatcgtccaggcgcccatcgccaatcaggtacaggatgcctaccagcacgaaagacggcgctgtctgtcgcgtttgcggcgggtcgatttgcatttcgaggaaagacatgggaacctcttcaggatgatctggtgcgtacattaatagcgctcctgctgagcagctacggtttccggctcatagatgagcatgtcaacgatttccgggcactggcctttcacccagtcgatggccgcgaccagtgtggtggaagcggagaaagagaaagtgcggtaagactcatggatgtacggcgaccccatcgaatcgcgctcggtcgtgcgagaaatgactgctttgatattaacgatccggcccatcttcggcctccactttagcgattatatctgacaggctcagcttctcgccattcaggaaataactggcgcgaaacttcctgtcaccctctggcccgacgatccgggccgttatggtgagactcccgccgccaagggcatcggtgtccctgaagaaagccagcagcgcccgcttgagcgctgcctcgcgaggatcgacggccattaacctaccacgttccagccgtgctgagcgcaccaaaccgcaccggcccctgcaggaaggctattcagaaggaacacaggagtcaggcgaccgtcctcggtcatatgtatgaagtagcgggcgccttcaccgagccattcggccttggcgatagcgcgttcgagattggccttggtggcgtaggttttggtgtggttcttgtcggtggagaaggttacttcgcgggccatttgtcgattccttttggctgaagggtttcgcgtttcgatgagggaatattacgcccacctgatccagaagtaaagcacttttgtaaattacttcacgaacatctgcttggccttctgataagacgaagaagtcatcaggcgctcgatgacgtccatgtccgaaaccagatcatccagaaggacattgcgccaggtagcgaaccggccgagcgagaagatgccagcctcatgggtgagattccagatcatggattcgcgctcgtcgcggccgagaggaacgattttgcctttggtctggatggtcggctcgccgtcctcgattagctgtttccttctgatcccgaaggccgcgcagacttcatccaggtcccatgccggattccattcgatggtttcgatctcaccatcagcattctccaaaacgccattcgcgacggattccacgatcagagtatcgccggtgatggacgcgcgaaatgtcccgaagtcgggactggggaaataaacggtctggaagacgtcacaagggatggaaagcttgtatcgactcacgatgatggatgtgcctttaccgaatgacgggtcgatacccaggtccatccccgccgcagccaggttggcgcggaacggcgcggtgcttatgacattcacatggtcatcttgccggcgaaggtactggaagaaagaggcgtcgaaaggacgactccaagtgatgcggttcgccagcttggcgacaagctgctcatagaagtcggccggtgcgatccaacgcttttcagtcgccagattccagatggaccggtccgacaggccgcccgttactttcctggagtacatgttgcagtggtcgatgcgcggctgggaaatgaattcgccgtcgatgtagatagctttgtgtacagtgacttcgcggaacgggataccggtgagttggccaattactggcgagcggaatcgcaagagtgcgttgtgacgctccttgttctccggcgtcgccgcgtcgatgatttgggcttgagggaaacgatgcgcggcgatcaggccggcgagtccagcacctacgatgatgactttctgatcaggaatcatgatgtgttccttctgagtgtacaaaacttgagaggataaaaaagggacccattttcatgagtcccttgaagagctagacgattcagtctcagaagagcggcggcttactcttcttcaccatcggaaccgtcggcgccctgatcttcaccgtcgtgctcctggccttcatcaccggccttctcgtcatcgccctggccagcttcgtcttccttcgaagcgatggcaaccagatcgacccagcccatgacttccagcttgctcagatagctgcgaaccgaggctccatacagcaggtgtgccactttctcgccaaaagcttcgatttctaccggctcaccgacggcgcagttctcgttgatgtaggcaaacaccttgccgcgaatcgaaatggcctgcggggtgccatggccgtcgccggtcgggatgaagtgggtggcgcgagggcgacgcgagccgttggacttcagttcctcgcgacgggcttcggccttcgcacggcgctcttcctgctcttccttgcggcgctgcttctcggcttcgcgctcggccttcttctgctcggccaggcgcttgcgctcttcttcacgagcgactttctgggcttcctgcgcggccttcttctcttcggccttcttggcgcgctcggcttccttctcggccttcttctgctcgcgctcggcttccttcgccttcgccttctcggcctgctcagcttccttcgccttggccttttcagcgcgctcggcttccttggcggcggccttttccttcgccttctcggcgcgctcggcttctttcttctcgcgctcggctttgcgcttctcttcgcgctcggctttcttctgctcggcttccttggccttggcttcggccttctcggcgcgctcgcgctctttacgttggcgctcagcggccttctcggccttgcgcagggcagcggcttgttccttggtcagctcttcgccttgggtctgttcgttctggtccatgttcttactccgggaatgtttgaaaggatggcttattggcctgtgagaggattatctctaaactaattgaagaagggaatacctttcgcctgaacttctctaaatatttttctttcgggaaagtccagactccagggaacttatttatgttagcgaagtttttaactcttacgcaaaaacaacaagtattcgattgcgcgagttatcccagtatacatcaactgactataagggatggacggcaagttttcttctaacatggcaacccgtttccattctgaaccctgcgacttgtggaacgtcatcgcccagccgaagtcgaatccgccaatagccttctgcgcctccagccgcacgtcttcctcgaccgaaaagctcagagggttgaacttcacccatcgttcatagttcgtgccgataatgcgaactttggcgaacaacatttcatcaggctcgtcgtcatcttcttgcccttcaggaactggcttgaagtccagcagaatggcttgttcgccgttcatgattccatattcgtgctggttcccagtgcacaccagcttctcaccgattcctggctgcacgcctttgtagccgaggattcggcgagcgcgtgcgttcaagcgacggcgagtattgttgtaagcgcaaagaatcacaccatcgttgtccaggaacgtccgcatttcatcatccgacatatcgaagccggcccggaccactatgtcatcatactcgcggcagggcaggcgctttccctggcggacgaacatcgacgcccgaacgatattgccggcgttgcgctcgatttcggtcatgatggtatcacaactgttctcgtggaagatctggacgccgcgcacaggaggcacctggccaaagtcgccgatttccaggaccggaattcggtgcgacaggaggcgctcttcatcccactcgccgatcatggacgactcgtcgagcacgaccaacttcggcttctcgtcgagcgagtctttgttggcaaacatgatttcgccgtcttcatcttcgccaatcggccgatagatgaagctgtggagggtccgggcattggtgcagcccttctcgcgaagccgcgctgctgctttcccggttggcgcgacgaagaccgtccagtccatcgagcagcaaagttcggcgatgatcttcgcgatggaagtcttaccagttccggcgaaaccagcgagtcgatagacctggcggcggtgcgctcgatcacaccaaccgcgataccagtccacaacggaattgatcgcgtcgatctgctgactgtttggtcgaaagccgaatcgctcttcgatctgatcgacggtgaagttagatgctgacatatttgcgttctccaacgctaggtttaattgaatcgaggctcagtttaagcacgccgtccacagaccagccagtatcacgacgatacttgcggccttgcgggtcgacatagaagttcttcgtgcgccgcagcagaacataatgccaagcagctccaagcgcgtggacccttcctttatacgggaaagccttcgcctgctctgcggcctctttggccccagggagccagcggacggtagaaaggaccaggaccgcacccttaatagcctgggaagcggcgcggccgtcctgtgggctatagcgatgtctatcgaagtctacccagtggtggttgccgcgccggagcttgaccgttcgggatcgcccctcgaacaccacagtgccttcgtgagttaaaatatgttccgccatcgaatgttcctttataacgtacagttatgctttacctctgcgcaggaagagtatactatcagctgactcgccaaagcgagcgaatttaatccaactttacttcggcaggaaagtggccgatactagagccgccgcctgtactgccctccaaaacagaggatacattaaatgcaagaatgcaagatttcccgcgaccaactcccggtcggtaatccgaatcccaatgtcgacaagacccgcgacccgaaccttaagcccggtttcctgcgtcgcagccgcgagctggacccggcgctggccgttcgcatccgtcgcgagctgatccacgccgaagcatccgacttggccaaggccggatgggtcaattcacagtccagcctttatggatcgaaagccttcccgcgccattccgtcgttcgcgtgaccggagttccggaagatggagctttcatcggcatgctgatcggcttcatcgagcatcgcgagcatggcgaatgggcggtcatggaagccggaacgaaagaaggcggcgccgtcattattccagtcgatcacatcatgcgagcgtcattcgccgaagccgaagagttcgccgaaaagtgggagcggaacttggggtggcgtctcctgcgccaactccgcgagtgcggcgccctggccgggactgaagacgagttcctgcggcggatcatcaatcgatacgttcgtgatcgcacgatcctcgatcaccacaaagtcggcgcggacaaaacctatactgatgcagtactcaaaagcatcggcgaaacatggccgaagattccttcggggaaattcgtcggacaccgagtcgcgcagctcctgatcggccacaagctaggtcgagcggggaccatcctgaatgacctggtggacttcctggagaagttcgcggccgggcgcgataaaattctcaacatcgccatctgtaattgaggtgaatgaaatggttgacttggaaaagctgagtccaaagctgagtcctcggcagcatgccgttctactggagatgtacaggcatcctgagcatccagttcacagatcgccaacgaatttaactcttaaggctttgagacgaagggggcttgtcgagctatcctggaaggattccgtggctggatatatgttcggtcgccaaccttgctggaaaataactgatgccggcataaggcgaatcctgggagtgctggggaataatatggaaaaagaacaaagcgaagatcgcccaagcatccctgagtttgagaagaccgacgccaacaaactctatgatgctctggagacgatttcgctgctggagaagaagttggacgaatccgaaaagcgcgggagcgagctggccgcgagctattgtgacggcgtagtcggcgatgaatacggccatccttattgtcgttataaagtggaacgcgacgccgccttggccgaagtagagcgcctgcgagaatcaaaaggcgatccctctggcagcttcgacaggtgtatgaagatgatgtacgagcgcgacgagaatgcaaaacgactcgacgccgccttggccagggtcgcggagctggaagggaagttgacggactgggtgcacgaagggttccggctcaacgaggcgctagcggtcgccaaggctcaacccagcgtgccggaaatatctggcatcggtcgcgatgccgaacatcccagagctgtagtgctgtatctgcgtaacgaacccagcgatgaagatatgcgagcaattcagaactttttgcgcgccatggccgcccccgctcagcacagcgtgccgaaagcatggctcgacgttcaggcagagcgccgccggcaggtcgaggcccaggcgctaaggcaggaagtcgcagcactgcgcgcaagggcggatgttgtgccggaggtgttcgggcttgagcggtaccgcgtagaaaaaactgggaagggtttctggccatactgcgtgcgtgcgggggatggaacgcgtgaactgttcgtcggccacttgaagcagtgtcagcgggtagcgaccgaattggctacggcgtttgaagatgggaagtttatcgccgcgcccggcagctcggctcagcacagcgtgccggaggggtggaagctcgtaccgatggacccgacatcgcagatgacctatgtcggtcagtccctgcgttatgacgcggtaaacagcatcggcgagatttaccggcaaatgctcgccgtagctccctcacccatcgatccggccgcgcatcctcagccgtgccagcaaccacaggcccatcctgcccgctgcgggtgcgagcggtaagtgccaagtaaggaattcatgtaatggaacagaagaaaccttcaccagtagatggagtcatcatgaccagcctcgacgttctccggaaagcacagcccgaagcccaggacgagtatgccgtgtccatgttcgcaacggcgatccgccagaaaatgcagcgctcccgcgataaaggccgaggcggctggatcgactgcgacgaagatattctgatcaacggattcgccgaacatgcgctgaagggaaatgagaacaacctcttggacctggcgacgttcctgatgttcatgtgggtgcgcggcatcgacgatgcgaagattcccccggcgctcgaaaaggcgcgacagcacaagatcatggaagcctggagtcgaatccatgaagatggcctaaactccgccagaaaggcgagtgctgcgcgacaattcgtggaagtgcctcgacgcaaggggcgcccggagcgacttgcatgaagcctcacgaaataagactggcacaggccgaagagttcctgcgcgaactcggccgagggattccagacgacgaacgggtgatggtcggctacgctgaagaggccacagtccaaaccgacgagaacggccgcaagctcaacgccggctggtggcctgtgccctggaaggaagggaaatacataaactcccgatccaacgcctacgcttgcatctcgtcatccatcaagacgcccaacccgaagaccggccagatgcgatactggcgcggcgaagcctctttcggccacggcctggcgttgatggtcgatgacatcggctcaggcaaagggtccaagggcgacttcgaccgcgacgagttccgcgagcgactagagccgaccgcgattgtagagacttcgccgaacaactaccagttctggtatttcttcaaagagccgatgtcacacatgctccagttcaaggcgctgctctattcgttcgtggaccaggtgctaaagaaaggcggcgacaacaccgtcaaggacgtcagccgttacggccggatgccattcggcttcaacaacaagcgcgggaaagacggcaagttcaaatatgccgacgaaaacggcaaacccgaactcgtgcgcctgtacagcgccgactattccaagcgctactcgccagaggaaatcgcgcaggccttcggcgtccgcatcattatgccacagatgaagaaggtggagataaaccgcgacgattgggtgtatgaccaagtatggctgaagtatgccgagcacatctgcacgaaatacaagatgggagaagcggcaggcggccaggtccagcagaatatgtccggcaaataccgcatccgctgtccctggggcgacgagcacaccaacggcgatcctttcggcgcatactttcgcggaccgatacctggcgccgagcacgaatatgtgttcggatgcgggcacgatacttgccgcaaagagcatcgacggacatgggcggccttcactgatgaagtcgtcctgccgtatattgtcgaacaacttgaacgcatcaaccgccgtcacatcggcgaggagtagtaactatgcaaaatgatcctggaattctgattaccgccatcggctcattgcttctcggccttctcgtcttcttcgaaggcctgaatggatggaaaataccagcgtcaaactttctcgcgtcgctcctgtgcttcttcgtcggcctttctgctttaacctgctggttcgtcttggcgtttgacgtgttttagtcgacgaacggtccggaaatttcggatagggacggaacttattagctctgccggtttaggtaggagataatagccgtccctttcgcctcaatatgtagaggcggtgttatatccgatcatgtaaagcagaaggcggcaaacctaacatgattatcgacgacgacaacattcttggtgatgataatattcttggtgatgacgaatcggggtccagtgagttcgatctcacacagatagaagatgctggaatggaccctttgatgaccgccgcaagtaaggcggccgatgatgcgattgcgaggaacgaggcgcaccgcgcgcaaaaggcggcaagatacgccgaggcgtatgctgaaccagacttgaggaagcgagcgcggttgttgatgctcgaccaggcctttgatcttccggtcagccggctggtgaaaggaccgttcgatgactttatcaccaagtacagctcgacttcagacagcaactacctcgcggtctatgatacgttgttctgtaagggcgacggaaccgtcccccacccgcacttcgacgagtttcgcggccggctggttgaccaccgaggcgtggcgttcaataacaagaccctcgaccccattgacctgatgggcgccctcgcggctgcggccttggacgatccatcgatcaagaagacgattgaaacttgctgcgtgtgggcgcgtcgatatcgccgcaactctttgatcgaaacgtttgagaagaagataccggagtgggatggtgaagagcggatcgacacgctgctgatcgacttgttcaaaccgttcgacaccgagcttaaccggatggtgagtaagtatttctggctgagcttgtactgccgcatcaactaccctggaatctcagcgccgatttcgctggcgttgattggtgggcaggatgctgggaagacttacttttcaatcttgatctgtaaagagttgtcgagcgaccgaaagttatcgccggtccagcttgacctgagccgtcatgaccagacgccatttttgcgcaatatcactggcaactcggtgatcgcgaacgtcggcgaaatgtccggcttcaaaaagggcgacatggaacgcattaaagagttcctggtgcgatccgatgatactttcgatcagaagtttgaaccaggcgaaactatcagtcgacaatggatcaccatcatggacggcaacggctatgatggtcttcaacgggatgagtcaggaaaccgtcgattttatccaatgttcgtggcgcaacttcccgacgaggatggcaagccgaattgggttaaaccgggcgatggaaatgaaactttccgcgttgacttcacagacttcggccgcaaattctggcaagccatggctgagtgccgcgcctggattaaggcgaatggcgtggagggatatctcagtctagttcgggcgaccaacaacgaagtccagaaattctctatttcggaaatggagaatgcgcgtggcgtggttcgtgatgacacgattgatatgtatctgatcaacgtgctgatcagttgcgagttcgaagagatcaagcctggcaggaattcaaagaatcctggatggagagtcaacaccatcgaaatcctgaaatggttcgatattctcgccaggaagaagccgatttctcgccacttaactccgcacctgaaggcgctaggatttgttccgaataagaatggcttgaatggctggtgcctgcctgtagataaggttgcgcctggatggaccagagatatgcacacgacgttgccgccgttcaatgatgtgcttgtatacttgctgaggaaggttgattctgaggtgactgatgaagaggcaatgattcaaatccgcaaagttaaggccgagcgcgcaaggatattgggtgaggatttctgatgtagtgatggagtgtacttggactaggccgccttcgggcggtcttttctttggtgcggagtacattcgatttcggttgtggccgagtgagattcggaagctatctggtaattagggtttggtggcgatggcgcgttgtggaaagttcgtgaacgttggatcaaggattttgtgcggtgattggatgaattgtggaaaatcgacgattctgactggatttttggggtcggccgcgccggtcttactggtaattaccgaaaccgggaatttgggtcgagccttagtgccgcgtgggcttgaagcgcttattcggatacttcccggtttcggatgcagccgcaaaagtatactacagcgaaaatcga

SEQ ID NO: 28 - DNA, 67647 bp, synthetic construct
  source 1..67647: mol_type = other DNA
ttgcacaatcctaatagaaaaaatctatcacggacgttacctatctttaaaattaataaaattaatagtaatttggtaatttggtatactttagtatttgaaagccttgcggcactaagcctgtacacttcccgtcaagtttccgattccgctcaactcgcggcagggtcgccggaaacttccggacttccaatccatgggtcgcggcaacaccacggcggactaagcggcaagtgccaaaactcgacgaacggaaccggaaatttggaagcgcgatagaatcgctcagctggacatatttctaacattcgatttaacactcaatccaaacactcaccgccatcgtctcccgccaaccgccgactcgatcctcacccaccagcggatcgcccgtataacatcctataacaccacctaacactcattcatcatcaaacccacccagacctacagcccacccacaagcagcccatagacgcgatccctggccccatagtacaatcgcgccatactcagtgtcgcggcagagcaccaggggccatccgccaaccaagccaccacgacgactccagaatcgaactcagggacgcagcaccaaatgaccaaattctacagccccgacgatctagtcacgccacaggaattcgcagacccgcatttcgcggcgatcaaccaaaagcgattcgacctgtacatcgacctgcgcgtccaaggttacagctcctggcgggtcttccgggccatctggggcgaggagcatatggacggtcccgcgcaggcccgcatcttcgcgatggagtccaacccgtactatcgcaagcagttcaaggccaagttgaacgcgaccaaaacgtccgatttgtggaatccaaagacggcgctccacgaactcctccaaatggttcgtgaccccaccgtcaaggactccagccgtctgtcggccatcaaggaattgaacgttctggctgaaatcacgttcgtggacgagtcgggcaagacccggatcggtcgcggtttggccgatttctacgcatcagaagccgaggctcagaccgcgaccgtcgctgctgcggccgaagccaatggctatgtgccggaaggtgaagagggagatttcccgtctccgtctccggaaccgaccgaggaagaccgcgccaaccccatttagacataaaataacggctaaggatttaaggtaaggaggtttatttatgagcattcaattttcgaaaattttgcttcttacggtgctcgcaacagccacgatctccaacgcccaggataaaaagtctaaaagtaagactgccaagattgattggtctcactggacagtgacggtccctgaggagaacccggacaagccaggtaagccgtattcactgggttatccggagattctcaattatgcagaggacaaaatcgcgtcaaaatacatgtacgacgatccaaaggacaaaagtgtcgtgttctacgcattcccgtccggcgtgactaccgctaacacccattacagccggtcagagttacgggaaactatggagaccgggtcaaacaaagttaactggaccttcgctaagggtggcaaaatgcgtggtacttacgctatcgacgacatcagcaaagagccggatggtaagtattcccgcgtaattatcgcccaaatccacggcgtactgaccgacgagcaacgtgatcttattgggcaaaaggacaataatgcccctccgattctcaaggtgtactgggataaaggtaaaattcgggtaaaaacgaaagttttaaaggacctgaacgccccttacaaagagatgcttctggaacacgcttggggtgatgacgaaggccggaactttaaagagaagattgacttaaatacacggttcacattggaggttaaagtgagcgatgggcggatggaagtcattcttaacgacaccgaaagtttggtctatgacgacattcacatgaaaaaatggggcattttcgaaaactactttaaagcagggaactacttccagtctaaaactccgggcacttttgcaaaagttaaaatttattcacttcaggttacccacctcgagcaccaccaccaccaccactgaagaagcgacaaagccccggactctagttcagaatccggggctttcttttgggtttcttattctccagcttcgatgatttcgaagttgtatttgacgccttcgtgctcgaaagtcaatttgccggacgctttcagctgcatgcggaatcggatgcacttagaggaaggcaaaccgaactcgatgaaggctgcgttgcaggatttgaactcgccgcgcttgcctttcacggtgaccgccacgccatgacgctcggtgcgcttgcgggcgacttccgggtctttccaggagttggcgatggctgctgacaggtctttggtctctttggttttctccggcgcgttcttcgcctcttcgcgcattttccggatttcttccagcgcttcctcttcggtgatttcttcttccggcttcagattctcttcggccttctcttctgccttcttcttggaagtgcgggttttgtaaaccttggccggggtttcctcttcctggaaggcctcttcctcggccggcagagcgttcaggatggcgaggcagcgacgctcagcggtcttgcggtcagagaagcgcttgacagtcgcatcggcgttgtgagcgttgtagaaggcgaccagttctttcatttctgcgttctggatgtcgccgaaggttttgatggagttggtcattttgcgatcctctgttttggaagatttcgtttgggcttcagtttgtcgccccgttgaaagagattatgcctaggtcgatgctgcgtgtctacatctatttcatcagattgatcacaaagccgacgaacggttgtctgatgtgaaaacaccgcagagcaggctgcggtgtttgttggcgttggggtgatgtcagaaagtcgggactgtgataggctcgatgggcggatcgccgggcctgtcgttgtccgatgcgggcgccgggctggaagggatcgcacccgaccgaagcgccagcgattccgactgcctgcttacctgcggagctggaggcgcttttggcgcatgaggcgcgggcggaaccggcaggcctggaggagccatcggcgccctgggcggctccggaagatcgggcagatcaggaagactcggcgctatgccgccaaaggaccgctgcgaccgctgcgacggattgtcgccgaacatttcggcggatcggttgtccttgatgacttgacctatggccgtcttgtcgccacccggttctgctggatcgaagcccgtgaatggagtggtaacgcagcgcatgttcggatgggtcggcagattgttcaggacgatggagtccgcccagacatacgggtttttgtggttgccgggtccgtggctgatgatctcggcaggaatatggccgttcatggtgagccattccgccatcccttgccgagtcagcgggcttaccacgatctgaccagtggactctttggcgatggcgaacagatcaccgaattcgaatccgatgattgtgtagttggacctggactcgccgacgaaagccagagtttcgatgttgtggtggatatcttggtcttcccagatgtacagcatggttcgctcctcaataaggttgcttttggtgttcgaccagagacataccggccggaactttgaagcggacgtattcgatcatcatcgccgttcgacgccgattcgtgcccgactcgtcattgacgaatagttcgcactggtgcggaatgactcgcgtcaccaggcactcacctttcgagccgtagaacttgctgtaggctgcgacgcctcgcgtcatgttcagacggatcgtttcgcagagtcgctgcgcggccgacgcgctggacagatcggtcggactgaccgtcacccagtaatggccactttgttctttatcggacataagctgccctccaatgagaaagcctctgccgagtcgcagaggctggttgttgttagtcgcgcttcaacagaacgactttgtcatatgcgcgatatttaccgcgccagtcttcccagtagtcgccggccgggcaggtaagctccagggtgatttcgtcgcgccagcattcgacagaaaggacaatcgccttgttcctggctgcggaatccgccctgagcttaatcagaatttcgtcgccagttttcaactcatcaactcttacaacttttgccatggtgttctcctattgggcagcgccgcgagggcggatcgggtcgatgtcatgtaagcagatggtaggatagtccctggccaacttgagcttgaagtccacccagtcagcgccgacaagtgccgagacttcgacacttattttgttgtgcggagcaggactggtgcgcaggactatggcccgacgccgaacgggatcgttgacgtcaacatgagtgagtatttcgtcgccgacgagcaactcacaggccatcaatattttggccatcatacactcctatgagaaggcgcggccaggacgatcccagccgcgccgatggattaacgtttgtgaaggatggacactgcgtccacgtcgaggatgctaatggtacggcgacggcgcggattgctgcgttcatggatgcgaatcaggttcgcagctggagcttcgtccaccacccatacgtcttccggtttctgcgtccggagcaggaccgtcacttcagtattctgggcgaggccgttgcagatgaaagtgaacttggacgagggagttctgtacatttcgagattcctttttggacttctggttcggcttctcagccggtgaagagattatgccctgattctcaccgccgagtaaagcatttgtgtaccaattctcccgtcaggtggaaccaaagtgcggtatcgcttatggctacgctaccgcgccatggcccttcttgctcgcacactgcgaaccacaggctgatttccatccttgccaggactcggccgaaagattcgaacctgcgccgactggacaggatgtcgacattcactcgtcgattgacctcataccggcgaccgttgatgacgaagaccagccgcagggtttgtccgtccagacattcccagtatctggtttcataccgaagccagtagcgcttgccagccgggcctaccatggtcatttaatcgatgctcctggccgcgccacgcggtccggtcggcgggacgggatcgaaccgacccaggatgtagtcgggccggcgcgcttcctgaggacacacggcgagaaggcgccatcctgcgtccagggcagactggagttcgtccgtgcagcagtcttccttgagcagcagacggttgacgttctggagattcggaccaggtatggccgatcctgtgagtgagttccaaccctcgattccactcaccatctccggttggttgatgtagcttacggacataccggccaaccggctcgcggccagctccagacgctccagcatgggtcgcagagcagcttccgggtcaatgtcgtcccagagaaggaccaggctgatgatggtatacggatagtccttgtccagatcccaggctgaagcggtcagacggcccaggccgatttcattacacatcacgggaacgtcgttgctccaggtggacggctcccagttccgctcaccaggattcccgattgttacgccttccaggttccccaggagaacgtggagcttgctgacatattccgcctccaaggctttccgctcttcgtcggtcttgttgtggcgatagaaggatggagggctgactttggcatggtagagtttcataactgttcctcggttttggaagatttgaaagttagagaatggtgtcgcagtatttctcgaaaggactctggcgcttcttctcgcagatcgcgcaggtgatttccaggtcgggcagctcgctgtaagtcttgccgagatacagccagcgcttgcacagactgcggccgtccgacgtgaagaagtggactttgcgagcattgccgggttgcgcccagccgcttggtgccggcttcctgctcataccatcaccacgtcaatttcgtcggcgaagaagttaaagccaactccatctgcgtagccagtgtaacgcagacgaatcgtcccatcaatgtgggcttcctcgacgccgatgacttccagggtggtatcgttgcagtacagcttgacgaacatcttgatgccggagccaatcgccgcgaaggcgatctgcttgtacaggtcttgcttgatcatgctttacgctcctgtttgcggatgtattctgccctgacttcggcttcgaacttcgcccagagcgcgttgtctactggaccccagggaccggtctgagttccgtccaccggttcgaacttgccaccggcgcggcgatatttggacagagttttcaggctgatgatcttctcatcttgggaatcgaattggacgatcatttgacgtacttcccgaagtagcaggtgtggatgatttccagaccattggagatagccttcagcttgatgccgaaattcttgatcgcccagtccagatcgtggtgatagaactcgatgatgttgacgatttgaccggcgctgtagtggatgacgcgaaccttgccgttccagcggaagtcttcgcggctgtttacggcctcgactgcgatggtgtcgtttctgccgatgttccatttggagctagtcatgtcgcaatcctctttttggagtgtttcgcgtttcgatgaggtaactatacctcagtcacctcatcgagtaaagcacttttgaacatattatctgaaatttctgtgagacggatccatcggcggattcagtcagtggaaccgagactccatccgttgcgggcgaaggccgagcgaccagacagcttgcggcactggatggagctgccatcgtcgaaggtgtaagatacggcccagtccaggcgctcgcgacgcactgacgccgcagcgatatcttccagacgggctttgagaagctgttctgctttggtcatttcgagttcctctttggggcgcttcgtgtttcgatgagatgactataactcagtcacctcatcgagtaaagcgcttctgaggaattatctgaagtttctggaggccagaaattgccgccagagccagtcaacgtgatcgttgaggtagcgctcgccatcggacgacagagccaggcatccatcctttatgccgagcttggaactggaaatccattcgaactcgaactggagcgttcctgggcgagggatatgggacaggctgtacttttgcacggtcaggaatcctctaaaggtttggagttcgcgatggacgcgactttctgcatgccgatgcgatagaattcggcctcttccctggccttggccagctgctccctggcttcgcacgccagcttgtgctggttattggcattctggatgcttccgtccagactcctgtccaactcttcccgaagagccttctgcgacgctagctcggcctccaaatcctggattctgatctgaagctggcgattcctttcagaaacatcgttttcgcgagcgatggaattctgaaggcattcgtcaaggcgagtattttcgcgcaccagttgatgcttttctactttcgcctttctgcacgtctctcgcattgctgaaagctcactcgcatgcagatcgtcatccgggtctttacgctcttccttcgactccatccgcaggtagtactggccggctgcgaaggcgagcactgcctggtcggcatacgctgcggcatcggtcatgtatctggatttgtagcgaggcagaaacttgcactcctctggatcccagaggagactatcggcaataggccagaatttgcggaaaccatcaggatcgacttctacattgaccatttgcagctggccggcctccacttcgacttccagaggaacctgaatagtgccggtgatgtactggaagtacactatgctagacataacacaaactccatgagaagtcgcggccgggaccatcctggccgcgcatcgtaatcaatcttcgccttcgtccgcgctcagccactcttcgaaggcgaagtttaccttcgactcgacccaatcctgaagctcatcggcgaactcgtcactgtcgatgtccatggtgatgcccatgacttccatgttccatagcgcggcattcagttcaaactgcaccatccgctcgccatcgacttccataaggatgcggtctgcgacttcatagtcgtctacatcgaacaggtggccgccagtcaggaggtgctggacgaaagcttcatcgaggttggtgacttcgatctggacttgtttggtcattttctgcgatcctctgttttggagtttgggcgcccggcgaaccggggcagggtgtttagcgcggagagtgccgatcttccaattttcaagctcgtcttgcgctgcgatctcaatatctaacagcgcttcctgccgctcgcctgccgctcgcctgcggtaagggtagagttccaagccaaatccttgatggccttgatgatttccttctttgtcatggtcatgcccgtggctcctatgtgcggcgggttggttaggcgaacagaaggcgattgacagcagcgtccacgtcccagccgcaagcgaacagcgccatcgcggcttcgtattcggttgcaaagccggtgtctgccatgaccacttcaacggcggttttgctgtaatgctttgaaagtttcagggcggcgagagagtccgctttgtcggccacagcacaagcctcttgaacagtttcaaatcggcccacctctttgcagcgattttccagaacggcccagccaaagacgttaccagcgccatcagtgattttgtgtactgtgttcatcgtcttaccctccaggtgtttgttcgtttcgatgaggagattatgccgatagtcagaatggaagtaaagtgtctgagtgagaaaaattctgcacaccgacgaacggttgtgctcgaccgtctgctgcggtgtcgatatactcggcctattgcgaacaatggactgattaaatgtacaaactcaatcctgcgctgcgagcggtctggcgaactcgtgcccgttacaaagtcatctatggcggccgggcgtcttcgaagtcacacgacgcaggcggtatcgccgttttcctcgcggccaactacaagctaaagttcctctgtgctcgccagtttcagaaccgcatcagcgaatcggtctacacgttgatcaaggacaagatcgaaaactcagagtataatggcgaattcatcttcaccaagaactctatcaagcacaagagtaccgggtcagagttcctattctatgggatcgcccgtaacctgtcggaaatcaagtccaccgaaggcatcgacattctctggcttgaggaagctcactatctgacccaggagcaatgggaagtcatcgagccgaccatccggaaagagaactcagaaatctggatcatcttcaacccgaacgaagtgaccgacttcgtgtatcagaacttcgtggtcaagccaccgaaagattcctgcgtcaagatgatcaactggaatgaaaatccgttcctcagtgagacgatgctcaaagtcattcacgaagcatatgagcgcgaccgggagcaggccgagcacatttatggcggaattccgaagactggtggcgacaaatccgtcatcaatctcaagttcattcttgcggccatcgacgcccacaagaaactcggctgggagccggccggatcgaagcgcatcggcttcgacgttgcggacgacggcgaggatgcgaacgcaactacgctcatgcacggcaacgtcattatggaagtggacgaatgggacggcctggaagatgaactgctcaagtcgtccagccgcgtttacaacctggcgaagatgaaaggcgcctcggtcacttatgactccatcggcgtcggcgctcacgtcggatcgaagttcgccgagttgaacgatgccagtcccgacttcaaactgatctatgatccattcaacgcgggcggcgctgtcgataagcctgatgatatctacatgaagctgccgcacacgacgatcaagaacaaagaccacttcagcaacatcaaggcgcagaagtgggaagaagtcgcgacccgattccggaagacttatgaagcggttgagcatggaaaggtttatcccttcgacgaattgatttcgatcaactctgaaacgattcacccggacaaactaaatcaactgtgtatcgaactttcgtcgccgcgcaaagacctggacatgaacggccggttcaaagtcgagtccaagaaggatatgcgcgagaaacgcaagatcaagtcgccgaacatcgctgactcggtgattatgtcggccattctgccgatccggaagcccaaaggtttcttcgacttctaaacacagaaaagcccggatcgctccgggcttcgggtcttactcggtgtggttcctggcgctgagtgtcgacgcaacggcctcgccgactcccagggcttcctggccggccgcgagcgcttcggcttccgactcgacgatgaagtcatcaccttggccgtcgcctggcggaacctcgaccagcacggcttcttcgccttcgaaccgcaggtcataagtcttttcgacggacagtccgtaacgggcattgagcgcatcccagagctgagcttcatagttgcgcaggtcttgcagagatttctggtggctgagcatcgccatatcgacggcccgttgcagggtttcgtccaggacgttgaatcgcatgcgaagagaacgaatccgctcgaccacttccgcatccactacatgtctttcgatcatcgcttttcacctttgctgaatgttacgttgtagccattgtcggccaggtaggtcagggcgccttcgaaggaagttccgacgagatgcttgagctgcatttcgcgttgcgcggcgatccagaatgccgttccggagaactctgcgtggccttccgacaataccttgccatcaggcccgtcgatccgaacgtgaacggaagatagcttcagtaccatcaatgaatccctccactggcttgcgacggcatgctttcagcgcgagcggcttcacagtccgggcagggacaggcttggcggacgcgctccaactcgtcggcatccatgacatagagcttcccatcggaagtgtcgtgcgccatggcgatgttcgggaagtcggcagcgctcaggccggcgacagcgcggatttcgtcccagagcgccacatgctcggcattcaggcgagctgcgagcgcttcgtgctctttcgctacacgagccatgaactcgtccatccggaatgcgaattccgcatcgatggatcgggccgaggccatggagttgaggcgaatcggttctttcttcatggtaattctcttttggttggcggttgttcgctgctcaggcctattacagtctgagcagcatgatgaagatgaacgcaaggaacgcaaacggcacaagtatgccggacatcagctttgacaggcgctgcatctcagcgtatttctcggttgacattccgtgctgcgccgcctcagctgcgaagcgggctttcgcctcgataacttccgggcgcagcgacaggacatattctaaggcctcttcccgcgctttttcggcctcgaccgacctagggtcgcgggccgagacttcgctgtgccctggcctcgcgggatgggcctgcagcgatggaggaagttcggcggccacgactccatagtcggcgcaggcccaagcgatcccgatgaggatcgcgaggatggattggacgattcgcagcataactttgtcgctagggaagctcatgatcaatcctccacagaccgaacgatttccaggttgcgcccggcattggtcccggcattgaaggcgcgccgaccgtcgctatcgtccaggcgcatgagcttggtaacatttgacttcttgtagccaggatcgccgaaatgttcgtgcaccgcagcttccttcaccacaaccagagacgttccggcagaagataccagctccatgcgcttcctggtgatggcctgaaggcgatagctgatttcctgggtcgcggccagcttgaattgcgcggcaaccttgacgttgaatcgtccgtatccttgagccttctgatactcccggcacagacgatcaaccgcttcgacaagggagttgaacatgttcaccgccagctcaacgtccgatttgtagcctttaaagcggacggcatgcccccagcgcttcgtagtcccgccgtttgcggcgtgccaagaagccttggcggtcgctcggtgatcgttgatgccaccggcgaaatccatgatgcagtcgttgtacgtcgccacggccaccgagaagaacttcatccagttcgggattgcggaatagtaacgagtcgcgatctgctcatcgaactcttcgcgaatctcgccggtcacttcgaagtcgtgaaggtcatatttgtccttcagcttcttcacacgctcggctgcaatggcggcttcgtgcgggctggaggagtcggccgccatggcagtcagtttgcggatgcggtctttcgccttctcgatggcttccggggtgaattcgttctggtcggtcatggtcggttcctttgtctgaagggtttcgcgtttcaatggagctattctgccttcattcagaattgaagtaaagcactttcttccactatttcggcatcgactggaagaaattccagatccaatcacctgctaccagcaagaggatgagggcggcaaagaacaagacagcggccgcgagctgtgcgcccggcttcagtttgggatggctgagcttgggctctacgggaacggccggagcgctagcgctgcaaccggcgtctcctgggccgtagccgatgccgcgttcacacgcctggagcgacaccagggatttaagatactcggtctgcttttgcgactcttcgtagatgccggcgacggcgaaccagagggcgaacactacggacgtacacacaacccaggcgccggtcagcaggagggccagcgggccgatgacgaagacggtagcagccaggacgattgcgccgccccagatgatgaagccggccagaccattagtgatgtcgacacagaactttttcattttcagattccttcggttacgggatggaggggatttgaaactctgcgccgccgagaacatcaatgacgacttcccagagcgtcggaacagaccactggtaacggtcgaagtcggtttcaggatcgacgcccagcgtcacataggaagtggcaggccatttatgaacactgcctttccgcatgagagtcgccacgcggccgtcaccgagcggattcgttctgtgcggaacgtacgcagacatcgaatattgctgcccggcgtcgacaacaaatctttgcctctggcgcagacatacagagcccacaggattccagccgcgaccgccgcaagcctggcgagccgaagagtgttcataaccttcgtgagtcatttcgccgaggcaagccgagcgatcctcgtaatagttgatgttctccatcgatccaaccagtaccagagactcgaaatcgaatctatgatcgtggatggccgagtgattgaagcaaagccggcgcggcaactccgggtgccaaacatggaggcgccctgccgggagctggacttgaatgaaccccaggccgtgcagcgtgatcttgtccttcatcgggtcatggacggtgctcatggataatcctcagtagcagaaatgtatggtgagagttacgatggccaagccggtcgcccataggagggcgaaccaggccatggctttgatggttatgtagatcatccgaagaactttccggcacagatcggtccaatgcccatttcgatggatgcgtggttggtcaactcgcgaccgcagcaggagcattgaccagtcttccggccgtaggcgactgccgattccatcggcttttcaaacatcttcagaacgtcgtcatgctcagtgtcggtgcagtcgcgactcttgatgaatttgccattggtgatccggccgaggtagatgtcgcccaagacgtacaagctaccggcgttccggctgtgagcgctagcctctttcacaataacgatgagcggctcctcgccttcgccagccaggcggattttcgggcgcttgatgccagattctttcgccttctcaaacgccttctcgatgccggaaatgtccagagtcggtgcagcagcttcctgcgcggccactttctcgcgatatttggcgaggttttcgatggcgcgcttcgcagcagcgatctgattttctgtcaaggagccgtatttatacaacgactcctgaaggctctgagcgaagctgaaggaatttccagtccaccactcgacgatgtccgggtgcgcagcttcgaaggctttaattttgaggtcgcgctcttgcgcagcgctacatattttctcgatgcgcttttctgccgccttagcacgactcttggcgcgctgctccgggctggttttgtactctttgtatccaacaccgccgcaggcgaagcaggcgcgaccataagacgaagggccacggtacaggccggtgcctgcgcatttggtgcacttgtcgcgatacagcttcacttccttccgggaattcgggcgagcgcccatggacgcgtcttccagggtcttcggcgcttcgttgttgatcgctacggtagcgaagtcgtcacccaggtcttcgaagccggtgaacagattctctgctgcgttcatatcgattctcctgtttggaaagttcgtttcgatgggttgactatacgccagaaatggaaaacggtagcactttcgcactaccgttcgtcggatcgcagagggtcaggctacacggatcaactgcgacatgactgccaggttccgctcggcgacgccgatgatgacgttggttccgatgatgaacttccaagggtcttccctgttcttgtcgtagaacggatttctgaacagggtccgccatgtctcttcagtgaagaacgttttatggtccaggtcttggtgggcgatgttggagttgtagaatggaacaacgacattgagcgtcgcgccgactgccatggcccgctgcaggtctttcaccaaatcgatgacctgggctccggtgagatgttcgaagaagtgaaatgcgtagaccgccgtcaattcgccgtcttcatacggcactcggccgctggcgccgtcccagttcggccagtcgagcgattcgacgccgggaatcggcgaattgcctgcgcccaggtttactgcgcggcggtgatccggctcgatcaactgagcgatgtcgcgcttcatgccgagtttgaacaggttttgaatatccatttggttctccaggttgctgttagtaaatgtcgctgttgatcttgaatccatgctcagcgccgtcgttgtggtcgtactcagcatagctgtcgcagtagtcattcaaatgctgaatgatgccaagaacgtcgttcgcggccttgtgccgtttcgcggcgatggtcttggcgatgttgtcgccgacttccagggtttcggccgtccggcgatggatcagcaggcgactccaaagatagagccggacgcgacgaatgatgtcgcgatggcgctccagtcgtccgtgcaactcttcaatttcgtgctcgcgagattttaatactcgtcgaagctgctgaacttctaattccaaatcggccttagtagccatgttcacctcaaaaaggaaaatcgtctgggactccaggaagctcgacgactattgttgagcctgatcgatctagaatgcatccgaccgagccagccctgtggggatagggtctacacgaactataacaggtgacttccatgactattcgccaggtcgatcctccacaccatctacaaattggcggtcgcttcgacttcagttttcgttcgtccaagacggcgcgtctgtcgcaggaaaggcagcgcgccttaaccgacgtaaccatgggtatagtcgatcattcggatgaggccatcatcctctgattccctcgacttcagaccgcccaaagagtccgactggccgttgcatttcgcatcgatatccatcgaagacaagaatcctgccgatactacggtgatatcaactttgtcgccggccttcttgaagtcttcgcactcagcatcgagggccacaaccgcactcgcagccatgttcacatgacttatgaggtcggggaagatcacaggaacttcacgcgacatgccacggaccgtcatcttcagtactacatacttcatactcactatcccttttgtatgtgaggaaagaatttgctgttttccggatggtggaagcgctcggccgcaggctgtctttcttccggacattgaatcgtcgaaggcgggaaaaccgcgccggcgataatcgccgcgaggagtgcagcggatgtcgacatccagagggcggtttccaggctcacccgaacttccggacggcgcggcttcattcgctccaccctcttcccggttcataggatggtagactgccgccgcgaacccagtcgtcccacatgtggttcagaccagtcggtggctggggcggcggactgtagaatccgggagtctcagtgctgctcaggaaataaggtgtgcaaacggcctggacggccagttggtgccgctcccacatcttatcaatcgctcttagcatgacgtcttcgcactgagtcttactgtcgaaccgtctgctagtatggtccggtatctggacacatccgtctccagtgcaaaggaaagcagtagcaatccatacggtgatactcgccatttcgtcacctctttagttgatgagcagagtctattccatctgctcgccaggagtaaagcgcttttcgtcgggataaatgccgatgatgtctgcgtcgagcatccaaatgtccacggacggatcgtcgctgctgatttgatatagattgtacagctcccgtccgcctacagcacgctcgcctcgcggctcaaccgccagaaccttgccgtggccttctccgtgctcgtccaggtatatgacgtgatcaccgacttcatagctttctttcgtgacgaggcgtgaacgcgagttgttctgcgattcaaccacccaggaatccagcacgccgcctttcatgtcgcggaacaatcttgccgatttgtcgcaatcgaacacgcccagaacttcgccgtctttcaacacgatgtgtacgataggaagaagagtattcatgtttaatctccattgactgataattagagtctaatctgccgaaaagttcccgtaaagaattatttctcagaactgattagttgtaactgttaatctgatgtatgtgtttgaatctcttttgaacgtttgatgtttcccctataataagcgcacacagccaacaaccacgtggaactacaatgtttaaactttcctggatattcgggcgcaaaaaggatagtgctgcctgttctgaatcggcgccggagaaagtcgcacaaatccctcaacacgatccgctcgaccctatgattaagctgggcagaattcgcggctggaacgtcgagccggagaaagccccggtcatccgtagcgtgaaggattttctggaaccgggcctatccgtcgcaatggacagcgcgtatggtgacggaccgactccggccgcgaaggttgctgcgggcggccagaatccctatgtcgtcccgaccatgctgcaggattggtacaactcccaaggtttcatcggacaccaagcttgcgccatcatttcccagcactggttggtagacaaggcttgttccatgtccggcgaagacgccgcacggaacggatgggaactcaagtcggacggccggaagctatccgatgaacaaagcgcgctgatcgcccggcgcgacatggagttccgcgtcaaagacaaccttgtcgagctgaaccgattcaaaaacgtcttcggcgttcgtatcgcactgttcgtcgtggagtccgacgatccggactactatgagaaaccgttcaatccggatggaatcacgcccggctcctacaagggaatctcccaggtcgatccatattgggcgatgccgcagcttactgctgcctcgacggccgatccgtctgccgaacatttctatgagccggatttctggatcatcagcgggaagaagtatcaccgcagtcacctggtcgtcgttcgtggaccgcagccgccagatatcctgaagcccacatatctattcggcggcatcccgctcacccagagaatctatgagcgcgtgtatgcagcggaacggacggcgaacgaagccccgctgcttgccatgtcgaagcgaaccagcaccattcacgttgacgtggaaaaggccatcgcgaatgaagacgctttcaatgctcgcctggcgttctggatcgccaaccgtgataaccacggcgtgaaagttctgggaattgacgaaggcatggagcagttcgacacgaacctggccgacttcgacagcatcattatgaaccaatatcagctggtcgcggccatcgccaagactccagccacgaagctcctcggcacttctccaaaaggattcaacgccactggtgagcacgaaacgatttcttatcacgaagaactggaatccattcaagagcacatattcgacccacttctcgaacgtcactatttgcttctggcgaagtcggaagaaatcgatgtgcagctggaaatcgtctggaatcctgtagactccacgtccagccagcaacaagccgaattgaacaacaagaaggccgctaccgacgaaatctacatcaactctggcgttgtgtctccggatgaagttcgcgagcgtctgcgcgacgatccgcgttccggctacaaccgactcaccgacgatcaggcagaaaccgaaccgggcatgtctccggaaaacctggccgaattcgagaaggccggtgcacagtcggtcaaggcgaaaggcgaagccgagcgagccgaagcccaggcgggagccgtagagggcgcaggcggcccggttcccgccgctccacgcgcgactaagcctctcgcgaaggcggccgaggaaggggccagcgaggccgctgaaccgccgtcgcggccggaccccaaggccgagctgcggaacttgttggtcgatcttttgtcgaagctccaagacctggacgacattaaggcgccggacggcgtagacatagagcacaatgatgcgcctggcttaaagcgcacgtccaaacctggcgtgtctggcatggagccttcagtgttttcgtccaaccgcatcgtcgggcctcgtgatcattcggaactccagagaatcaaggtgaatggaataaccaccttgatcgaaaatccgcgaggaagcattcgacaaggaaaggatgggagttggcgagttcagatgaaacaccactacgggttcatcaagggaacgaaaggcgctgatggggatgaagtcgattgcttcgtcggtccgaatctgggatccaaacgggtcttcgtcgtcaaccaggtgaacaaggaaggtcagtttgacgagcacaagtgcatgctcggcttcaacaacatcaacgatgcgaagtccggatatctgtcctgcttccgtccgggctgggatggtctcggctccatccatgaagttgacctgcccgctttccgtcgctggctggcgaacggcgacaccaccaaaccattcgggggcgagtgatggcattcaaggcctccaaaaagcgcgagcgccgggcacctcttccagtcggaagagggaagcccataattccatcggcaggaatcgaggcctggtatcgaaagcagatgaaggatatgtccaagctcatgatctccgactatcgaaacgagattgagaaggcgctgtcccagcctgcggccgaacggttcttcgccagagacgaatccgttaacgtcctgttcaagatgacccttcgaagcctacagcagcgatggagccgcatttttgaaggtttcgcggccaagatcgccccagagttcgtcaaccggaccgaagaagccgccactgccgcgacccttcacagcttgtcggtggccggcgtcgatcagccacgagctgcgtataatgagagcgtcaggaacaccctggaggccgcaaccacttacaatcatactctcatcaccaagatccaagaggaagtccacgagaagatttacacatcagtaatgctgtctctgacttccccgaatccggaagagcaaggaacttccggcataactaacgcacttcgcaaagtcgggaagttttctgaagatcgaatcgaactcatcgcaagagatcaaacaagcaagctttacagttctctgagcgatgagagaatggcggaaaatggagtcgaggagttcgagtggctacactcttctgccggcaagactcctcgccacacccacctggagaaagatgggaagaggttcaagctgaatgaccccagactttgggagggtccgaaagcagaccaggggccgccaggatgggcgattaactgtagatgcagaaagataccagtcatttgacgtcgataggagcgctatatgccgttagttcatggcacttccaatgaggctcgttctgaaaacatcaagcgggaaatcgaagccggtaaagacccaaagcaggctgcggccatcgcttattccatccagcgcagtgagaaagggaagacggcgaaagattgttcgcctgagctcgtcgccgatcttcgcgccctggtggacgctctgtcgaggctcgtgaaatgaaccgcaagacgtgccggcgccgactcgtggtcgatgtaatcagggccaatattcacggcggattcttcagcctgaagtttgccgccatcgatttggcaatcatcggcttcgccatcttgatggcttttggccgatgatgctgagaaaatctggattctgactaaaaattctagtccggatagccgcaaattaccgtttacggaaaatggcagtaatttggaaatcctactgccgcgaggctttaacagagccagttcctaatttccgatttagccgcatgcttcaaaagtatatagcctgggaaattagaagtaacgttccaatagaattcatctataagcaacgttataatataacgtcaatctatatgctctagacgtattgaaattcaatttttaatcggtaaattggtaatttgaattagtttagaagttgaaagtctcgcggcagtaggcttagacaaatcccgtcaagtttccgagaccaaattaccggattttcgcggctgaggaaactggtaattagatcataatacaaattataatgtaagttaacagtcgcggctacatctaattattgttccgcttatttacccttagatgtactgcgtatataatacagccatagtccacgactcttcgaattaacgatggcaaagtcgaaaagaaaaattgacgaaaatggatatatgaccatagagggctgcccgatcagctcttatggcgttttccaatattctgctggtcaactcggtcttccgggcgatccgacgcggattgtcaacgtatatcgcccggagtctgccgtcagcgatccggagtacatcgaatctctgaagaatctcccgttgatcgacgagcatgagatgctgtcgggattcgacgatgatgacgatagcgtggcccccgaagacaaaggggtggagggcatcatcacatccaacgcttactacgaagccccatgggcacgcggcgatatccgcatctattcccgcaacatgcagaatcagctggaaaggggcaaagaagacctgtccctaggctatagttgccgctacactgagcaacccggcatctggaacggaacgccttatgaagtcgtccaggacaagatgcgcggcaaccacattgccctggtaaaagagggtcgtgtgccgggggccagagtattggatggtctgtgttttgaccatctcagttttgatttcagaccatccgatgagggtaatgaaatgagtctcaagaaagccaagcggaagccccctgtccagcgcgtagggcaagctgctgactcggcggtcgaagagttgcgcgccctgtggccgaagctatctgcgtctgtccagaagttcctgggcgaagaagagcaggagccggagcatcaggaaggcgcagctccggccgaaccgaccgacagcgagcacctgaccgagcatccgactctggaaggtgctcagaaggatgacgaagagcaggaagaggagccttccgttgtcgatccggccgtggccgccgtcgagccggagcatcaagaaggtgccgcatccgaaatgtccggtgaaggcgaagtcgccgaactgatctctcaagtcaaggccattctggctcgactggagggcacggtagccgaaggggcggacgaagagcatggcgaaggtcaagatgtcgtcgagggcttggaagagcagagcagcctcagcggcgcgcaaaccgccagcgacgatggtggtgagggcaaggataacagcgaggaacttcctgaaatggcacagaagaacgcgcaagatgctgcaattcgcggtctctatcgcgacattgctgctaaagatcgcctctacaagcgtcttagctccgtggttggtgcgttcgatcaccgagctatggactcggctgaagtcgctgtttacggcgtgaagaagctgaatatcagctgcgcgaagggccaggaagcactggcgctcgacatgtacctgaaaggtgtcgaagccgcgcgcggcgcggccagccgtcaatcgaaagcccaggattcggccggttctgctccgcagtgcgccgagctggacagctacctgaagggggagtaactcatgttccagaaacaagtttaccgccagtacactcctggttttccgggcgatctgatcgaggacggcccgaagcgggcgcggccgggtcgaatcatgtctctgtctgccgtaaatccggctgccaccgccaccggccccaaccgcatcagtcgcgctttcggttacgccggtgacgtcagctccctcggcgaaggtcagccgaagactatcgcggctcgcgcttctgaagtcgtgatcggcggcgccaacttctttggtgtcctcggtcatccgaagcactatgcgctgttcggttcggccggagactccctggctcccagctatgatctgcccgatggcgccgaaggcgagttcttcgacatggccaccggcctggtcgtcgaaattttcaacggcgccgcaaccgccctggacctggactatggtgacctggtcgcctatgtaccaaacaacctgcctaccgccgacaacgcgcttggcctgccggccggcgccctggttggcttcaaggctggctccatgccgaccggcttggtccagattcccaacgcacgcatcgttaacgccatcagtctgccggcccagtcggcggggaatctggttgctggcgttaccatcgtccagctcacgcagtaaggaggcgtcatgagccagatcagcaagacccattcgcgcctcgcaggccgcaatgcgaaacctttcgacctgaaaaacatcaccaatgacgccgtggcgtctctgcgccgcatcggcctggtattcgatcacgccgtcgtccaggaccagatcaaggccttggcgaaggccggcgcgttccgctccggctcggccatggacagcaacttcaccgccccggtgaccacgccgtccatcccgactcccatccagttcctgcagacctggttgccgggcttcgtgaaggttatgaccgctgcacggaagatcgacgaaatcatcggcatcgataccgttggctcctgggaagatcaagaaatcgtccagggcatcgtggagccggccggcactgcggtggaatacggcgaccacaccaacatcccgctgaccagctggaacgccaacttcgaacgtcgcaccatcgttcgtggcgagctgggtatgatggtgggcaccctggaagagggtcgtgcctcggccatccggctgaacagcgccgaaaccaaacgccaacaggcggccatcggtctggaaatcttccgcaacgccatcggcttttatggctggcagagcggcctgggcaaccgcacctatggtttcctgaacgatcccaacctgccggcattccagaccccgccgagccagggctggtccactgccgactgggcaggcatcatcggcgacatccgcgaggccgttcgccagctgcgtattcagagccaagatcagatcgatccgaaggcggaaaagatcactctggccctggccaccagcaaggtggactacctgtcggtaaccacgccttacggcatttcggtttcggactggatcgaacagacctatccgaaaatgcggatcgtgtcggctccggaattgtccggcgtccagatgaaaaaccaagagccggaagatgctctggtgctcttcgtcgaagacgtgaacgcggccgtcgatggcagcaccgatggcggcagcgtgttcagccagctggtacagagcaagttcatcaccctgggtgtcgaaaagcgggcgaagtcgtacgtggaagacttctccaacggcaccgccggtgcgctgtgcaagcgtccgtgggctgtggtgcgctacctcggcatctaacagatgcctattcaccaaaggccgggcttccggcctttgttcactctgactctaactcggttgtaggggccggttagggcataattactaggactacgccaatgactgtttatatcgtttcctccatgactcaatcggtgtcttacaatgcgtatgacacctctgatccgtccaatcctcgcctccagcgaaagattctgattcgcggccgcgcaggcatcgcatccgaaacttccggcttcggcgacatgatttccgacgaggcaggacgtccgatctggaccccacagggcgattgcactgccgtgagcgattcggatttcgagctgcttcaggccaataagattttcatgcgtcacatggagaagggttatctgcgagtcgtgaagaccgacatcaccagtgaccaccagcggatttccaaagagactcgcaccatggagcgcgatggattccagcctctggatgctactcgcctgcagcagaaaatcaaggtgaccacagccagcgcttcccaggaacaagagttccggatttaaccgagggtttcggtatggtgattttcgacgaaaataagtttcgcacgctgtttccggagtttgctgatccagccgcttatccggacgtgcgcctgcagatgtatttcgacattgcgtgcgaattcatttctgatcgcgattcgccataccggattctcaatggcaaagccctggaagcgtgcctgtatcttctgaccgcccacctcctgtcgctgtccacgatgcaagttcagggcgcggctggaggtggcgtcaccgccggtggaacccaaggcggtttcatcaccagcgctacggtcggcgaggtcagcgtggccaagctcgcgcccccggccaagaatggttggcagtggtggctttccgggacgccttatggccaagagttgtgggcgctcctcagcgtcaaagcggtgggcggattctacatcggcggtcttccagagcgccgaggcttccggaaggttggagggacgttctggtgatccctggtgcgaatcttctgcgaatggccttcggggtcatcggtactcaaattgtgaaatatcgcaagtttgagcagcgagtgaagaatgatcaagcccagtatgtctccatgttcggggagcctttcgacctggcagcgtctgtccagcgagtccgacgcgatcagtatgcccagtttaatctggagttccaacggaattatgttatgatcttcgccaactttgatatggttgacttggatcgcaatatggccggtgaccagttcctctggactggaagagtttttcagctggagtctcaaggctcctggttttatcaggacggctggggagtttgcctggccgtggatatcggtgcggccaagttcaccgatgacgggaaaccgactttctaggtggtgtatgtttgacggcgaactgatagcgaaaatggttgtcgagctgaatgcggcgatggcatctgctcaagaggctttgcagttcccggattttgaagtcgtccagaaagctcagccgacccaacaggggacgtcaaccaggccgaccatctttttccagaaactgtttgacattcctcgcggctggcctgccaccgattggtacctggacaacacggcccgcaaatatgtggaaataactcgacagcatgtagagacgactttccagatcagttcccttcattggcagaatcctgaaatcactcacgtggttacggcttctgatatcgccaactatgtgagagcttatttccaagctcgatccacaattgagcgcgtaaaggaactggacttcctcattcttcgcgtgtctcaaatttccaacgaggcattcgagaacgacaatcaccagttcgaattccacccaagttttgacatggttgtcacttacaaccaatatattcgcctgtacgaaaacgcagcatattcggccgatggggtattgataggcatatgagtctgaggcgcgattcagagctaatcgccgcgcacctccagatgttaagagccatgcgcggcaggtccgtttcagccggatggtattccacggctcgatatcctgacaaggcaggcggatcggtcggaatacaagtcgcgagaatcgcacgtctcaatgagtacggcggaactatcgaccatccgggcgggaccaggtatattagggacgccattgttcggggccggtttgttggcgttcggttcgtcagaaacgactttccgggagaaaccgaggtaactaagcctcacagaattaccatcccggctagaccgtttatgcgatatgcttggaacttgttttccgcagatcgcgccgcaatccagaaccggatagccatgaggctggccagaggacagatcactccagatcaagctcttgcccagatcggcctggcattggaaggatacatagccagaagcatcaggaccgggccatgggtggctaactcagcatctacggtcaggagaaagggattcaacagaccgctggtcgatacggcgcacatgcttcaatcgattagcagcagagtaacataaccaggagatcatccagtgatcagtcagagccgttatatccggatcatttcgggcgtaggcgcaggcgctccggtcgcaggccgaaagctgattctgcgcgtcatgactaccaacaacgtcatcccgcccggaatcgtcatcgagttcgacaacgccaacgcagtcctgtcatacttcggcgcgcagtcggaagagtatcagcgggctgcggcttatttcaagttcatcagtaaaagcgtgaattcgccgtccagcatcagcttcgctcgctgggtaaacaccgccatcgcgccgatggttgttggtgacaatctgccgaagaccatcgccgatttcgccggcttctcagcaggggttctgaccatcatggtcggcgcggccgaacagaacatcaccgccatcgatacgtccgccgcgacttctatggacaacgtggcgtcgatcatccagaccgaaatccgcaagaacgctgacccgcagctggcccaggctaccgttacctggaatcagaacaccaaccagttcaccttggtcggcgccaccattggcaccggcgttctggccgtggcgaaatctgccgacccccaggacatgtccactgccctcggctggtccacctccaacgtcgtcaacgtcgccggccaggctgccgatcttcccgacgcggccgttgccaagagcaccaatgtcagcaacaacttcggttcgttcctgttcgccggtgcgccgctcgacaatgaccagatcaaggccgtgtcggcctggaacgcggctcagaacaaccagttcatctacacggtcgctacttccctggcgaacctcggcactcttttcaccttggtgaatggcaacgccgggaccgccctgaacgtgctgtcggcgactgctgccaacgacttcgtggagcagtgccccagcgagattctggccgccaccaactacgatgagccgggcgcttcgcaaaactacatgtactaccaattccctggccgcaacatcaccgtttccgacgataccgttgcgaacaccgtcgacaagagccggggcaactacatcggcgtcacccaggccaatggccagcaactcgcgttctaccagcgcggcattctgtgcggcggtccgaccgatgcggtggacatgaacgtctatgccaacgaaatctggctgaagtcggctatcgctcaagcgctcctggacctgttcctgaacgtcaatgcggttccggcgagcagcactggcgaggcgatgaccctggcggtgctgcagccggttctggacaaggcgactgccaacggcacgttcacctacggcaaggaaatcagcgccgtccagcagcagtacatcacccaagtcaccggtgatcgccgcgcctggcgtcaagtccaaaccctgggttactggatcaacatcaccttctccagctatatcaacagcaacactggcttgaccgagtggaaggccaactacacgctgatctattcgaagggcgatgccatccgcttcgtcgaagggtcggatgtgatgatctaatggtttgcggcggactcgatccgccgcaaccttccataaatggagtgaggaataagcaatgatcaacatttctgcgttcggctcgatctgccagttcacggcaagcagaactttcccgaacggattcaccgtcaccgagttcgccgacgatgccgatcccatcgacagcccgccgttcaccgctgccgataccggcgtcggtctcaacggtgacatggtagtttggaaccgggcgaacatcctggaagtagtcgtcaacgtcattccgaataccgagggcgagcgcaacctggcagtcctgctggatgccaaccgcaccggaaaggacaagtcgggcgctcgtgatgtcgtcggtctggtcgtggcgatgccggacggcagcaaaatcacctgcaccaacggcacccccatcgacggcgttctgatcaacgcggtggcaagcgtcggccgtctgaagaccaagccgtatcggttccgatttgaaaaagtgatcaaagccggtactagctgatgaagaaaattccgctgacagcagtccccaatcaagcgatctcatttaacgccggtagcagctattggaagattcgcctgtaccagaacatggacatgatgaatgccgatatcagtcgcgacggcgtgatcgtttgccatggggcccgctgcttcggcgggattcctcttctccagtacagccatcagtaccgacctgactatggcaatttcgtcttcgaccgcgacgccgattggacgttgttcggcgacggaatcaacctgttctatctggacggcgccgaattcgcagagtatcaggcgctcgccacgaggaaagaatgagcacatcaacgatcagaaccgggacgaacaatgatatccttttggacgacaatggaaacatggtcatcctcaggggtgtcgaagcgtgcgcccaggacgttcgggcggcgatgctcatgcgcaccggcgaaaatattttcgatgtgaactccggcgtgggatatttcgaatacatcttctcgccgcagaaaagctatgatgacgctcgcaaatccatcgcggatgcaattttgtcctcgccggatgtgaccggcatcgagcagctggacatcgacatcaccggggaagtcttcggcgtcgatgcgaaagtcatcaccatccacgggcctgttaccacaggagtttgaaatgagtaccatccgcatccaatacgccaacggcacccaactgttcctggacggcaaaaatccgccgcccctggacccgctgccctcgtttaacccgtctgtcgaagatctggaaggcctgggccgcgaaaagaacaccgacaagggcgactcctcgccggccggtcttcccgttcccccggtagacgtcgattccaatgtcgacaacggcggaaccatcccggctccggtatcgaccgacgctcctgcggccgaatcggccccggaaggcgcccaggaagctcctgcagcaggccaaggcgacgagaaaggcgccgaggaagccccgactaccgccccagtagaaaaggccgaggaaacggcctcgccggccgctgaagaggcaaccccggctcccgccaaggccacctctcgcaaaaccaccagcaagtaaggactcgacatgatcaacgtcagcggcttcggcacaggaattgtaatagtttccgcctcatcgttcccgatggggttttccttgtcgaagttcgctgatgatgagagtccgatatcctccaaagagctggagccgttcggatatgagatgctttatgacggcggcctattcgcctttgacaaggctgctcctctggaagtatctgtatccgtcatcgcagggagcgaggatgatattaaccttcgcatccttctcaattccaaaaagggatcattcagatttcttccgggaatcatcccggacatgacgactctcgtggccactcttcctgatggcggccgcaccgttctgtccaatgggaccatcctcaagggtccggccatcgacaccatacagaacaccggacggcgcaaaggcaacacgtacacttttgttttcggtagctatcttggcgcccagactgcgcgtcaagccatttctaacgttatccaatcggtactggaggtggtctgatgttagggattttcaccagcctcctaagttcgcgatctttttcgattgtggaccaaaacacaaaccagctagttgctgcggatttgaggataagccgggtcaacacccggttttcttctgtaggacaacgccacatgctggaagatggtacgaccaagatggattccagaacgatccaccctatggaaatcatcgtcgaagtattttgcccttcaattggtgtcgtcgatcagatcaatcaattgctcctggatcgcgacacactgtacaaagtcatcactcgcggcatggtattcgaacggatgatgtgtaccagcgaagcgctcaatcagactccggatgtgatatcggcgactcctgcacggctgacattctcccaagttctcgtccagaatcccaagcctataatgttccgaaatgcaggggactcttctatgatcgaccgagggctggccctagctgaagacgtggttggctcggccggcgatctgttcgactacgcagtgaacggcgtccagaacgccgcagacttgttctgaggtgccaattgaactctttcctcaagtctattctcaacacgcctactctcaccatacgcgatgatgttaccaaacttcctgtctggaagagtcttcaagtcaagaaagtggaaatttactcgccggcttccgtagtgtcgaaacctctggcgacgaaagaccagacggaagctcaagtgtacaccgaagctctggacattgatgtgaagaatggaaagatcatccaaccggtgcgactccgcatcaatgctatctgtccggacctgtccaccgttgaaagtatcatgaacgctttcaatgataacacctcgactttcgctatcacttctaagtcgatattggccgataaaatggccatcatgacgctcgatgtagatcagtctccagacatgttgaacgcggctgagatcaatatggaattcgagcaggttgagcctccagtattgaataaattcgatcctgcgttccctcaagatagtccgacttatggggtacagattcaatctctttctgatgctaatttgctggattttggcgccatcggcgattcgatatcttcggccgcaaaatcgctatataatcgcgtgaccagctacttctgaggatgtatcatgcttgaaatcaatcttcccgatggccgtcaaactcgcgtacaaatcgaggcgtggtcggcattggatggctgggaactccagcgccgtttcgtcgaattcgctgtcagccaagattccgacttccgccgctctttcaccatggaaatcctgggctatgcgaaagtgctgcttggcgacgatgacaccggcattccgctgaccaccgcggcagtcatcaacaaccacctcggccactggaagaacgtggaactggttttcaactctgttctcaagcacaatggcatcgacccggccacgcacgccgaccggccggactattgggaacaagtcggatcgcagatggccatcgcatttctggccgaggcgtccaagctcattggtccagcaatgaagatcgccgaaggactcgccaacaagccggagtgattcatgtctagtgatttggatgaattcatacttcggtatgaggccgatactgccagagccgagcgcaatctggagcgcctccagaaccagatcaggcgcgtgaacagcgcatcgacgagtggccttcaggatttgcgccacttcgcagacggcgcggccactgaactcggccgagtcgttccgcagatcgattctgtgacgagcgcgattcgcgggatgaacgcgcaactggcgataggcgccactggcgtggccctggtcgcggccggcgtcaaggcgttcatgaacaccagggaccagtacaatcagcagcgcatccaggcgatggacatcggcatcgccccggcacgcttggaagagtaccagagaaaattcgttcgccagtccggtggaaccatcagccgcgagcagggcgcggagatgaccaaaaatctggcagacactttccggcgtgcttatcgcgatattgggcgagtcggcccggaagcgcgaattctgcgtatggccggcgttgatgtcgggagcttccaaaagggcatgcgcccgctcaacgacatcattactgatctggccacgaaaatggccaagctgaagccggacgaaatttctgcctacgctgatgcccttggcgtctcgcgagactacctgagcaccctggctaagatcggcccggccatgggaaaagtcaccgagatgacgactgcggaactccagtccagggtccagggcgagtccaacattcagaaattcaacgatgctctggcgaatctcaaccagacgttcaccaccctggaaaaccgagtcggcgaaaagctcgcgcctgcgttcaccaagctgatcgaaatcatcgacaagatagtccaggctattcccaatgaagtggaaagcttcgcgaaggacaccaaatcccgttgggaagatggagtgctcgggaaggcgaccgttggcagtgatatcctatccctcctcagccccggcgccctgctcggtcgcctggcagcgtgggggactcgtcgcggcatggaagaatcagggctcatcgacaaggacaaggttcccggcgctcaaaccagcgaagacctggccaagaaacaagaagaccaggacaaggctactaagtccatgaaagagctagagaagctggctgaccagaccacgaagtctaccaatgattttgcggtggcgatcaacatgttcagtggcgcggtatcgtcgttcgcgaatgccgttgacgagcgccaagcttgggcagcctgggcgggggaaattggtcgggcggtcggtatgggaagcaccgcgccgacttcgcgggcaaccggcgtctatccgcacgcgatctatgatcagtcgaagagtggcgcggccggacaagtcttcggcgagccaatcggcgcccagtctcttcgcaatcgcatgttctcgccgcagcgcaaggcagagccggtcaccgttccatcgtacatcaacgatatcatcaaagatgcttcgaagatgtacaacattcctgagctggacatcaagaaactcatatacaccgaaagccgattcaacgccagggccaccagcgaagccggagcgaaaggcctcatgcaactgatgccggaaatcgccaaggcgtatggtatcactgacgtatatgaccctcgccagaacatcctcggcggaacgcgcctactgcgtgaaaacctagatcgagcaaatggcgacatgcggttggccttgacatactatcatggcggactcgatccgaagaactggggcccaaggactcgcgcatatccgggtttggtaatgagcgctccaatcgagctgatggaagaggctcagcgcaagcagaaggctgcggccatgaccgtcgccaacgagacgttcgccccggaaggcggcgacatggacattcgtccctatgatggcgggcgactggaaaccccagaccagggcaagaaggaagatgagcgccgcgaagcccgtcgatatgacgacagggttgtgcgaccggaaattcgcatcatcgaccgcatgccagaccgcagcgacggcgaaatcctcaagatgtctagacgtcaagaggccgaccgggcagattctggattccggaagttcccgaatcaagttcgcggcgagaccaagcagaacatccaggctcaactcactgcaggagccatcgcgcaagtgatcggcgttaaccccaaccagatcatgcgccgcgaaatcagccgttctgacttgctgttcggatacaaccaagccatcctgggcaagcaacaggagatcaaggccgccgcgaccgaagccaacaacgtattcctgtctccagccaagcttgccgaagccacggccaaggtgaacgccgcatcgcgagaaatggatattctcaggacgtacggcgagcaacttctgaagagcgctccagagcgcggccaggagctgaccatcggtcggatcgacatgttggtcaacgtcaccggcgcgaattctccggaagaggctcgtgagatattcagcaagcagactgcagaccagctgactacggcaatccaggacgctcaaaacgattccgcaactaagatactctactgatgaaaaagagaattctgcgagtaacattcaacatgccttatggacccgaagtcatccgcgaagatctggatgttcgggtccggattatgaaggctgcgttgcggattcagaaccgggcgacgatggaaattttcggcctcaccactcagctgcgcgagtctcttctgtcgcagttcaccgcgtggaagcaccggcaacgtcaagtgggcagggaagatgaattgatgatcaaggtgtcggtggaagccggctactctgaccaggggcgcgagcaagtttccagagtctttgtcggcgaagttgccattgtcgatatcatttctccgccacctgacattggaatccgcatccagtgctataccaggcaaatcgacaggacgaagaccattcggaatatgccgcccgccaacacgacgtttgtcaagttcgtcgagtggggcgcgaacgaaatggggttgaacttcatctgcgataccagctacaatgatcaagttttgaagaatccgggccgttcgatcactgtcgcgtcggcaatcctggcgtcaattcaggatatgtacatgccggatgtggccgcgttcgtcgatgatgacgttttgatcgtgaaggatcgtgacaaagtcattcgtccggatgaagtcgccaacattaactcattcgtcggcatcccttcatggtcggaatggggtgtggaatttcaatgtctgtttgaaccgtcgattcgcgtggctggcggtgtcgcggtcgaatctctcatgaatccaagcgtcaacggcaactatgtaatcaccgctctagagtatgatttggccagtcgggatcggcctttctatatcaaagtcatggggagtccagcagcgtaatggccagggaaatcaaatcgttcaatatgttcggcgtgcactacaactcgcggcaattctctgcggtcgatggactcaggatgatgtcgggaatccatgatgttccgccggaagaattgctcaaagggaccgacgtgctggcccatacagaggaacaaccggaaggcgtttggcttcccttgatcgctgcgaacataaatctttatgtcattgaccgggcgaacgtaatcgctcccgtacaagtgcttgcgcttttgtctgaactggtcatagattggaactttggcttcctcaaagattggacaggggtcaaaattccagcccgatttgtcgaagatatcaagagtgtaaaaacagcccattcaccttctgtggtcgcaagtttggtggcgaatgggtcagcttctatgcgcgagctggaagaatattattcgactcaagatgcctttaagatgattgacatcatgacggcgaagagcgtgaatgaggctctagcgtccgaagcatcacagaacagaatcaaaaagggataattcctaagcgagcctgggaaggctatactagacctgccaaatcagaggctttcccatgtccaatattcctttaacatcagcaaaatctaccgacagaacgcgactgatcgccgctcttgacgctcggtcgcggcgggacgcgctcgactttgaagtcatgattcccgcccaggttgttcaatatgatcggaccgaaaatatcgctacaatccaacctctcatcacctgggttgatacggaacacaatgccgtccagaggcaccagctggttgatatcccggtgatttccatgggcgctggcggcttccacataagtttcccgatccagcagggggatatcggctggatttacgcggccgaccgcgacacctcccagttcttggagtcgctatcgatgtcgaagccgaacaccggccgcatccacaaatttgagcatggtatgttcataccggacgtattccgccgatataccatcaattctgaagactcggcagcgatggtcatccaatcgactagtggagcgacccggatttccattcgcggcgacaacatcaagatcactgcgccgtcgaatgtcaccgtagatactccgcaggcgaatttcactggaagtgtgactatcgccaacaccctggttgtaaacggcgtcaacgtgaacaaccacggccacctcgaaaacaatccgcctgatgcccggacgaaaggcggcatgattgcctaaggagaatttcatggctagttttgatttttctgatttaacagcgggggggggttgtaatggctaattatgactacatagtagatactggagtcatagtcgccgataccgctgacgttttgaaagacgttgaagcggaattcagagcggccctcggcgccaatatcaacctggcggcttcaacaccccagggaactctggtcgcggctgagaccattgcgcgttctagcgtgatgaggaatgaagctcgcattgccaacaccatcaacccaaacgtttccttcgggacgttcctggacgccatctgtgcgctgatgggaatcgagcgcggctctgatctttcgacgttcggctatggcgtccaagtgaccggccgcagccagacccgaatttccaccgggtcgcgtgtgcagactccggccggagcgattttcacggtcatgagtgacgttctgattccggcaaccggagtcgccaccatcgacgtaaaatcgcaggaatatggaaacatccctcttcccgtaggaaatctgatcatcatcgatggaaccatcggttgggccggagcgaaagtaatcgcttcaactcgcgtcgatcctggcagccgccaaatgaccgatgcagaattgaagaatgctcgcgtcaatcgtttggcgatccaaggtcgcaactcgactttggccattaaagcgtatgtcagcgccgtacccaatgttacctcggtcaacgttatcgaaaacaataccggcacggttcaagttgtcaacggcgtatcattcacccttccgtatgcggtctgggtctgcgtcgccggaaatccggataaacaggctgtcgcagatgctctgtgggcagcccacaacggcgggactccctgggactatggcgcggccaacaacggcgtcccggtggatgggcctactggcgttcctgttcgcgatccggcatccggtcgaaagtatgtcgtgaagtggactactccgatcatgtatgacggatatgtaaacgtcaccgttcagcaaggctcttcctcggtcgctccggaagcaatccagaacgcagtcgtgaattacgcccaggggaaagtggagggtgaagagggattggtcgtcggcgcgagtctgtctgcctttgaagtggctggggctatcgctcgcgagattcccggtatctacatcaaactatgccaggtggcttgcgtcccggctggatcgccggccccggctcccggcgacttctcgcctgaatacgtcatgagcgcattcggtcaggctaccatttcggttggtaacgttagggtgactttcgtatgactctgcctgcgtacaattctgatattcaacaggcgctgaagtggctccacaaccaggcccctgggatcaccggcttggttcagcgaaaggctcaatggtatgatcgtttcagccgtcagttttgggtgaactgggagcgcgacgttttcaacttgaagactgccaacccgttcggccttatggtgtggtgcatcatcctcggcacgccttcgaaaggcttcggcctgtatccaaaaaacagctcttgggcgttcggtcggctgcgccagaacttcgtttatagcgggaatcaggttccgccgcctgcagacgcatcgccgggcggcaacttctacggtggcggcaatgccgaaatcctcaacttggacgaaatcaggaaagtgcttcagctaagatatgtagcactgatttcgaacggctcgattgcatatatcaatcgcatgcttcgctacatattcaacgatgatgagccgtgggacgaggcgaccgggttgtacttctatctcatggactcaaccggcgagaatggacctgtggagaacttggccatatatcggaaagattgggaagggatggttttattgtctagctcgcccaggacgaaccatgtgctgatatcgacccctgccagtgacgctgattggcctggtgtcgatccggccgcgagcggccgtccggtaacggtcgaaacggcgtccgctacggccccggacggctccgctacggtgtgcaagcttactaagccggccgggagtaccgcctacgtctccgcgccgatagatgggccgctggggtccggtagcactgtaacgttttcgttcttcgcgaaggccggatccacccgtttcattgcaatccagtcggctgccgatttccccagtcgagccgatgccgttttcgacctggattccgggaacgtaatcagcgatcagatgctggacagcagcgtggtaagcgcccgaatgattcgtctggaaaatggctggtggcgctgcgttctcacgaccaaaaccgtcagctcttcgttccgcgctgcttacgtcgccccggcagaaaccaacttcagctggatcgattcgaattccagcacggcgattgacgtgcttatctggggcgctcagatcgaactgggtgatactccaaccggatacttggagactaccggggcgcccgtaaccatcaccgattatgttttgcagaacacccagaccggaacaatcaagttcacacagccccttccgactggagcagaagcgtattggactggagactggaaaggcgggtctgagaccgagccggccagattcgcagtaggggatgggactcaagatacattcaatctgtccagccctgcatacatcggcctacccactagtggggcgttcaagctagaatacagagttggtccggcgcttaatttgtcgccgcaattgatcaacctcatgaatgaccgggcggtcggtatcatgccgacttgcgccggttgcgatgtaaaagtcattcaggagtaatgacgtgatcacacccgaactgatacccagtccgtttgctgcgcagggcgacaaagacccgatcccgcagacttcttccactggcttcgctaaccttcgcgacggctacacgccggactacgaaatcagcctggcgtcgaacaacccgcaggccaaagcggtcgagcgaaagattcaaaaccaactcttcttcatcgcgacccagaacgcacaggcgtggcagcggcaaatggcgccgccgtggtttcagggcatgcctggcggctatgaacagaatgcagaagtcgtgcgcgtcggaaatgacggcataatgcggcgttatcgttccatggtgaatgccaatgcgagcgaccctctcagcagcacgacttgggaagagcaacccgcatggtcggtgatgcgctccaacatcccgatgccggccggaggctcaggcctatcttctggcggagaagtcatcacgaccggccgcaacttcaacgacctgttaaatgggacgtgggagttcttctctgattcagtggttgtcgcttctcagaatgcccccgtatatccggcttctgctggtgccgctgctggcatgttggaggcgaaatcttgggtgtccggggccaatacgttctgcgtccaacgctacactgatcgcgtcgggaacgtcgctgtgcgcgggcttaatgccggagcgtggaccaactggatgtatgcggtaaacgtcatggcccttcaacaaggtcgggtcacctatggagtcgcggccggatcggcgaacgcttacacgttgacgctagttccgcagctccaaggcggcctggtggacggcatgatccttcgggtcaagttcaacaccatgaacaccggcgcctccaccatcaacgtctccggactcggcgccaaggccatcgtcggcgcggccaacttccctctcaccggcggcgaacttggccaaggactcatcgctgagcttgtattcgacgcagcaggcgaccgctggagaatcctcgcaggcgcgccacgcatccaagttggcaacgccgatcaagattaccaggcccccagctggaaacaggtgaaggattacgtcgcgtcccaaaagctgactgaagtggactgggctgacgtcgtcaacaagccgaacgtcgctatccaagacaccacgccgtggttcgccaatctggagctgtccgatgctcggcctttcatcgatttccacttcaacagcaaccgcgccaaagacttcgactatcgctttatctctgaggctgatgggtcgatggcattctattctcgccaggggtctgccagtcctacccaggacatcctgttcagcaggtcgaatgtaacattcctccagccgcgactggatgttgcgaaaaacctcgcgtacatcgccaactctggtcccctttggcagaacaccactgccgatcagcctggttggaaattcaccttcgcacaaggtgtggacgccaacaacaacgcggttatcgcagtcaataccaccaacccggacggctcttatcgctcgcaggtcatgcgatgggactgggcgtccacgaacgtcatattcaacaaccgtccgctcttcgccggtcaatacaccccttgggattctgggaacttcaatccttccaccaagttgacggtgaatgccgtgaaccaaatcgccggcccaaccgggattcggaataccaacggcaacaccggcaacatgaacacctggggttccggctccacgacggcatcctatggcaatgctgccattcaaatcttcggaaaagggggcggtgagcctgccgcgatctatttcgacaactcccagaccggatggtatctgggcatggacaaggatggacagctcaagcgggccggctggtcgctcggcaacaactcttatgtcatcacagatgaattcaacatcagaaaccatatcaacacaatggctgcgcgcccgatttgggggaatgtcgagttctggggtccgtggaacttcgatccgaatcttaaactcactttgaacgctttcaatgatagctcattcaccaggatgaccaacagcggcgcgaaagacgttggtatcgcgtccatgacgagttatgctgatgcggccatgtcattcttcaactatgaagcctcgaatccgaccgggccgcgcgcggccgttatttcgttcgtgagaaatggatcgcgtggagtgctattcggcttggattctgacaacaagctgaagtggggcggatattccctaggggacgtcgcgttcgagattgccgactccaacaacctcatgagcctgtggtcatcccacgctgccgcgccgaactggaacgggcagaccatctggaggtcgggaaacttcaacccagacaccaaggcgactttggcagctcgcaatacgacgtcatcccctacaatattcagttatggggcgtccggaatcgcatcaaccggacaggtcggtgcgttggttgtggaaaacaacagcgtcaccaataccgcagccgccatcacgttccattcgccgcagaaatatcaggtcaacttcggcctggatgcggacaacgtggtaaagatcggtggcggcacaatgggcggcgtagcatatcccatcatccactccggcaactacaacaactacatcaaccaggcgctggttcaggtgggtcttggcggagtcggttcctatggaattttcgcggttctggataatgccgctccaaccgcaaccgttcaacccggagtggtcgtggacggttccattctcatctactcgtcttgcgccgcaaactacaatagcggtaaaagacctgccggaacttggcgctgcatgggatatgtagtcaaccgggatgccaacacccctgactccgcgacccttttccagcgagtgacgtaaaatgaaatggacgcggatcagaaacccacgttggctggacgcagtaaacatccacgccatggtgactttcgagggaatcggtgaagtgccgttcaccgccaatccgcaagacgtggaggcccacggaagggccatctacgctgcgattctatctggggagcacggacctatcgccccggtcgattcgaagcgggagaaggccttgcaggacgctatacgagccagggaaaagcgggctatccttcgggatacccgctggcccatagatcgccacgacgagcaaagacggctgggtatcgaaaccacggacggccctgggctgatcgcagcccttgttcactggaggcagcagattcgcgattggaatagcggggatcggccgcgacttcccatggctctgaaaacaatgttcaaaaatcaggagtattgatgaaaatcacgaagggtgttctgatcaccggaaccgggtgcaccacggatcgggcgatcaagtggctggatgatgtacaggcggccatggacaagttccacatcgagtcaccgcgagccatcgcggcctacctcgccaacatcggcgtcgagtccggcggactggtaagtctggtggagaatctcaactacagcgcccaagggttggccaacacctggccgcgccggtacgcagtagacccgcgagtccgcccgtatgtcccgaatgctctggcgaaccgcctggcccgtaacccggttgccatcgccaacaacgtgtacgcggatcgtatgggtaatggctgtgagcaggatggtgacggttggaagtatcgcgggcgcggcctgatccagctgaccgggaagtcgaactattcactgttcgccgaagactccggcatggacgttctggagaagccggagcttctggaaactccggccggcgcgtcgatgtcttcggcctggttcttctggcgcaatagctgcatccccatggcggagtcaaacaacttctccatggtcgttaaaaccatcaacggcgccgcgccgaacgatgcgaaccacggccagctccggatcaaccgctacctgaagaccatcgccgcgatcaatcaaggatcctgacattcgcccaaagaaaaggccgcttattcagcggcctttttgctttctggctttgcctcttcaaccatcttggcctcgaccggcgcggcggactcctcctgagttaccgaatccacatagttccctagtgaactcagaacgccgattaacagcgctcttactaccttgtccttgactgtctcgcctatgatcttggtcagaacggatattaactcttcccggagtctggggctgattcttggccgaaagcgcttgcgatgctctttgcgtttcatgtttagtcctctgtctgcggtcttctcctcaccccgataatggcttggggatgcgttgtgttaatcggaagggtcgggcgctattataacccgtcgaaaatgctcgcgcttaactgtttaacgatacgcaccgcgatactaaatcgccttctttctggccaaggaactctggcggcctggtccggtctaaggcctaatttgtcgacattaaaacgagaaaacccggatcgcctgtaggacaaggcgtccgggtttatttcgatctagtgtacgctagaatcagtggcttccgccccaaccgtccagccagcaatcgaagacggcgtgtctcggcttgtccttggcgccatgggagaagtgcttgaaccggatgacctggcccttgagatgctccctgtcattccagcggcgctgtttctcatcgtgggtcaggctggaggccgacacgttgaaggtgactccaggccacagacgttcgttgcggcagacgaacgcaccgaccattccggacggcgacaggttttctgcgtggctggagcgggccgtgtggccaagttcattgatgaaagcttcattgttgttgtgcatcaactcttccacgtcgatgatctcagcttcatcgtagtcgtatcgcttgactttcacacagtgcccttccttggcagtcgagcgaccgaacttgtacagtccatcagcgcgcttgcccatggaaccttcgaatcccagcattgtgtggcggcgctcgacttcgctgaactgttcgatggaagtcaccagttcctgctcgaccaggtgaatcctctcatagccgaggcagtgacgaaggaagttcacgcgctcggccgccctggctaggcgatcttcggtcggtgcgcgaggatcggtgaaatcatcgaacacatggaaagaccagtccggctcaccgctgtggcggcgaagatcgccggacgacttctggaaaactttcgggtcgctgatgtcgccgcagaccagctcgccgtccaggccgttgaacagtttatcgctgaggtattcgtagatcgattgattgttctgccgcttgagttgacgagtcagcgcctcgccttcgaatacgaagcagcgaaatccatcgatcttcggcgagaaatacatcggcagttggccttccagcagcttcgggtcaaaattcgatgcgagcatgggtttcatacagttctccagaaaagaagcccggcgaaccgggctaaatggcggtaagccggctcagatggtttcgttggcgtggttcagttcggccatgatcgacgcatagagctcatccgactccttgatgaacacgccgtcgtacatgacgcctttgcgatccttgatggtgtcgtaggcagcagcgtagcaggcgagcatggtggtgtcatgctcttccgtcacgtcgaacagagtcatggcggccgataccaggctcttgatggccaacccatgatttccacgtgccagagcgcctgccagatcgccgaggcgctgcaaatcgtcgccgtaggtgggatgtacttcgccgctctcgatgaaggccgacagatgatcgaacagattttcgccgagttgcgcggccatgatcgtggcaaccaccattacgtcgccgatgccatctttcacatcgaccgggttgttctgaacccaggcttcgcatacttctgcgaactcttcgaccaacttcaggaattgatctttcgcagacgagcctttgatcaggttacggtcggaagcccatttaaccaccaggtcgtgaagttcgcggctcatgatttgttcgatgttcattctttcgattccttttggatttgggatttgactgcgttgattatggacgccgtgctctggcgcgatccatccttggtggtgccgaagtagaaggccattaccgacttcagctcggcgaaccaatagccgatgatggtgccgatggcgaccgaggatgtcgggtccatcagagcctcgcggccgaatgtgaagattgcgatgatgatgagaatggagcctgtcagaagagcgaatgtgatcgccgggcgaacgaaatcgttctgctgcgccgcaagcctcctcgcagaatccctgtcggccgcctctgcggcgaactggctaagctcggcctggagctggttctgctcagactgaaggcgattttgttcggcttgaatcgcaagctcctggagacgaacgcgctcggcgctctggagttcggcgagacgcgctagagcttccggattcgcgtctagagcgctagcgaccgaggctgggtcggccttcgaccccagcgccgtcgcgacgatagcgccaacggcggcgcctgcaggcccacccaggagcgaccccagagccggggcagccgcgccgatcttactacctatgtctttccagtccatttcgactcctcaaaagaaaggcgccattacagcgcctttctccggccggtgatttagaactcttcggcttcggtcgcatcgccgacgccaccggcgtcactgcgaggctgttcctgcttgctgtagtccaccttcacctcgccgccgacgaacgacttgtacaggtcggccgcagccttgaagtgatccgggttcttcaccaggccttccagctcgaactggacgccggaccagctgcccttgtcgttcgacatgcctacggtggtcatacggaccaggttggcgaaagtcggcggggtgcgcaggccctgcggggtctgaacctttttctgggacagcgcggtcatgagcttcttcgaggccttgatctgcgaagacgacagggagatcagagcctggccgaaatcgccggtgtccggatcgatgacgatgacgtaatgaccacgggtgtcggcgaagtagtcagacttcttgtcgctgaccgaaccgtcttcgttcggcgcgtacaggcgtccttcgacttccttcaccttggtcgggtctttcatcatttccttgaagtcttcgacgctgatggcacccttgaaaccgccctcggcctcgcgaccggcccagcggatgaactcgcggcggtacgcggccggaatgatcagcaggccggtcttgccgtcgtaaaccttgccggtgacggtgttcaggaacatgccggccttcgcgccttcgatgtacttcgggtcatcttcatcgacctggggagacatcttctgcaaaacctggatgaaggggatggcataggactcggcatcggcgccttcgaagcctgcgccgtcatacgatcccaaatccatgaagtcgggaacttcggtagtcgcgacggcgccgccaccggtggcaactgctacggccttggtttcttcggttgcttcggaagtttcggttttcttaccagccatgttaggctccttgtttgtcgaatttcagttatcgctaactgtgggtttataataacggaagttgcaactaagtaaagcaaattacatattaagatttgctctttttcaccttcggtttcgtgatcttggcctctttgtattcgtgtacgccgatgaaatctggcagctcttcgcccttctccaggtactcgcgaccgaacgcctggagggtctggtaatggacatcgcggttgatggtggcgtcatagccggcttcgatgatggcctcggccgccttcttcgcatcttccatttcgccgcgaccgaattcggccagaaccttggtcttgatgatgccgtcgttgtcggtgtcttccagccacttccagaacttcgatttgttctcttccttgacggaaatgatggccttcggctctacttttaccgtgcgaccgtccgccagagtagtggtcttctgaccaagctcctccaacagctccggaatggtgttacgcttgagggtcttcagctcctcttccttttcggccagcgccttttgaagatcgaggatttcgccgtccagctgcgaagccttgtccaccaagttcagcagtcgatggccgatgtcggtggcttcaaccgccatttcatccatgacgccaaaatagtcgatttcgcccggcgcgttctctttcaagtattccgggatttcaagctcttgctctttcatgtccgcctccaacttagtgatgttcccttacttgaaccaagtattgagtagatattatgccgcatcttccttgatacggctactgatttacatattaaatttcgtcgcgagtgctaacgtcagcctcaaacacgccatcaacgacataacttgccaggttgcgtttccactccaagctgacctggattttctcgtcgatggaatccagacagatcaggtcgaagtacagaaccgagttgacggtgccgattcgatgatttcggtcttcggactgcatccgcagctcgttgtcttcgtcggtcgtgtagtagatggccacgtctgcggctgtgagtgtgatcccgatccctgctgcggccgggttgcccaggaacacctggacgcgcttggcctggaaatcgtcgatcaatttttcccgctcggcctctttggtctcgccgtagtaggtgccaaacgaaatcccttgggcctccaaatacgccttgatctggtcgatttcctgaatgcgcatggcccagacgatgatggaacgctccgggtcttcctccagcagaccctccagaagatcagtaaacacggcgaatcgcgggttgtcttcgggcggcaggatcaccggctcaccatagacgttgatatagccggacgccacttgcttgagcttcgagcgcgctgccgcagcatcgaaagatacatcaagcatgaaatcttcgttctggagaacaaagtggtagtcttcttccacgcgctggtaaacctttcgttgctcaggcgacatttcgaagtatatgcgcttgtacactttgtccggcaggaatgggagtgcttctttcttcgttacacggaaactgtgcggctcgatcagggaccgcagcttgtccaggttccggaataccgggcgcccacactcgtctttttcgaccagttgcggcggcatggtttgcttcccttccagcttgcgcatgatagcgatcattcgaggatcgtcactgggcaccaagacggaaaattcggccacaaacgcccgataggatttagtccccagaattccattccgcaagaattggaactgcatgaacaaatcggtcggtgcccgcgtcagaggagttccggaaaggatgcgacgggccacggccttctcgcccagctttacgatctttttcgcacgcttggcttgtgggtttttgatcctcgttgactcgtccacaattgcgcaaactttgaatgtatcaaggaatcgctcgacctcatcatagccagcctggtggttgattgcgtcaacgttgatggcgaagacgcgaagaactttttcatctgcgaacgtctcggaatacagacggtccaagcgcgccctggcctttttggaagtcggtcggccgcgccaatccacgctcaaagtcttgatcgcgacgtgggtgggaatctcgcgcagaatccagttggtgtggacgcctttgggggcgacgatgagcagcgcgtccacgcgcccctgtaggaagaggcgaacggcatcggccaaagtcgtccaagtcttcccggtgccctgctccatcaggtatgcgaagttccgtttgttcagggacgctgccagggcattgaattggtgctgcatggcctcggtcttcatgcccttgacgggatatgttttggctttcatttgttctccaaatcggcgaggaactgaacaatgttatccagtccttctgcatagctcgcaacttccaccaagtcgcggctgttaagctcgaacaaatcgagcataggattcagcagcagccaatcggttccgatcttggccaggacgaagccccggccaccccagccgatccgctcccgaagaaaagggatttgcccaggttcgaaacatctggccattgggcaggtggaagcgcgtttcggccactcctccaaagccttgaactcgacccagaactggacacctcgacgattcaggcagatcgaatcggacatgccagaccgccgcgtctccagaaagtcgatcaggattcggccgagcgagcgctgcttaaacgcattcgccgctttcgtttcgcgatcattcatcaccttcgccctctttggaaactttctctgcttgcgctgccagctttgctttttcgcgttcggtcaaaatccgcttgacggccttcacgatgaacatatcgattccgctgagcttccagcctttgatgaggaaccaagaacctgtcggcgtcccttcagcaatctgctttccgtattgcagatatttttcaggccgaattctgaaacgtatcggctgatcaaccgagtcatcaacgcacatgatgtcgagaaactgcgactggcccttgtacaccgggtttttcccttgatcggccctcttcttctggcgaatcggttcgttctcatcagacagaacttttttcaccatcttgacaatgaccagaccatcatctccatcgcggatatcccgaatgttccgaatggggtttccggaagttactccaaccagctccggattgtcataagcatgaccccagagcgtgtgagcttcgttcaaatctgcgaattgaacttcagaattcgacagactcgcggcgactttctcccaatcctgaagcgtcttcaggtgggtgcctgccagctctttatattgagccttcagccccttaagatcggccttcaactccttcagatcggccttcaacagtttctccagttctttgtcttggctgattttcgccgaaagaatctgggcttccagagctgctacatcagcagccttgtcctcaacatcctgtgccgatatcgggcaattggccagggcgatcctcgcggccttgacgtcatcacgaaggcgcaggaacttctctgccttcgccgggccaaagcctttggcgttcatgatgccgccgatcaagcgtccatccgccactacccagttaagttcggaatgctccgggtccagggccgtatattctacgccttccttggccaattcgcgaaggatggacacagtttgctggtcgtctttcgccgcccgaagacacgcggccgcgtattccaggcgatgatatcgcttcatgtagcaggtccagtacgtcaccacagcgtagctgaccgagtgggagcggttgaatccccaggcgccgaaagtcaccatttcctgccacacacggtgagcatcgtctggggcgacgcctatggtcttggcaccctcgatgaacaattcccggcgcttgttgaagaactcttcaccctttcgcgcagacatggctttcctgattgccgatgtctgctcccagtcgaactggccgatgtccttgacgatggacatgatctgttcctgatataggaaaacgccgtatgtccctgacagatattgctcgacctgcggaatggtataggtcacaggctcgcggccggccacgcgctcgatatacttggttgccataccagaagacaacggacccggacgggcgagcgccgtgatgtggtcgatgttctcgaacgcggtgatgttgatcgcgtttgctaccgagcgaacggcctgcccttcgaactggaagatgccggacattttgtcttcattgagaacgtccagaaccgccttgtcgttcaaaggcaagtcgtacaactcttgcgcggtcacgcagttcgcgtcctggatgactcccaaagttcgaagtccaagcgcgtcaattttgaggagattcagatattccgaatcgggcttgtcgagctgcgcaacgccttcggaagtcaccgtacagaagtcgatgacttcatcgttgcagaccaggatgcctgccgcgtggacgccagagtgggatgggtgaatttcgaggtcgcccatgcaggcggacgcgatctcatacttttcacggaagtcgcggccgggctgagttttttcgaaagtgtcctccaatccttttccatatcgttcgtccgctgatgtatattcgatgatcgagtttttgatgttgtcggtatcgtggaaggggatgccgaagcgctttccgacgtgagcgataaccgacgcggccttgagtgtgttgatgttacccaacttcacaacgttccaagtgccatacttctgctggagatattcgaacactagatagcgatgggtatcggcgaagtcgatatctatatcgggaagatcggaacgggaaatgtcgataaagcgctggaagagaaggcgatgcgggagcgggtcaacctcggtaatgcccaggaggtagcagaccaaagagccggctgaagagccgcgagccgggccgaccagcatatgcttcttggcgaacgcaaccagatcggcgaccaccagaaagtagctgtcgaagtctttcagctgaatctgcttgatctcttcttggaatcgatcctcatactcctgggtccattccttgatgtggccgcgactgaggcggtaggcttgcccctcgcgagccagagcgacgatatcaccatccaagtggatcatcggcgccttcgccagtttcacatccgccaactgctcgactaccgcacgagtattggcggcggcggcatcgaactcttcgcgagtcatgatgtggcgtaaacggctccacaactcctcttcggtggcgatgtggcgaaggccgaccgattcccgcaccttccaggccgacgcgaaatcagcatggtcgatggacggcatgtcgttgtaagaggtaatcaccaccggctttccgaatgctctggacgtctccatagcaccgtgcgcggcgaccatcgacgcgggattgatgtcaatgtagtcgattccggccagatccagatgggcataggcctcgccagcgaatttgatgacgccgtcagcttcctggaattcttgcggagtcaatccttgattctggaccgacttggaagtcaagcggtagaacttcttggtgtccttggcgagcacccaggctttgagcttcagctctttctcgccatcgtcggcgcatttgatcgggatttccatgccgaatccgcgaggcagttctgccttggcagcggcttgttcccaacggacgtggccccatgttccatcatcgacgatggcgacgaatggggattcgatctctttggcgcgctcgatgatctccgggaatcgaccatatgcggcgccgtaggagtaaccagagcgaacgcggagctgagggaaagacatcatgcggcctccattgcttgatatgcccgatatacgcccatgcgcttgcaaacttcgtggagcagccgcacgtcgtcgagcgcccggtgtttctgtacatatgggccgcagtagtgctcataaagatgctgcagccgcatgcggtggccgaacaacggcgccgactcttccacagtacagatatcgagcgatgggaaattgacttcgtccaggccgagcttgccgcgagccagatcgcaggtaagcatgaacttatcgaatggaaggttgtgagcaatattcgcgtcggctctggaaaagaagtcgcgaactttctgacgctgatcgaggaaagatgggtgcttgatcagatcttcgttcttcaaccctgtgatcttggtgatgatttcctcgataacgattccaggattgcagatgaactctacttcatccaaaatcttttcaccatcagttatcacgccggcgaattcgatgatcctcggctgcttcctcaaactcaccctctggtggaacgggagtcctgtggtctcagtatcccacacggcgaatatcatgtttgttccctcttatgtcgaaagggccggctgctttcgcgaccggcctgaggagtataccgcgacggctgaagatttacgccttctgtccgtctttcggcgtgatacggccggagcgcatggtggcgtggacaaacgccgaatagttgatcgagtccaaggccgaatcggcatccttgaacccgctattcgccaggcgagtgagtttgcccaccatgtgcatcacgaacagggcgagtcgatggtcatcggcggttttcgccaccaggccgttcgggaagaggatttccatgatctttccgtacatcagatcattgcgaccataggtgctctggcggtcgcggaagacttctgctgcggcgtacagattgttgagaacatcttccgcgaaatcatctggatgggaatcatcttcgcccggccagacggattccatggcgaacggcgcggcgtcttcggtcgggtcttcggactgagccgtttcagcgagcggagacggggctttcgcaaacgcctcgtcgagggtaggggcggagttcggggctgccgggaacggctcgtcgagggtaggggcggagttcggggcggccgggaacggctcgtcgagggtaggggcggagttcggggcggccgggaacggctcgcctgccatgtcgttgggcgcgctatcggggtcgctatcggccgcgacggcgaagaacggcgcatcgcaaccttccaggttcaggatgtaggagtcgatccccaggctattgtaggcatcgatgatgtcctggcgatcatcgaacgccgcgacgatcttggtgacgccttcgattttcttcagtatgtcgagcgcgactgcccgcttgaactgaggcgccggctcggtgttaccatacggccgcatgatgagttcatactcgcgatgttcggcgatgccgagttcgcggtggagcttggccctggtctggaaaaagtggttgtcggttcggccggtgacgaagaaaatcatgaggtcggcgtcgatggcattcctgatgcgacctacagcgtgcgggttgagagtgtccttgtcgagacgagaatgatactcgtcccattgccgttccaaggcgaagctcttgcggtggctatcgtcgaatacgcagccgtccaggtcgaagatgatgatgccattctttggtttgcgttccatattcagatttccttactggttgctttctgggtgacggttttatcgatgaacgtcccatcagaagtgaggcggaaaacttcgccattctggatgaaatcgaacgattgcacgttcatcgtgatgcgaatggattcgctgccgttggtcacttcgacttgtgcgatgtcgccaactttctcgacaatgatcttcatgttacatggacttcccattgacggccacagggttggcctcttgtttttccgatccccagaaatcgcggcgcagttcttcctgctcggccgagcgatccatccaggggcgatagaacttgcactggtagataggttccaacggaacatcaatcacaggaatctgacctggctttgtctccagagcggccatgaaccggtcataggatttctgctggatttcctcttcattcatcaccttcgacccatagcgcgggaaggcgcaggagccggtggcgacgcagtgcggctggagcaggctgtcgaacataggatagacttccagaaccagccggcgcatttcgcggaatacttcctgatattcaccctgggtccgaacgcacaggcgaaccttcgccatgtcgctgagagtccgcagattgaacttggccgcgatcttcgtttccatgttggaagggatgatggcacgagcgtcctggagcgacgcgccggcctccagaagcttctggtagctggtttgcgcgtcggcaatggcgtcatgccacagacggttcagctcttcgcggacatggtaggtcgggtcaggctcgccatttaccgtagccggttcgtcgaattcccagcggaaggcttccggctgaacgacggcgctgatttccagagcgcgactggtttcctgctggtaagccccggtacgggtccgaacgagttgatgggtgaagttcttgctgacaccctcgatctggaaaatgaagtccacgaactcgaacggcgagcggatggtgtccagcatgtacttccagtggtcaagcttttcggcctcggtcatggtcgccgggtcttggccgcgcatgcgagtggatttcgtccccaggagaagttcccaggcgttctgggtgtaactgatcagagaaattttcatcagaaatcttccggaattggcgtgaagtggaattttttggttagagccagggccaggccttgggcttgctctttacgaaggccatactgctctatctcttccttgagcagttcgcaggcctccagacgcgactcatactcttcagcctcctgaacggatgagaaaacggttccatcagaggttctgtacacaagttcaatcgacatgatgacctcagtagcagcggatgatttcggcgcggatatctcgacggtcgaggtagtgctcacgaatcttatcgcgggcgcgctcggcctcttctcgactgccgaacgacaggttgaacgaagtgaaaggcttatcgtccaggcgcccatcgccaatcaggtacaggatgcctaccagcacgaaagacggcgctgtctgtcgcgtttgcggcgggtcgatttgcatttcgaggaaagacatgggaacctcttcaggatgatctggtgcgtacattaatagcgctcctgctgagcagctacggtttccggctcatagatgagcatgtcaacgatttccgggcactggcctttcacccagtcgatggccgcgaccagtgtggtggaagcggagaaagagaaagtgcggtaagactcatggatgtacggcgaccccatcgaatcgcgctcggtcgtgcgagaaatgactgctttgatattaacgatccggcccatcttcggcctccactttagcgattatatctgacaggctcagcttctcgccattcaggaaataactggcgcgaaacttcctgtcaccctctggcccgacgatccgggccgttatggtgagactcccgccgccaagggcatcggtgtccctgaagaaagccagcagcgcccgcttgagcgctgcctcgcgaggatcgacggccattaacctaccacgttccagccgtgctgagcgcaccaaaccgcaccggcccctgcaggaaggctattcagaaggaacacaggagtcaggcgaccgtcctcggtcatatgtatgaagtagcgggcgccttcaccgagccattcggccttggcgatagcgcgttcgagattggccttggtggcgtaggttttggtgtggttcttgtcggtggagaaggttacttcgcgggccatttgtcgattccttttggctgaagggtttcgcgtttcgatgagggaatattacgcccacctgatccagaagtaaagcacttttgtaaattacttcacgaacatctgcttggccttctgataagacgaagaagtcatcaggcgctcgatgacgtccatgtccgaaaccagatcatccagaaggacattgcgccaggtagcgaaccggccgagcgagaagatgccagcctcatgggtgagattccagatcatggattcgcgctcgtcgcggccgagaggaacgattttgcctttggtctggatggtcggctcgccgtcctcgattagctgtttccttctgatcccgaaggccgcgcagacttcatccaggtcccatgccggattccattcgatggtttcgatctcaccatcagcattctccaaaacgccattcgcgacggattccacgatcagagtatcgccggtgatggacgcgcgaaatgtcccgaagtcgggactggggaaataaacggtctggaagacgtcacaagggatggaaagcttgtatcgactcacgatgatggatgtgcctttaccgaatgacgggtcgatacccaggtccatccccgccgcagccaggttggcgcggaacggcgcggtgcttatgacattcacatggtcatcttgccggcgaaggtactggaagaaagaggcgtcgaaaggacgactccaagtgatgcggttcgccagcttggcgacaagctgctcatagaagtcggccggtgcgatccaacgcttttcagtcgccagattccagatggaccggtccgacaggccgcccgttactttcctggagtacatgttgcagtggtcgatgcgcggctgggaaatgaattcgccgtcgatgtagatagctttgtgtacagtgacttcgcggaacgggataccggtgagttggccaattactggcgagcggaatcgcaagagtgcgttgtgacgctccttgttctccggcgtcgccgcgtcgatgatttgggcttgagggaaacgatgcgcggcgatcaggccggcgagtccagcacctacgatgatgactttctgatcaggaatcatgatgtgttccttctgagtgtacaaaacttgagaggataaaaaagggacccattttcatgagtcccttgaagagctagacgattcagtctcagaagagcggcggcttactcttcttcaccatcggaaccgtcggcgccctgatcttcaccgtcgtgctcctggccttcatcaccggccttctcgtcatcgccctggccagcttcgtcttccttcgaagcgatggcaaccagatcgacccagcccatgacttccagcttgctcagatagctgcgaaccgaggctccatacagcaggtgtgccactttctcgccaaaagcttcgatttctaccggctcaccgacggcgcagttctcgttgatgtaggcaaacaccttgccgcgaatcgaaatggcctgcggggtgccatggccgtcgccggtcgggatgaagtgggtggcgcgagggcgacgcgagccgttggacttcagttcctcgcgacgggcttcggccttcgcacggcgctcttcctgctcttccttgcggcgctgcttctcggcttcgcgctcggccttcttctgctcggccaggcgcttgcgctcttcttcacgagcgactttctgggcttcctgcgcggccttcttctcttcggccttcttggcgcgctcggcttccttctcggccttcttctgctcgcgctcggcttccttcgccttcgccttctcggcctgctcagcttccttcgccttggccttttcagcgcgctcggcttccttggcggcggccttttccttcgccttctcggcgcgctcggcttctttcttctcgcgctcggctttgcgcttctcttcgcgctcggctttcttctgctcggcttccttggccttggcttcggccttctcggcgcgctcgcgctctttacgttggcgctcagcggccttctcggccttgcgcagggcagcggcttgttccttggtcagctcttcgccttgggtctgttcgttctggtccatgttcttactccgggaatgtttgaaaggatggcttattggcctgtgagaggattatctctaaactaattgaagaagggaatacctttcgcctgaacttctctaaatatttttctttcgggaaagtccagactccagggaacttatttatgttagcgaagtttttaactcttacgcaaaaacaacaagtattcgattgcgcgagttatcccagtatacatcaactgactataagggatggacggcaagttttcttctaacatggcaacccgtttccattctgaaccctgcgacttgtggaacgtcatcgcccagccgaagtcgaatccgccaatagccttctgcgcctccagccgcacgtcttcctcgaccgaaaagctcagagggttgaacttcacccatcgttcatagttcgtgccgataatgcgaactttggcgaacaacatttcatcaggctcgtcgtcatcttcttgcccttcaggaactggcttgaagtccagcagaatggcttgttcgccgttcatgattccatattcgtgctggttcccagtgcacaccagcttctcaccgattcctggctgcacgcctttgtagccgaggattcggcgagcgcgtgcgttcaagcgacggcgagtattgttgtaagcgcaaagaatcacaccatcgttgtccaggaacgtccgcatttcatcatccgacatatcgaagccggcccggaccactatgtcatcatactcgcggcagggcaggcgctttccctggcggacgaacatcgacgcccgaacgatattgccggcgttgcgctcgatttcggtcatgatggtatcacaactgttctcgtggaagatctggacgccgcgcacaggaggcacctggccaaagtcgccgatttccaggaccggaattcggtgcgacaggaggcgctcttcatcccactcgccgatcatggacgactcgtcgagcacgaccaacttcggcttctcgtcgagcgagtctttgttggcaaacatgatttcgccgtcttcatcttcgccaatcggccgatagatgaagctgtggagggtccgggcattggtgcagcccttctcgcgaagccgcgctgctgctttcccggttggcgcgacgaagaccgtccagtccatcgagcagcaaagttcggcgatgatcttcgcgatggaagtcttaccagttccggcgaaaccagcgagtcgatagacctggcggcggtgcgctcgatcacaccaaccgcgataccagtccacaacggaattgatcgcgtcgatctgctgactgtttggtcgaaagccgaatcgctcttcgatctgatcgacggtgaagttagatgctgacatatttgcgttctccaacgctaggtttaattgaatcgaggctcagtttaagcacgccgtccacagaccagccagtatcacgacgatacttgcggccttgcgggtcgacatagaagttcttcgtgcgccgcagcagaacataatgccaagcagctccaagcgcgtggacccttcctttatacgggaaagccttcgcctgctctgcggcctctttggccccagggagccagcggacggtagaaaggaccaggaccgcacccttaatagcctgggaagcggcgcggccgtcctgtgggctatagcgatgtctatcgaagtctacccagtggtggttgccgcgccggagcttgaccgttcgggatcgcccctcgaacaccacagtgccttcgtgagttaaaatatgttccgccatcgaatgttcctttataacgtacagttatgctttacctctgcgcaggaagagtatactatcagctgactcgccaaagcgagcgaatttaatccaactttacttcggcaggaaagtggccgatactagagccgccgcctgtactgccctccaaaacagaggatacattaaatgcaagaatgcaagatttcccgcgaccaactcccggtcggtaatccgaatcccaatgtcgacaagacccgcgacccgaaccttaagcccggtttcctgcgtcgcagccgcgagctggacccggcgctggccgttcgcatccgtcgcgagctgatccacgccgaagcatccgacttggccaaggccggatgggtcaattcacagtccagcctttatggatcgaaagccttcccgcgccattccgtcgttcgcgtgaccggagttccggaagatggagctttcatcggcatgctgatcggcttcatcgagcatcgcgagcatggcgaatgggcggtcatggaagccggaacgaaagaaggcggcgccgtcattattccagtcgatcacatcatgcgagcgtcattcgccgaagccgaagagttcgccgaaaagtgggagcggaacttggggtggcgtctcctgcgccaactccgcgagtgcggcgccctggccgggactgaagacgagttcctgcggcggatcatcaatcgatacgttcgtgatcgcacgatcctcgatcaccacaaagtcggcgcggacaaaacctatactgatgcagtactcaaaagcatcggcgaaacatggccgaagattccttcggggaaattcgtcggacaccgagtcgcgcagctcctgatcggccacaagctaggtcgagcggggaccatcctgaatgacctggtggacttcctggagaagttcgcggccgggcgcgataaaattctcaacatcgccatctgtaattgaggtgaatgaaatggttgacttggaaaagctgagtccaaagctgagtcctcggcagcatgccgttctactggagatgtacaggcatcctgagcatccagttcacagatcgccaacgaatttaactcttaaggctttgagacgaagggggcttgtcgagctatcctggaaggattccgtggctggatatatgttcggtcgccaaccttgctggaaaataactgatgccggcataaggcgaatcctgggagtgctggggaataatatggaaaaagaacaaagcgaagatcgcccaagcatccctgagtttgagaagaccgacgccaacaaactctatgatgctctggagacgatttcgctgctggagaagaagttggacgaatccgaaaagcgcgggagcgagctggccgcgagctattgtgacggcgtagtcggcgatgaatacggccatccttattgtcgttataaagtggaacgcgacgccgccttggccgaagtagagcgcctgcgagaatcaaaaggcgatccctctggcagcttcgacaggtgtatgaagatgatgtacgagcgcgacgagaatgcaaaacgactcgacgccgccttggccagggtcgcggagctggaagggaagttgacggactgggtgcacgaagggttccggctcaacgaggcgctagcggtcgccaaggctcaacccagcgtgccggaaatatctggcatcggtcgcgatgccgaacatcccagagctgtagtgctgtatctgcgtaacgaacccagcgatgaagatatgcgagcaattcagaactttttgcgcgccatggccgcccccgctcagcacagcgtgccgaaagcatggctcgacgttcaggcagagcgccgccggcaggtcgaggcccaggcgctaaggcaggaagtcgcagcactgcgcgcaagggcggatgttgtgccggaggtgttcgggcttgagcggtaccgcgtagaaaaaactgggaagggtttctggccatactgcgtgcgtgcgggggatggaacgcgtgaactgttcgtcggccacttgaagcagtgtcagcgggtagcgaccgaattggctacggcgtttgaagatgggaagtttatcgccgcgcccggcagctcggctcagcacagcgtgccggaggggtggaagctcgtaccgatggacccgacatcgcagatgacctatgtcggtcagtccctgcgttatgacgcggtaaacagcatcggcgagatttaccggcaaatgctcgccgtagctccctcacccatcgatccggccgcgcatcctcagccgtgccagcaaccacaggcccatcctgcccgctgcgggtgcgagcggtaagtgccaagtaaggaattcatgtaatggaacagaagaaaccttcaccagtagatggagtcatcatgaccagcctcgacgttctccggaaagcacagcccgaagcccaggacgagtatgccgtgtccatgttcgcaacggcgatccgccagaaaatgcagcgctcccgcgataaaggccgaggcggctggatcgactgcgacgaagatattctgatcaacggattcgccgaacatgcgctgaagggaaatgagaacaacctcttggacctggcgacgttcctgatgttcatgtgggtgcgcggcatcgacgatgcgaagattcccccggcgctcgaaaaggcgcgacagcacaagatcatggaagcctggagtcgaatccatgaagatggcctaaactccgccagaaaggcgagtgctgcgcgacaattcgtggaagtgcctcgacgcaaggggcgcccggagcgacttgcatgaagcctcacgaaataagactggcacaggccgaagagttcctgcgcgaactcggccgagggattccagacgacgaacgggtgatggtcggctacgctgaagaggccacagtccaaaccgacgagaacggccgcaagctcaacgccggctggtggcctgtgccctggaaggaagggaaatacataaactcccgatccaacgcctacgcttgcatctcgtcatccatcaagacgcccaacccgaagaccggccagatgcgatactggcgcggcgaagcctctttcggccacggcctggcgttgatggtcgatgacatcggctcaggcaaagggtccaagggcgacttcgaccgcgacgagttccgcgagcgactagagccgaccgcgattgtagagacttcgccgaacaactaccagttctggtatttcttcaaagagccgatgtcacacatgctccagttcaaggcgctgctctattcgttcgtggaccaggtgctaaagaaaggcggcgacaacaccgtcaaggacgtcagccgttacggccggatgccattcggcttcaacaacaagcgcgggaaagacggcaagttcaaatatgccgacgaaaacggcaaacccgaactcgtgcgcctgtacagcgccgactattccaagcgctactcgccagaggaaatcgcgcaggccttcggcgtccgcatcattatgccacagatgaagaaggtggagataaaccgcgacgattgggtgtatgaccaagtatggctgaagtatgccgagcacatctgcacgaaatacaagatgggagaagcggcaggcggccaggtccagcagaatatgtccggcaaataccgcatccgctgtccctggggcgacgagcacaccaacggcgatcctttcggcgcatactttcgcggaccgatacctggcgccgagcacgaatatgtgttcggatgcgggcacgatacttgccgcaaagagcatcgacggacatgggcggccttcactgatgaagtcgtcctgccgtatattgtcgaacaacttgaacgcatcaaccgccgtcacatcggcgaggagtagtaactatgcaaaatgatcctggaattctgattaccgccatcggctcattgcttctcggccttctcgtcttcttcgaaggcctgaatggatggaaaataccagcgtcaaactttctcgcgtcgctcctgtgcttcttcgtcggcctttctgctttaacctgctggttcgtcttggcgtttgacgtgttttagtcgacgaacggtccggaaatttcggatagggacggaacttattagctctgccggtttaggtaggagataatagccgtccctttcgcctcaatatgtagaggcggtgttatatccgatcatgtaaagcagaaggcggcaaacctaacatgattatcgacgacgacaacattcttggtgatgataatattcttggtgatgacgaatcggggtccagtgagttcgatctcacacagatagaagatgctggaatggaccctttgatgaccgccgcaagtaaggcggccgatgatgcgattgcgaggaacgaggcgcaccgcgcgcaaaaggcggcaagatacgccgaggcgtatgctgaaccagacttgaggaagcgagcgcggttgttgatgctcgaccaggcctttgatcttccggtcagccggctggtgaaaggaccgttcgatgactttatcaccaagtacagctcgacttcagacagcaactacctcgcggtctatgatacgttgttctgtaagggcgacggaaccgtcccccacccgcacttcgacgagtttcgcggccggctggttgaccaccgaggcgtggcgttcaataacaagaccctcgaccccattgacctgatgggcgccctcgcggctgcggccttggacgatccatcgatcaagaagacgattgaaacttgctgcgtgtgggcgcgtcgatatcgccgcaactctttgatcgaaacgtttgagaagaagataccggagtgggatggtgaagagcggatcgacacgctgctgatcgacttgttcaaaccgttcgacaccgagcttaaccggatggtgagtaagtatttctggctgagcttgtactgccgcatcaactaccctggaatctcagcgccgatttcgctggcgttgattggtgggcaggatgctgggaagacttacttttcaatcttgatctgtaaagagttgtcgagcgaccgaaagttatcgccggtccagcttgacctgagccgtcatgaccagacgccatttttgcgcaatatcactggcaactcggtgatcgcgaacgtcggcgaaatgtccggcttcaaaaagggcgacatggaacgcattaaagagttcctggtgcgatccgatgatactttcgatcagaagtttgaaccaggcgaaactatcagtcgacaatggatcaccatcatggacggcaacggctatgatggtcttcaacgggatgagtcaggaaaccgtcgattttatccaatgttcgtggcgcaacttcccgacgaggatggcaagccgaattgggttaaaccgggcgatggaaatgaaactttccgcgttgacttcacagacttcggccgcaaattctggcaagccatggctgagtgccgcgcctggattaaggcgaatggcgtggagggatatctcagtctagttcgggcgaccaacaacgaagtccagaaattctctatttcggaaatggagaatgcgcgtggcgtggttcgtgatgacacgattgatatgtatctgatcaacgtgctgatcagttgcgagttcgaagagatcaagcctggcaggaattcaaagaatcctggatggagagtcaacaccatcgaaatcctgaaatggttcgatattctcgccaggaagaagccgatttctcgccacttaactccgcacctgaaggcgctaggatttgttccgaataagaatggcttgaatggctggtgcctgcctgtagataaggttgcgcctggatggaccagagatatgcacacgacgttgccgccgttcaatgatgtgcttgtatacttgctgaggaaggttgattctgaggtgactgatgaagaggcaatgattcaaatccgcaaagttaaggccgagcgcgcaaggatattgggtgaggatttctgatgtagtgatggagtgtacttggactaggccgccttcgggcggtcttttctttggtgcggagtacattcgatttcggttgtggccgagtgagattcggaagctatctggtaattagggtttggtggcgatggcgcgttgtggaaagttcgtgaacgttggatcaaggattttgtgcggtgattggatgaattgtggaaaatcgacgattctgactggatttttggggtcggccgcgccggtcttactggtaattaccgaaaccgggaatttgggtcgagccttagtgccgcgtgggcttgaagcgcttattcggatacttcccggtttcggatgcagccgcaaaagtatactacagcgaaaatcga

SEQ ID NO: 29 - DNA, 67827 bp, synthetic construct
  source 1..67827: mol_type = other DNA
ttgcacaatcctaatagaaaaaatctatcacggacgttacctatctttaaaattaataaaattaatagtaatttggtaatttggtatactttagtatttgaaagccttgcggcactaagcctgtacacttcccgtcaagtttccgattccgctcaactcgcggcagggtcgccggaaacttccggacttccaatccatgggtcgcggcaacaccacggcggactaagcggcaagtgccaaaactcgacgaacggaaccggaaatttggaagcgcgatagaatcgctcagctggacatatttctaacattcgatttaacactcaatccaaacactcaccgccatcgtctcccgccaaccgccgactcgatcctcacccaccagcggatcgcccgtataacatcctataacaccacctaacactcattcatcatcaaacccacccagacctacagcccacccacaagcagcccatagacgcgatccctggccccatagtacaatcgcgccatactcagtgtcgcggcagagcaccaggggccatccgccaaccaagccaccacgacgactccagaatcgaactcagggacgcagcaccaaatgaccaaattctacagccccgacgatctagtcacgccacaggaattcgcagacccgcatttcgcggcgatcaaccaaaagcgattcgacctgtacatcgacctgcgcgtccaaggttacagctcctggcgggtcttccgggccatctggggcgaggagcatatggacggtcccgcgcaggcccgcatcttcgcgatggagtccaacccgtactatcgcaagcagttcaaggccaagttgaacgcgaccaaaacgtccgatttgtggaatccaaagacggcgctccacgaactcctccaaatggttcgtgaccccaccgtcaaggactccagccgtctgtcggccatcaaggaattgaacgttctggctgaaatcacgttcgtggacgagtcgggcaagacccggatcggtcgcggtttggccgatttctacgcatcagaagccgaggctcagaccgcgaccgtcgctgctgcggccgaagccaatggctatgtgccggaaggtgaagagggagatttcccgtctccgtctccggaaccgaccgaggaagaccgcgccaaccccatttagacataaaataacggctaaggatttaaggtaaggaggtttatttatgcatccgtttgaccaagctgtggttaaggatcctaccgcaagctatgtagatgttaaagcacgtcgtacctttctgcagagcggtcagctggatgatcgtctgaaagcagcactgccgaaagaatacgactgcaccaccgaagcgaccccgaacccgcagcagggtgaaatggttatcccgcgtcgctacctgtctggtaaccacggtccggttaatccggactacgaaccagttgttaccctgtaccgcgacttcgaaaaaatctctgcgaccctgggtaacctgtacgttgcgaccggtaaaccagtgtatgcgacctgcctgctgaacatgctggacaaatgggcgaaagccgacgcgctgctcaactacgatccgaaatctcagagctggtatcaggttgaatggtctgcggcgaccgctgcattcgcgctgtctaccatgatggcggaaccgaacgttgacaccgcgcagcgtgaacgtgttgttaaatggctgaaccgcgttgcgcgtcaccagacctctttcccgggtggtgatacctcttgctgcaacaaccactcttactggcgtggtcaggaagccacgatcatcggtgttatctctaaagacgacgaactgttccgttggggtctgggtcgttacgttcaagcgatgggtctgatcaacgaagacggttcctttgttcacgaaatgacccgtcacgaacagtctctgcactaccagaattacgcgatgctgccgctgactatgattgcggaaaccgcctctcgtcagggtatcgacctctacgcctacaaagaaaacggtcgtgacatccactctgcgcgtaaattcgtttttgcggcggttaaaaacccggacctcatcaagaaatacgcgtctgaacctcaggacacccgtgcgttcaaaccgggtcgtggtgacctgaactggatcgaatatcagcgtgcgcgtttcggtttcgcggacgagctgggtttcatgaccgttccgatcttcgacccgcgtaccggtggctctggtacgctcctcgcgtataaaccacagggcgccgccgcacaatgaagaagcgacaaagccccggactctagttcagaatccggggctttcttttgggtttcttattctccagcttcgatgatttcgaagttgtatttgacgccttcgtgctcgaaagtcaatttgccggacgctttcagctgcatgcggaatcggatgcacttagaggaaggcaaaccgaactcgatgaaggctgcgttgcaggatttgaactcgccgcgcttgcctttcacggtgaccgccacgccatgacgctcggtgcgcttgcgggcgacttccgggtctttccaggagttggcgatggctgctgacaggtctttggtctctttggttttctccggcgcgttcttcgcctcttcgcgcattttccggatttcttccagcgcttcctcttcggtgatttcttcttccggcttcagattctcttcggccttctcttctgccttcttcttggaagtgcgggttttgtaaaccttggccggggtttcctcttcctggaaggcctcttcctcggccggcagagcgttcaggatggcgaggcagcgacgctcagcggtcttgcggtcagagaagcgcttgacagtcgcatcggcgttgtgagcgttgtagaaggcgaccagttctttcatttctgcgttctggatgtcgccgaaggttttgatggagttggtcattttgcgatcctctgttttggaagatttcgtttgggcttcagtttgtcgccccgttgaaagagattatgcctaggtcgatgctgcgtgtctacatctatttcatcagattgatcacaaagccgacgaacggttgtctgatgtgaaaacaccgcagagcaggctgcggtgtttgttggcgttggggtgatgtcagaaagtcgggactgtgataggctcgatgggcggatcgccgggcctgtcgttgtccgatgcgggcgccgggctggaagggatcgcacccgaccgaagcgccagcgattccgactgcctgcttacctgcggagctggaggcgcttttggcgcatgaggcgcgggcggaaccggcaggcctggaggagccatcggcgccctgggcggctccggaagatcgggcagatcaggaagactcggcgctatgccgccaaaggaccgctgcgaccgctgcgacggattgtcgccgaacatttcggcggatcggttgtccttgatgacttgacctatggccgtcttgtcgccacccggttctgctggatcgaagcccgtgaatggagtggtaacgcagcgcatgttcggatgggtcggcagattgttcaggacgatggagtccgcccagacatacgggtttttgtggttgccgggtccgtggctgatgatctcggcaggaatatggccgttcatggtgagccattccgccatcccttgccgagtcagcgggcttaccacgatctgaccagtggactctttggcgatggcgaacagatcaccgaattcgaatccgatgattgtgtagttggacctggactcgccgacgaaagccagagtttcgatgttgtggtggatatcttggtcttcccagatgtacagcatggttcgctcctcaataaggttgcttttggtgttcgaccagagacataccggccggaactttgaagcggacgtattcgatcatcatcgccgttcgacgccgattcgtgcccgactcgtcattgacgaatagttcgcactggtgcggaatgactcgcgtcaccaggcactcacctttcgagccgtagaacttgctgtaggctgcgacgcctcgcgtcatgttcagacggatcgtttcgcagagtcgctgcgcggccgacgcgctggacagatcggtcggactgaccgtcacccagtaatggccactttgttctttatcggacataagctgccctccaatgagaaagcctctgccgagtcgcagaggctggttgttgttagtcgcgcttcaacagaacgactttgtcatatgcgcgatatttaccgcgccagtcttcccagtagtcgccggccgggcaggtaagctccagggtgatttcgtcgcgccagcattcgacagaaaggacaatcgccttgttcctggctgcggaatccgccctgagcttaatcagaatttcgtcgccagttttcaactcatcaactcttacaacttttgccatggtgttctcctattgggcagcgccgcgagggcggatcgggtcgatgtcatgtaagcagatggtaggatagtccctggccaacttgagcttgaagtccacccagtcagcgccgacaagtgccgagacttcgacacttattttgttgtgcggagcaggactggtgcgcaggactatggcccgacgccgaacgggatcgttgacgtcaacatgagtgagtatttcgtcgccgacgagcaactcacaggccatcaatattttggccatcatacactcctatgagaaggcgcggccaggacgatcccagccgcgccgatggattaacgtttgtgaaggatggacactgcgtccacgtcgaggatgctaatggtacggcgacggcgcggattgctgcgttcatggatgcgaatcaggttcgcagctggagcttcgtccaccacccatacgtcttccggtttctgcgtccggagcaggaccgtcacttcagtattctgggcgaggccgttgcagatgaaagtgaacttggacgagggagttctgtacatttcgagattcctttttggacttctggttcggcttctcagccggtgaagagattatgccctgattctcaccgccgagtaaagcatttgtgtaccaattctcccgtcaggtggaaccaaagtgcggtatcgcttatggctacgctaccgcgccatggcccttcttgctcgcacactgcgaaccacaggctgatttccatccttgccaggactcggccgaaagattcgaacctgcgccgactggacaggatgtcgacattcactcgtcgattgacctcataccggcgaccgttgatgacgaagaccagccgcagggtttgtccgtccagacattcccagtatctggtttcataccgaagccagtagcgcttgccagccgggcctaccatggtcatttaatcgatgctcctggccgcgccacgcggtccggtcggcgggacgggatcgaaccgacccaggatgtagtcgggccggcgcgcttcctgaggacacacggcgagaaggcgccatcctgcgtccagggcagactggagttcgtccgtgcagcagtcttccttgagcagcagacggttgacgttctggagattcggaccaggtatggccgatcctgtgagtgagttccaaccctcgattccactcaccatctccggttggttgatgtagcttacggacataccggccaaccggctcgcggccagctccagacgctccagcatgggtcgcagagcagcttccgggtcaatgtcgtcccagagaaggaccaggctgatgatggtatacggatagtccttgtccagatcccaggctgaagcggtcagacggcccaggccgatttcattacacatcacgggaacgtcgttgctccaggtggacggctcccagttccgctcaccaggattcccgattgttacgccttccaggttccccaggagaacgtggagcttgctgacatattccgcctccaaggctttccgctcttcgtcggtcttgttgtggcgatagaaggatggagggctgactttggcatggtagagtttcataactgttcctcggttttggaagatttgaaagttagagaatggtgtcgcagtatttctcgaaaggactctggcgcttcttctcgcagatcgcgcaggtgatttccaggtcgggcagctcgctgtaagtcttgccgagatacagccagcgcttgcacagactgcggccgtccgacgtgaagaagtggactttgcgagcattgccgggttgcgcccagccgcttggtgccggcttcctgctcataccatcaccacgtcaatttcgtcggcgaagaagttaaagccaactccatctgcgtagccagtgtaacgcagacgaatcgtcccatcaatgtgggcttcctcgacgccgatgacttccagggtggtatcgttgcagtacagcttgacgaacatcttgatgccggagccaatcgccgcgaaggcgatctgcttgtacaggtcttgcttgatcatgctttacgctcctgtttgcggatgtattctgccctgacttcggcttcgaacttcgcccagagcgcgttgtctactggaccccagggaccggtctgagttccgtccaccggttcgaacttgccaccggcgcggcgatatttggacagagttttcaggctgatgatcttctcatcttgggaatcgaattggacgatcatttgacgtacttcccgaagtagcaggtgtggatgatttccagaccattggagatagccttcagcttgatgccgaaattcttgatcgcccagtccagatcgtggtgatagaactcgatgatgttgacgatttgaccggcgctgtagtggatgacgcgaaccttgccgttccagcggaagtcttcgcggctgtttacggcctcgactgcgatggtgtcgtttctgccgatgttccatttggagctagtcatgtcgcaatcctctttttggagtgtttcgcgtttcgatgaggtaactatacctcagtcacctcatcgagtaaagcacttttgaacatattatctgaaatttctgtgagacggatccatcggcggattcagtcagtggaaccgagactccatccgttgcgggcgaaggccgagcgaccagacagcttgcggcactggatggagctgccatcgtcgaaggtgtaagatacggcccagtccaggcgctcgcgacgcactgacgccgcagcgatatcttccagacgggctttgagaagctgttctgctttggtcatttcgagttcctctttggggcgcttcgtgtttcgatgagatgactataactcagtcacctcatcgagtaaagcgcttctgaggaattatctgaagtttctggaggccagaaattgccgccagagccagtcaacgtgatcgttgaggtagcgctcgccatcggacgacagagccaggcatccatcctttatgccgagcttggaactggaaatccattcgaactcgaactggagcgttcctgggcgagggatatgggacaggctgtacttttgcacggtcaggaatcctctaaaggtttggagttcgcgatggacgcgactttctgcatgccgatgcgatagaattcggcctcttccctggccttggccagctgctccctggcttcgcacgccagcttgtgctggttattggcattctggatgcttccgtccagactcctgtccaactcttcccgaagagccttctgcgacgctagctcggcctccaaatcctggattctgatctgaagctggcgattcctttcagaaacatcgttttcgcgagcgatggaattctgaaggcattcgtcaaggcgagtattttcgcgcaccagttgatgcttttctactttcgcctttctgcacgtctctcgcattgctgaaagctcactcgcatgcagatcgtcatccgggtctttacgctcttccttcgactccatccgcaggtagtactggccggctgcgaaggcgagcactgcctggtcggcatacgctgcggcatcggtcatgtatctggatttgtagcgaggcagaaacttgcactcctctggatcccagaggagactatcggcaataggccagaatttgcggaaaccatcaggatcgacttctacattgaccatttgcagctggccggcctccacttcgacttccagaggaacctgaatagtgccggtgatgtactggaagtacactatgctagacataacacaaactccatgagaagtcgcggccgggaccatcctggccgcgcatcgtaatcaatcttcgccttcgtccgcgctcagccactcttcgaaggcgaagtttaccttcgactcgacccaatcctgaagctcatcggcgaactcgtcactgtcgatgtccatggtgatgcccatgacttccatgttccatagcgcggcattcagttcaaactgcaccatccgctcgccatcgacttccataaggatgcggtctgcgacttcatagtcgtctacatcgaacaggtggccgccagtcaggaggtgctggacgaaagcttcatcgaggttggtgacttcgatctggacttgtttggtcattttctgcgatcctctgttttggagtttgggcgcccggcgaaccggggcagggtgtttagcgcggagagtgccgatcttccaattttcaagctcgtcttgcgctgcgatctcaatatctaacagcgcttcctgccgctcgcctgccgctcgcctgcggtaagggtagagttccaagccaaatccttgatggccttgatgatttccttctttgtcatggtcatgcccgtggctcctatgtgcggcgggttggttaggcgaacagaaggcgattgacagcagcgtccacgtcccagccgcaagcgaacagcgccatcgcggcttcgtattcggttgcaaagccggtgtctgccatgaccacttcaacggcggttttgctgtaatgctttgaaagtttcagggcggcgagagagtccgctttgtcggccacagcacaagcctcttgaacagtttcaaatcggcccacctctttgcagcgattttccagaacggcccagccaaagacgttaccagcgccatcagtgattttgtgtactgtgttcatcgtcttaccctccaggtgtttgttcgtttcgatgaggagattatgccgatagtcagaatggaagtaaagtgtctgagtgagaaaaattctgcacaccgacgaacggttgtgctcgaccgtctgctgcggtgtcgatatactcggcctattgcgaacaatggactgattaaatgtacaaactcaatcctgcgctgcgagcggtctggcgaactcgtgcccgttacaaagtcatctatggcggccgggcgtcttcgaagtcacacgacgcaggcggtatcgccgttttcctcgcggccaactacaagctaaagttcctctgtgctcgccagtttcagaaccgcatcagcgaatcggtctacacgttgatcaaggacaagatcgaaaactcagagtataatggcgaattcatcttcaccaagaactctatcaagcacaagagtaccgggtcagagttcctattctatgggatcgcccgtaacctgtcggaaatcaagtccaccgaaggcatcgacattctctggcttgaggaagctcactatctgacccaggagcaatgggaagtcatcgagccgaccatccggaaagagaactcagaaatctggatcatcttcaacccgaacgaagtgaccgacttcgtgtatcagaacttcgtggtcaagccaccgaaagattcctgcgtcaagatgatcaactggaatgaaaatccgttcctcagtgagacgatgctcaaagtcattcacgaagcatatgagcgcgaccgggagcaggccgagcacatttatggcggaattccgaagactggtggcgacaaatccgtcatcaatctcaagttcattcttgcggccatcgacgcccacaagaaactcggctgggagccggccggatcgaagcgcatcggcttcgacgttgcggacgacggcgaggatgcgaacgcaactacgctcatgcacggcaacgtcattatggaagtggacgaatgggacggcctggaagatgaactgctcaagtcgtccagccgcgtttacaacctggcgaagatgaaaggcgcctcggtcacttatgactccatcggcgtcggcgctcacgtcggatcgaagttcgccgagttgaacgatgccagtcccgacttcaaactgatctatgatccattcaacgcgggcggcgctgtcgataagcctgatgatatctacatgaagctgccgcacacgacgatcaagaacaaagaccacttcagcaacatcaaggcgcagaagtgggaagaagtcgcgacccgattccggaagacttatgaagcggttgagcatggaaaggtttatcccttcgacgaattgatttcgatcaactctgaaacgattcacccggacaaactaaatcaactgtgtatcgaactttcgtcgccgcgcaaagacctggacatgaacggccggttcaaagtcgagtccaagaaggatatgcgcgagaaacgcaagatcaagtcgccgaacatcgctgactcggtgattatgtcggccattctgccgatccggaagcccaaaggtttcttcgacttctaaacacagaaaagcccggatcgctccgggcttcgggtcttactcggtgtggttcctggcgctgagtgtcgacgcaacggcctcgccgactcccagggcttcctggccggccgcgagcgcttcggcttccgactcgacgatgaagtcatcaccttggccgtcgcctggcggaacctcgaccagcacggcttcttcgccttcgaaccgcaggtcataagtcttttcgacggacagtccgtaacgggcattgagcgcatcccagagctgagcttcatagttgcgcaggtcttgcagagatttctggtggctgagcatcgccatatcgacggcccgttgcagggtttcgtccaggacgttgaatcgcatgcgaagagaacgaatccgctcgaccacttccgcatccactacatgtctttcgatcatcgcttttcacctttgctgaatgttacgttgtagccattgtcggccaggtaggtcagggcgccttcgaaggaagttccgacgagatgcttgagctgcatttcgcgttgcgcggcgatccagaatgccgttccggagaactctgcgtggccttccgacaataccttgccatcaggcccgtcgatccgaacgtgaacggaagatagcttcagtaccatcaatgaatccctccactggcttgcgacggcatgctttcagcgcgagcggcttcacagtccgggcagggacaggcttggcggacgcgctccaactcgtcggcatccatgacatagagcttcccatcggaagtgtcgtgcgccatggcgatgttcgggaagtcggcagcgctcaggccggcgacagcgcggatttcgtcccagagcgccacatgctcggcattcaggcgagctgcgagcgcttcgtgctctttcgctacacgagccatgaactcgtccatccggaatgcgaattccgcatcgatggatcgggccgaggccatggagttgaggcgaatcggttctttcttcatggtaattctcttttggttggcggttgttcgctgctcaggcctattacagtctgagcagcatgatgaagatgaacgcaaggaacgcaaacggcacaagtatgccggacatcagctttgacaggcgctgcatctcagcgtatttctcggttgacattccgtgctgcgccgcctcagctgcgaagcgggctttcgcctcgataacttccgggcgcagcgacaggacatattctaaggcctcttcccgcgctttttcggcctcgaccgacctagggtcgcgggccgagacttcgctgtgccctggcctcgcgggatgggcctgcagcgatggaggaagttcggcggccacgactccatagtcggcgcaggcccaagcgatcccgatgaggatcgcgaggatggattggacgattcgcagcataactttgtcgctagggaagctcatgatcaatcctccacagaccgaacgatttccaggttgcgcccggcattggtcccggcattgaaggcgcgccgaccgtcgctatcgtccaggcgcatgagcttggtaacatttgacttcttgtagccaggatcgccgaaatgttcgtgcaccgcagcttccttcaccacaaccagagacgttccggcagaagataccagctccatgcgcttcctggtgatggcctgaaggcgatagctgatttcctgggtcgcggccagcttgaattgcgcggcaaccttgacgttgaatcgtccgtatccttgagccttctgatactcccggcacagacgatcaaccgcttcgacaagggagttgaacatgttcaccgccagctcaacgtccgatttgtagcctttaaagcggacggcatgcccccagcgcttcgtagtcccgccgtttgcggcgtgccaagaagccttggcggtcgctcggtgatcgttgatgccaccggcgaaatccatgatgcagtcgttgtacgtcgccacggccaccgagaagaacttcatccagttcgggattgcggaatagtaacgagtcgcgatctgctcatcgaactcttcgcgaatctcgccggtcacttcgaagtcgtgaaggtcatatttgtccttcagcttcttcacacgctcggctgcaatggcggcttcgtgcgggctggaggagtcggccgccatggcagtcagtttgcggatgcggtctttcgccttctcgatggcttccggggtgaattcgttctggtcggtcatggtcggttcctttgtctgaagggtttcgcgtttcaatggagctattctgccttcattcagaattgaagtaaagcactttcttccactatttcggcatcgactggaagaaattccagatccaatcacctgctaccagcaagaggatgagggcggcaaagaacaagacagcggccgcgagctgtgcgcccggcttcagtttgggatggctgagcttgggctctacgggaacggccggagcgctagcgctgcaaccggcgtctcctgggccgtagccgatgccgcgttcacacgcctggagcgacaccagggatttaagatactcggtctgcttttgcgactcttcgtagatgccggcgacggcgaaccagagggcgaacactacggacgtacacacaacccaggcgccggtcagcaggagggccagcgggccgatgacgaagacggtagcagccaggacgattgcgccgccccagatgatgaagccggccagaccattagtgatgtcgacacagaactttttcattttcagattccttcggttacgggatggaggggatttgaaactctgcgccgccgagaacatcaatgacgacttcccagagcgtcggaacagaccactggtaacggtcgaagtcggtttcaggatcgacgcccagcgtcacataggaagtggcaggccatttatgaacactgcctttccgcatgagagtcgccacgcggccgtcaccgagcggattcgttctgtgcggaacgtacgcagacatcgaatattgctgcccggcgtcgacaacaaatctttgcctctggcgcagacatacagagcccacaggattccagccgcgaccgccgcaagcctggcgagccgaagagtgttcataaccttcgtgagtcatttcgccgaggcaagccgagcgatcctcgtaatagttgatgttctccatcgatccaaccagtaccagagactcgaaatcgaatctatgatcgtggatggccgagtgattgaagcaaagccggcgcggcaactccgggtgccaaacatggaggcgccctgccgggagctggacttgaatgaaccccaggccgtgcagcgtgatcttgtccttcatcgggtcatggacggtgctcatggataatcctcagtagcagaaatgtatggtgagagttacgatggccaagccggtcgcccataggagggcgaaccaggccatggctttgatggttatgtagatcatccgaagaactttccggcacagatcggtccaatgcccatttcgatggatgcgtggttggtcaactcgcgaccgcagcaggagcattgaccagtcttccggccgtaggcgactgccgattccatcggcttttcaaacatcttcagaacgtcgtcatgctcagtgtcggtgcagtcgcgactcttgatgaatttgccattggtgatccggccgaggtagatgtcgcccaagacgtacaagctaccggcgttccggctgtgagcgctagcctctttcacaataacgatgagcggctcctcgccttcgccagccaggcggattttcgggcgcttgatgccagattctttcgccttctcaaacgccttctcgatgccggaaatgtccagagtcggtgcagcagcttcctgcgcggccactttctcgcgatatttggcgaggttttcgatggcgcgcttcgcagcagcgatctgattttctgtcaaggagccgtatttatacaacgactcctgaaggctctgagcgaagctgaaggaatttccagtccaccactcgacgatgtccgggtgcgcagcttcgaaggctttaattttgaggtcgcgctcttgcgcagcgctacatattttctcgatgcgcttttctgccgccttagcacgactcttggcgcgctgctccgggctggttttgtactctttgtatccaacaccgccgcaggcgaagcaggcgcgaccataagacgaagggccacggtacaggccggtgcctgcgcatttggtgcacttgtcgcgatacagcttcacttccttccgggaattcgggcgagcgcccatggacgcgtcttccagggtcttcggcgcttcgttgttgatcgctacggtagcgaagtcgtcacccaggtcttcgaagccggtgaacagattctctgctgcgttcatatcgattctcctgtttggaaagttcgtttcgatgggttgactatacgccagaaatggaaaacggtagcactttcgcactaccgttcgtcggatcgcagagggtcaggctacacggatcaactgcgacatgactgccaggttccgctcggcgacgccgatgatgacgttggttccgatgatgaacttccaagggtcttccctgttcttgtcgtagaacggatttctgaacagggtccgccatgtctcttcagtgaagaacgttttatggtccaggtcttggtgggcgatgttggagttgtagaatggaacaacgacattgagcgtcgcgccgactgccatggcccgctgcaggtctttcaccaaatcgatgacctgggctccggtgagatgttcgaagaagtgaaatgcgtagaccgccgtcaattcgccgtcttcatacggcactcggccgctggcgccgtcccagttcggccagtcgagcgattcgacgccgggaatcggcgaattgcctgcgcccaggtttactgcgcggcggtgatccggctcgatcaactgagcgatgtcgcgcttcatgccgagtttgaacaggttttgaatatccatttggttctccaggttgctgttagtaaatgtcgctgttgatcttgaatccatgctcagcgccgtcgttgtggtcgtactcagcatagctgtcgcagtagtcattcaaatgctgaatgatgccaagaacgtcgttcgcggccttgtgccgtttcgcggcgatggtcttggcgatgttgtcgccgacttccagggtttcggccgtccggcgatggatcagcaggcgactccaaagatagagccggacgcgacgaatgatgtcgcgatggcgctccagtcgtccgtgcaactcttcaatttcgtgctcgcgagattttaatactcgtcgaagctgctgaacttctaattccaaatcggccttagtagccatgttcacctcaaaaaggaaaatcgtctgggactccaggaagctcgacgactattgttgagcctgatcgatctagaatgcatccgaccgagccagccctgtggggatagggtctacacgaactataacaggtgacttccatgactattcgccaggtcgatcctccacaccatctacaaattggcggtcgcttcgacttcagttttcgttcgtccaagacggcgcgtctgtcgcaggaaaggcagcgcgccttaaccgacgtaaccatgggtatagtcgatcattcggatgaggccatcatcctctgattccctcgacttcagaccgcccaaagagtccgactggccgttgcatttcgcatcgatatccatcgaagacaagaatcctgccgatactacggtgatatcaactttgtcgccggccttcttgaagtcttcgcactcagcatcgagggccacaaccgcactcgcagccatgttcacatgacttatgaggtcggggaagatcacaggaacttcacgcgacatgccacggaccgtcatcttcagtactacatacttcatactcactatcccttttgtatgtgaggaaagaatttgctgttttccggatggtggaagcgctcggccgcaggctgtctttcttccggacattgaatcgtcgaaggcgggaaaaccgcgccggcgataatcgccgcgaggagtgcagcggatgtcgacatccagagggcggtttccaggctcacccgaacttccggacggcgcggcttcattcgctccaccctcttcccggttcataggatggtagactgccgccgcgaacccagtcgtcccacatgtggttcagaccagtcggtggctggggcggcggactgtagaatccgggagtctcagtgctgctcaggaaataaggtgtgcaaacggcctggacggccagttggtgccgctcccacatcttatcaatcgctcttagcatgacgtcttcgcactgagtcttactgtcgaaccgtctgctagtatggtccggtatctggacacatccgtctccagtgcaaaggaaagcagtagcaatccatacggtgatactcgccatttcgtcacctctttagttgatgagcagagtctattccatctgctcgccaggagtaaagcgcttttcgtcgggataaatgccgatgatgtctgcgtcgagcatccaaatgtccacggacggatcgtcgctgctgatttgatatagattgtacagctcccgtccgcctacagcacgctcgcctcgcggctcaaccgccagaaccttgccgtggccttctccgtgctcgtccaggtatatgacgtgatcaccgacttcatagctttctttcgtgacgaggcgtgaacgcgagttgttctgcgattcaaccacccaggaatccagcacgccgcctttcatgtcgcggaacaatcttgccgatttgtcgcaatcgaacacgcccagaacttcgccgtctttcaacacgatgtgtacgataggaagaagagtattcatgtttaatctccattgactgataattagagtctaatctgccgaaaagttcccgtaaagaattatttctcagaactgattagttgtaactgttaatctgatgtatgtgtttgaatctcttttgaacgtttgatgtttcccctataataagcgcacacagccaacaaccacgtggaactacaatgtttaaactttcctggatattcgggcgcaaaaaggatagtgctgcctgttctgaatcggcgccggagaaagtcgcacaaatccctcaacacgatccgctcgaccctatgattaagctgggcagaattcgcggctggaacgtcgagccggagaaagccccggtcatccgtagcgtgaaggattttctggaaccgggcctatccgtcgcaatggacagcgcgtatggtgacggaccgactccggccgcgaaggttgctgcgggcggccagaatccctatgtcgtcccgaccatgctgcaggattggtacaactcccaaggtttcatcggacaccaagcttgcgccatcatttcccagcactggttggtagacaaggcttgttccatgtccggcgaagacgccgcacggaacggatgggaactcaagtcggacggccggaagctatccgatgaacaaagcgcgctgatcgcccggcgcgacatggagttccgcgtcaaagacaaccttgtcgagctgaaccgattcaaaaacgtcttcggcgttcgtatcgcactgttcgtcgtggagtccgacgatccggactactatgagaaaccgttcaatccggatggaatcacgcccggctcctacaagggaatctcccaggtcgatccatattgggcgatgccgcagcttactgctgcctcgacggccgatccgtctgccgaacatttctatgagccggatttctggatcatcagcgggaagaagtatcaccgcagtcacctggtcgtcgttcgtggaccgcagccgccagatatcctgaagcccacatatctattcggcggcatcccgctcacccagagaatctatgagcgcgtgtatgcagcggaacggacggcgaacgaagccccgctgcttgccatgtcgaagcgaaccagcaccattcacgttgacgtggaaaaggccatcgcgaatgaagacgctttcaatgctcgcctggcgttctggatcgccaaccgtgataaccacggcgtgaaagttctgggaattgacgaaggcatggagcagttcgacacgaacctggccgacttcgacagcatcattatgaaccaatatcagctggtcgcggccatcgccaagactccagccacgaagctcctcggcacttctccaaaaggattcaacgccactggtgagcacgaaacgatttcttatcacgaagaactggaatccattcaagagcacatattcgacccacttctcgaacgtcactatttgcttctggcgaagtcggaagaaatcgatgtgcagctggaaatcgtctggaatcctgtagactccacgtccagccagcaacaagccgaattgaacaacaagaaggccgctaccgacgaaatctacatcaactctggcgttgtgtctccggatgaagttcgcgagcgtctgcgcgacgatccgcgttccggctacaaccgactcaccgacgatcaggcagaaaccgaaccgggcatgtctccggaaaacctggccgaattcgagaaggccggtgcacagtcggtcaaggcgaaaggcgaagccgagcgagccgaagcccaggcgggagccgtagagggcgcaggcggcccggttcccgccgctccacgcgcgactaagcctctcgcgaaggcggccgaggaaggggccagcgaggccgctgaaccgccgtcgcggccggaccccaaggccgagctgcggaacttgttggtcgatcttttgtcgaagctccaagacctggacgacattaaggcgccggacggcgtagacatagagcacaatgatgcgcctggcttaaagcgcacgtccaaacctggcgtgtctggcatggagccttcagtgttttcgtccaaccgcatcgtcgggcctcgtgatcattcggaactccagagaatcaaggtgaatggaataaccaccttgatcgaaaatccgcgaggaagcattcgacaaggaaaggatgggagttggcgagttcagatgaaacaccactacgggttcatcaagggaacgaaaggcgctgatggggatgaagtcgattgcttcgtcggtccgaatctgggatccaaacgggtcttcgtcgtcaaccaggtgaacaaggaaggtcagtttgacgagcacaagtgcatgctcggcttcaacaacatcaacgatgcgaagtccggatatctgtcctgcttccgtccgggctgggatggtctcggctccatccatgaagttgacctgcccgctttccgtcgctggctggcgaacggcgacaccaccaaaccattcgggggcgagtgatggcattcaaggcctccaaaaagcgcgagcgccgggcacctcttccagtcggaagagggaagcccataattccatcggcaggaatcgaggcctggtatcgaaagcagatgaaggatatgtccaagctcatgatctccgactatcgaaacgagattgagaaggcgctgtcccagcctgcggccgaacggttcttcgccagagacgaatccgttaacgtcctgttcaagatgacccttcgaagcctacagcagcgatggagccgcatttttgaaggtttcgcggccaagatcgccccagagttcgtcaaccggaccgaagaagccgccactgccgcgacccttcacagcttgtcggtggccggcgtcgatcagccacgagctgcgtataatgagagcgtcaggaacaccctggaggccgcaaccacttacaatcatactctcatcaccaagatccaagaggaagtccacgagaagatttacacatcagtaatgctgtctctgacttccccgaatccggaagagcaaggaacttccggcataactaacgcacttcgcaaagtcgggaagttttctgaagatcgaatcgaactcatcgcaagagatcaaacaagcaagctttacagttctctgagcgatgagagaatggcggaaaatggagtcgaggagttcgagtggctacactcttctgccggcaagactcctcgccacacccacctggagaaagatgggaagaggttcaagctgaatgaccccagactttgggagggtccgaaagcagaccaggggccgccaggatgggcgattaactgtagatgcagaaagataccagtcatttgacgtcgataggagcgctatatgccgttagttcatggcacttccaatgaggctcgttctgaaaacatcaagcgggaaatcgaagccggtaaagacccaaagcaggctgcggccatcgcttattccatccagcgcagtgagaaagggaagacggcgaaagattgttcgcctgagctcgtcgccgatcttcgcgccctggtggacgctctgtcgaggctcgtgaaatgaaccgcaagacgtgccggcgccgactcgtggtcgatgtaatcagggccaatattcacggcggattcttcagcctgaagtttgccgccatcgatttggcaatcatcggcttcgccatcttgatggcttttggccgatgatgctgagaaaatctggattctgactaaaaattctagtccggatagccgcaaattaccgtttacggaaaatggcagtaatttggaaatcctactgccgcgaggctttaacagagccagttcctaatttccgatttagccgcatgcttcaaaagtatatagcctgggaaattagaagtaacgttccaatagaattcatctataagcaacgttataatataacgtcaatctatatgctctagacgtattgaaattcaatttttaatcggtaaattggtaatttgaattagtttagaagttgaaagtctcgcggcagtaggcttagacaaatcccgtcaagtttccgagaccaaattaccggattttcgcggctgaggaaactggtaattagatcataatacaaattataatgtaagttaacagtcgcggctacatctaattattgttccgcttatttacccttagatgtactgcgtatataatacagccatagtccacgactcttcgaattaacgatggcaaagtcgaaaagaaaaattgacgaaaatggatatatgaccatagagggctgcccgatcagctcttatggcgttttccaatattctgctggtcaactcggtcttccgggcgatccgacgcggattgtcaacgtatatcgcccggagtctgccgtcagcgatccggagtacatcgaatctctgaagaatctcccgttgatcgacgagcatgagatgctgtcgggattcgacgatgatgacgatagcgtggcccccgaagacaaaggggtggagggcatcatcacatccaacgcttactacgaagccccatgggcacgcggcgatatccgcatctattcccgcaacatgcagaatcagctggaaaggggcaaagaagacctgtccctaggctatagttgccgctacactgagcaacccggcatctggaacggaacgccttatgaagtcgtccaggacaagatgcgcggcaaccacattgccctggtaaaagagggtcgtgtgccgggggccagagtattggatggtctgtgttttgaccatctcagttttgatttcagaccatccgatgagggtaatgaaatgagtctcaagaaagccaagcggaagccccctgtccagcgcgtagggcaagctgctgactcggcggtcgaagagttgcgcgccctgtggccgaagctatctgcgtctgtccagaagttcctgggcgaagaagagcaggagccggagcatcaggaaggcgcagctccggccgaaccgaccgacagcgagcacctgaccgagcatccgactctggaaggtgctcagaaggatgacgaagagcaggaagaggagccttccgttgtcgatccggccgtggccgccgtcgagccggagcatcaagaaggtgccgcatccgaaatgtccggtgaaggcgaagtcgccgaactgatctctcaagtcaaggccattctggctcgactggagggcacggtagccgaaggggcggacgaagagcatggcgaaggtcaagatgtcgtcgagggcttggaagagcagagcagcctcagcggcgcgcaaaccgccagcgacgatggtggtgagggcaaggataacagcgaggaacttcctgaaatggcacagaagaacgcgcaagatgctgcaattcgcggtctctatcgcgacattgctgctaaagatcgcctctacaagcgtcttagctccgtggttggtgcgttcgatcaccgagctatggactcggctgaagtcgctgtttacggcgtgaagaagctgaatatcagctgcgcgaagggccaggaagcactggcgctcgacatgtacctgaaaggtgtcgaagccgcgcgcggcgcggccagccgtcaatcgaaagcccaggattcggccggttctgctccgcagtgcgccgagctggacagctacctgaagggggagtaactcatgttccagaaacaagtttaccgccagtacactcctggttttccgggcgatctgatcgaggacggcccgaagcgggcgcggccgggtcgaatcatgtctctgtctgccgtaaatccggctgccaccgccaccggccccaaccgcatcagtcgcgctttcggttacgccggtgacgtcagctccctcggcgaaggtcagccgaagactatcgcggctcgcgcttctgaagtcgtgatcggcggcgccaacttctttggtgtcctcggtcatccgaagcactatgcgctgttcggttcggccggagactccctggctcccagctatgatctgcccgatggcgccgaaggcgagttcttcgacatggccaccggcctggtcgtcgaaattttcaacggcgccgcaaccgccctggacctggactatggtgacctggtcgcctatgtaccaaacaacctgcctaccgccgacaacgcgcttggcctgccggccggcgccctggttggcttcaaggctggctccatgccgaccggcttggtccagattcccaacgcacgcatcgttaacgccatcagtctgccggcccagtcggcggggaatctggttgctggcgttaccatcgtccagctcacgcagtaaggaggcgtcatgagccagatcagcaagacccattcgcgcctcgcaggccgcaatgcgaaacctttcgacctgaaaaacatcaccaatgacgccgtggcgtctctgcgccgcatcggcctggtattcgatcacgccgtcgtccaggaccagatcaaggccttggcgaaggccggcgcgttccgctccggctcggccatggacagcaacttcaccgccccggtgaccacgccgtccatcccgactcccatccagttcctgcagacctggttgccgggcttcgtgaaggttatgaccgctgcacggaagatcgacgaaatcatcggcatcgataccgttggctcctgggaagatcaagaaatcgtccagggcatcgtggagccggccggcactgcggtggaatacggcgaccacaccaacatcccgctgaccagctggaacgccaacttcgaacgtcgcaccatcgttcgtggcgagctgggtatgatggtgggcaccctggaagagggtcgtgcctcggccatccggctgaacagcgccgaaaccaaacgccaacaggcggccatcggtctggaaatcttccgcaacgccatcggcttttatggctggcagagcggcctgggcaaccgcacctatggtttcctgaacgatcccaacctgccggcattccagaccccgccgagccagggctggtccactgccgactgggcaggcatcatcggcgacatccgcgaggccgttcgccagctgcgtattcagagccaagatcagatcgatccgaaggcggaaaagatcactctggccctggccaccagcaaggtggactacctgtcggtaaccacgccttacggcatttcggtttcggactggatcgaacagacctatccgaaaatgcggatcgtgtcggctccggaattgtccggcgtccagatgaaaaaccaagagccggaagatgctctggtgctcttcgtcgaagacgtgaacgcggccgtcgatggcagcaccgatggcggcagcgtgttcagccagctggtacagagcaagttcatcaccctgggtgtcgaaaagcgggcgaagtcgtacgtggaagacttctccaacggcaccgccggtgcgctgtgcaagcgtccgtgggctgtggtgcgctacctcggcatctaacagatgcctattcaccaaaggccgggcttccggcctttgttcactctgactctaactcggttgtaggggccggttagggcataattactaggactacgccaatgactgtttatatcgtttcctccatgactcaatcggtgtcttacaatgcgtatgacacctctgatccgtccaatcctcgcctccagcgaaagattctgattcgcggccgcgcaggcatcgcatccgaaacttccggcttcggcgacatgatttccgacgaggcaggacgtccgatctggaccccacagggcgattgcactgccgtgagcgattcggatttcgagctgcttcaggccaataagattttcatgcgtcacatggagaagggttatctgcgagtcgtgaagaccgacatcaccagtgaccaccagcggatttccaaagagactcgcaccatggagcgcgatggattccagcctctggatgctactcgcctgcagcagaaaatcaaggtgaccacagccagcgcttcccaggaacaagagttccggatttaaccgagggtttcggtatggtgattttcgacgaaaataagtttcgcacgctgtttccggagtttgctgatccagccgcttatccggacgtgcgcctgcagatgtatttcgacattgcgtgcgaattcatttctgatcgcgattcgccataccggattctcaatggcaaagccctggaagcgtgcctgtatcttctgaccgcccacctcctgtcgctgtccacgatgcaagttcagggcgcggctggaggtggcgtcaccgccggtggaacccaaggcggtttcatcaccagcgctacggtcggcgaggtcagcgtggccaagctcgcgcccccggccaagaatggttggcagtggtggctttccgggacgccttatggccaagagttgtgggcgctcctcagcgtcaaagcggtgggcggattctacatcggcggtcttccagagcgccgaggcttccggaaggttggagggacgttctggtgatccctggtgcgaatcttctgcgaatggccttcggggtcatcggtactcaaattgtgaaatatcgcaagtttgagcagcgagtgaagaatgatcaagcccagtatgtctccatgttcggggagcctttcgacctggcagcgtctgtccagcgagtccgacgcgatcagtatgcccagtttaatctggagttccaacggaattatgttatgatcttcgccaactttgatatggttgacttggatcgcaatatggccggtgaccagttcctctggactggaagagtttttcagctggagtctcaaggctcctggttttatcaggacggctggggagtttgcctggccgtggatatcggtgcggccaagttcaccgatgacgggaaaccgactttctaggtggtgtatgtttgacggcgaactgatagcgaaaatggttgtcgagctgaatgcggcgatggcatctgctcaagaggctttgcagttcccggattttgaagtcgtccagaaagctcagccgacccaacaggggacgtcaaccaggccgaccatctttttccagaaactgtttgacattcctcgcggctggcctgccaccgattggtacctggacaacacggcccgcaaatatgtggaaataactcgacagcatgtagagacgactttccagatcagttcccttcattggcagaatcctgaaatcactcacgtggttacggcttctgatatcgccaactatgtgagagcttatttccaagctcgatccacaattgagcgcgtaaaggaactggacttcctcattcttcgcgtgtctcaaatttccaacgaggcattcgagaacgacaatcaccagttcgaattccacccaagttttgacatggttgtcacttacaaccaatatattcgcctgtacgaaaacgcagcatattcggccgatggggtattgataggcatatgagtctgaggcgcgattcagagctaatcgccgcgcacctccagatgttaagagccatgcgcggcaggtccgtttcagccggatggtattccacggctcgatatcctgacaaggcaggcggatcggtcggaatacaagtcgcgagaatcgcacgtctcaatgagtacggcggaactatcgaccatccgggcgggaccaggtatattagggacgccattgttcggggccggtttgttggcgttcggttcgtcagaaacgactttccgggagaaaccgaggtaactaagcctcacagaattaccatcccggctagaccgtttatgcgatatgcttggaacttgttttccgcagatcgcgccgcaatccagaaccggatagccatgaggctggccagaggacagatcactccagatcaagctcttgcccagatcggcctggcattggaaggatacatagccagaagcatcaggaccgggccatgggtggctaactcagcatctacggtcaggagaaagggattcaacagaccgctggtcgatacggcgcacatgcttcaatcgattagcagcagagtaacataaccaggagatcatccagtgatcagtcagagccgttatatccggatcatttcgggcgtaggcgcaggcgctccggtcgcaggccgaaagctgattctgcgcgtcatgactaccaacaacgtcatcccgcccggaatcgtcatcgagttcgacaacgccaacgcagtcctgtcatacttcggcgcgcagtcggaagagtatcagcgggctgcggcttatttcaagttcatcagtaaaagcgtgaattcgccgtccagcatcagcttcgctcgctgggtaaacaccgccatcgcgccgatggttgttggtgacaatctgccgaagaccatcgccgatttcgccggcttctcagcaggggttctgaccatcatggtcggcgcggccgaacagaacatcaccgccatcgatacgtccgccgcgacttctatggacaacgtggcgtcgatcatccagaccgaaatccgcaagaacgctgacccgcagctggcccaggctaccgttacctggaatcagaacaccaaccagttcaccttggtcggcgccaccattggcaccggcgttctggccgtggcgaaatctgccgacccccaggacatgtccactgccctcggctggtccacctccaacgtcgtcaacgtcgccggccaggctgccgatcttcccgacgcggccgttgccaagagcaccaatgtcagcaacaacttcggttcgttcctgttcgccggtgcgccgctcgacaatgaccagatcaaggccgtgtcggcctggaacgcggctcagaacaaccagttcatctacacggtcgctacttccctggcgaacctcggcactcttttcaccttggtgaatggcaacgccgggaccgccctgaacgtgctgtcggcgactgctgccaacgacttcgtggagcagtgccccagcgagattctggccgccaccaactacgatgagccgggcgcttcgcaaaactacatgtactaccaattccctggccgcaacatcaccgtttccgacgataccgttgcgaacaccgtcgacaagagccggggcaactacatcggcgtcacccaggccaatggccagcaactcgcgttctaccagcgcggcattctgtgcggcggtccgaccgatgcggtggacatgaacgtctatgccaacgaaatctggctgaagtcggctatcgctcaagcgctcctggacctgttcctgaacgtcaatgcggttccggcgagcagcactggcgaggcgatgaccctggcggtgctgcagccggttctggacaaggcgactgccaacggcacgttcacctacggcaaggaaatcagcgccgtccagcagcagtacatcacccaagtcaccggtgatcgccgcgcctggcgtcaagtccaaaccctgggttactggatcaacatcaccttctccagctatatcaacagcaacactggcttgaccgagtggaaggccaactacacgctgatctattcgaagggcgatgccatccgcttcgtcgaagggtcggatgtgatgatctaatggtttgcggcggactcgatccgccgcaaccttccataaatggagtgaggaataagcaatgatcaacatttctgcgttcggctcgatctgccagttcacggcaagcagaactttcccgaacggattcaccgtcaccgagttcgccgacgatgccgatcccatcgacagcccgccgttcaccgctgccgataccggcgtcggtctcaacggtgacatggtagtttggaaccgggcgaacatcctggaagtagtcgtcaacgtcattccgaataccgagggcgagcgcaacctggcagtcctgctggatgccaaccgcaccggaaaggacaagtcgggcgctcgtgatgtcgtcggtctggtcgtggcgatgccggacggcagcaaaatcacctgcaccaacggcacccccatcgacggcgttctgatcaacgcggtggcaagcgtcggccgtctgaagaccaagccgtatcggttccgatttgaaaaagtgatcaaagccggtactagctgatgaagaaaattccgctgacagcagtccccaatcaagcgatctcatttaacgccggtagcagctattggaagattcgcctgtaccagaacatggacatgatgaatgccgatatcagtcgcgacggcgtgatcgtttgccatggggcccgctgcttcggcgggattcctcttctccagtacagccatcagtaccgacctgactatggcaatttcgtcttcgaccgcgacgccgattggacgttgttcggcgacggaatcaacctgttctatctggacggcgccgaattcgcagagtatcaggcgctcgccacgaggaaagaatgagcacatcaacgatcagaaccgggacgaacaatgatatccttttggacgacaatggaaacatggtcatcctcaggggtgtcgaagcgtgcgcccaggacgttcgggcggcgatgctcatgcgcaccggcgaaaatattttcgatgtgaactccggcgtgggatatttcgaatacatcttctcgccgcagaaaagctatgatgacgctcgcaaatccatcgcggatgcaattttgtcctcgccggatgtgaccggcatcgagcagctggacatcgacatcaccggggaagtcttcggcgtcgatgcgaaagtcatcaccatccacgggcctgttaccacaggagtttgaaatgagtaccatccgcatccaatacgccaacggcacccaactgttcctggacggcaaaaatccgccgcccctggacccgctgccctcgtttaacccgtctgtcgaagatctggaaggcctgggccgcgaaaagaacaccgacaagggcgactcctcgccggccggtcttcccgttcccccggtagacgtcgattccaatgtcgacaacggcggaaccatcccggctccggtatcgaccgacgctcctgcggccgaatcggccccggaaggcgcccaggaagctcctgcagcaggccaaggcgacgagaaaggcgccgaggaagccccgactaccgccccagtagaaaaggccgaggaaacggcctcgccggccgctgaagaggcaaccccggctcccgccaaggccacctctcgcaaaaccaccagcaagtaaggactcgacatgatcaacgtcagcggcttcggcacaggaattgtaatagtttccgcctcatcgttcccgatggggttttccttgtcgaagttcgctgatgatgagagtccgatatcctccaaagagctggagccgttcggatatgagatgctttatgacggcggcctattcgcctttgacaaggctgctcctctggaagtatctgtatccgtcatcgcagggagcgaggatgatattaaccttcgcatccttctcaattccaaaaagggatcattcagatttcttccgggaatcatcccggacatgacgactctcgtggccactcttcctgatggcggccgcaccgttctgtccaatgggaccatcctcaagggtccggccatcgacaccatacagaacaccggacggcgcaaaggcaacacgtacacttttgttttcggtagctatcttggcgcccagactgcgcgtcaagccatttctaacgttatccaatcggtactggaggtggtctgatgttagggattttcaccagcctcctaagttcgcgatctttttcgattgtggaccaaaacacaaaccagctagttgctgcggatttgaggataagccgggtcaacacccggttttcttctgtaggacaacgccacatgctggaagatggtacgaccaagatggattccagaacgatccaccctatggaaatcatcgtcgaagtattttgcccttcaattggtgtcgtcgatcagatcaatcaattgctcctggatcgcgacacactgtacaaagtcatcactcgcggcatggtattcgaacggatgatgtgtaccagcgaagcgctcaatcagactccggatgtgatatcggcgactcctgcacggctgacattctcccaagttctcgtccagaatcccaagcctataatgttccgaaatgcaggggactcttctatgatcgaccgagggctggccctagctgaagacgtggttggctcggccggcgatctgttcgactacgcagtgaacggcgtccagaacgccgcagacttgttctgaggtgccaattgaactctttcctcaagtctattctcaacacgcctactctcaccatacgcgatgatgttaccaaacttcctgtctggaagagtcttcaagtcaagaaagtggaaatttactcgccggcttccgtagtgtcgaaacctctggcgacgaaagaccagacggaagctcaagtgtacaccgaagctctggacattgatgtgaagaatggaaagatcatccaaccggtgcgactccgcatcaatgctatctgtccggacctgtccaccgttgaaagtatcatgaacgctttcaatgataacacctcgactttcgctatcacttctaagtcgatattggccgataaaatggccatcatgacgctcgatgtagatcagtctccagacatgttgaacgcggctgagatcaatatggaattcgagcaggttgagcctccagtattgaataaattcgatcctgcgttccctcaagatagtccgacttatggggtacagattcaatctctttctgatgctaatttgctggattttggcgccatcggcgattcgatatcttcggccgcaaaatcgctatataatcgcgtgaccagctacttctgaggatgtatcatgcttgaaatcaatcttcccgatggccgtcaaactcgcgtacaaatcgaggcgtggtcggcattggatggctgggaactccagcgccgtttcgtcgaattcgctgtcagccaagattccgacttccgccgctctttcaccatggaaatcctgggctatgcgaaagtgctgcttggcgacgatgacaccggcattccgctgaccaccgcggcagtcatcaacaaccacctcggccactggaagaacgtggaactggttttcaactctgttctcaagcacaatggcatcgacccggccacgcacgccgaccggccggactattgggaacaagtcggatcgcagatggccatcgcatttctggccgaggcgtccaagctcattggtccagcaatgaagatcgccgaaggactcgccaacaagccggagtgattcatgtctagtgatttggatgaattcatacttcggtatgaggccgatactgccagagccgagcgcaatctggagcgcctccagaaccagatcaggcgcgtgaacagcgcatcgacgagtggccttcaggatttgcgccacttcgcagacggcgcggccactgaactcggccgagtcgttccgcagatcgattctgtgacgagcgcgattcgcgggatgaacgcgcaactggcgataggcgccactggcgtggccctggtcgcggccggcgtcaaggcgttcatgaacaccagggaccagtacaatcagcagcgcatccaggcgatggacatcggcatcgccccggcacgcttggaagagtaccagagaaaattcgttcgccagtccggtggaaccatcagccgcgagcagggcgcggagatgaccaaaaatctggcagacactttccggcgtgcttatcgcgatattgggcgagtcggcccggaagcgcgaattctgcgtatggccggcgttgatgtcgggagcttccaaaagggcatgcgcccgctcaacgacatcattactgatctggccacgaaaatggccaagctgaagccggacgaaatttctgcctacgctgatgcccttggcgtctcgcgagactacctgagcaccctggctaagatcggcccggccatgggaaaagtcaccgagatgacgactgcggaactccagtccagggtccagggcgagtccaacattcagaaattcaacgatgctctggcgaatctcaaccagacgttcaccaccctggaaaaccgagtcggcgaaaagctcgcgcctgcgttcaccaagctgatcgaaatcatcgacaagatagtccaggctattcccaatgaagtggaaagcttcgcgaaggacaccaaatcccgttgggaagatggagtgctcgggaaggcgaccgttggcagtgatatcctatccctcctcagccccggcgccctgctcggtcgcctggcagcgtgggggactcgtcgcggcatggaagaatcagggctcatcgacaaggacaaggttcccggcgctcaaaccagcgaagacctggccaagaaacaagaagaccaggacaaggctactaagtccatgaaagagctagagaagctggctgaccagaccacgaagtctaccaatgattttgcggtggcgatcaacatgttcagtggcgcggtatcgtcgttcgcgaatgccgttgacgagcgccaagcttgggcagcctgggcgggggaaattggtcgggcggtcggtatgggaagcaccgcgccgacttcgcgggcaaccggcgtctatccgcacgcgatctatgatcagtcgaagagtggcgcggccggacaagtcttcggcgagccaatcggcgcccagtctcttcgcaatcgcatgttctcgccgcagcgcaaggcagagccggtcaccgttccatcgtacatcaacgatatcatcaaagatgcttcgaagatgtacaacattcctgagctggacatcaagaaactcatatacaccgaaagccgattcaacgccagggccaccagcgaagccggagcgaaaggcctcatgcaactgatgccggaaatcgccaaggcgtatggtatcactgacgtatatgaccctcgccagaacatcctcggcggaacgcgcctactgcgtgaaaacctagatcgagcaaatggcgacatgcggttggccttgacatactatcatggcggactcgatccgaagaactggggcccaaggactcgcgcatatccgggtttggtaatgagcgctccaatcgagctgatggaagaggctcagcgcaagcagaaggctgcggccatgaccgtcgccaacgagacgttcgccccggaaggcggcgacatggacattcgtccctatgatggcgggcgactggaaaccccagaccagggcaagaaggaagatgagcgccgcgaagcccgtcgatatgacgacagggttgtgcgaccggaaattcgcatcatcgaccgcatgccagaccgcagcgacggcgaaatcctcaagatgtctagacgtcaagaggccgaccgggcagattctggattccggaagttcccgaatcaagttcgcggcgagaccaagcagaacatccaggctcaactcactgcaggagccatcgcgcaagtgatcggcgttaaccccaaccagatcatgcgccgcgaaatcagccgttctgacttgctgttcggatacaaccaagccatcctgggcaagcaacaggagatcaaggccgccgcgaccgaagccaacaacgtattcctgtctccagccaagcttgccgaagccacggccaaggtgaacgccgcatcgcgagaaatggatattctcaggacgtacggcgagcaacttctgaagagcgctccagagcgcggccaggagctgaccatcggtcggatcgacatgttggtcaacgtcaccggcgcgaattctccggaagaggctcgtgagatattcagcaagcagactgcagaccagctgactacggcaatccaggacgctcaaaacgattccgcaactaagatactctactgatgaaaaagagaattctgcgagtaacattcaacatgccttatggacccgaagtcatccgcgaagatctggatgttcgggtccggattatgaaggctgcgttgcggattcagaaccgggcgacgatggaaattttcggcctcaccactcagctgcgcgagtctcttctgtcgcagttcaccgcgtggaagcaccggcaacgtcaagtgggcagggaagatgaattgatgatcaaggtgtcggtggaagccggctactctgaccaggggcgcgagcaagtttccagagtctttgtcggcgaagttgccattgtcgatatcatttctccgccacctgacattggaatccgcatccagtgctataccaggcaaatcgacaggacgaagaccattcggaatatgccgcccgccaacacgacgtttgtcaagttcgtcgagtggggcgcgaacgaaatggggttgaacttcatctgcgataccagctacaatgatcaagttttgaagaatccgggccgttcgatcactgtcgcgtcggcaatcctggcgtcaattcaggatatgtacatgccggatgtggccgcgttcgtcgatgatgacgttttgatcgtgaaggatcgtgacaaagtcattcgtccggatgaagtcgccaacattaactcattcgtcggcatcccttcatggtcggaatggggtgtggaatttcaatgtctgtttgaaccgtcgattcgcgtggctggcggtgtcgcggtcgaatctctcatgaatccaagcgtcaacggcaactatgtaatcaccgctctagagtatgatttggccagtcgggatcggcctttctatatcaaagtcatggggagtccagcagcgtaatggccagggaaatcaaatcgttcaatatgttcggcgtgcactacaactcgcggcaattctctgcggtcgatggactcaggatgatgtcgggaatccatgatgttccgccggaagaattgctcaaagggaccgacgtgctggcccatacagaggaacaaccggaaggcgtttggcttcccttgatcgctgcgaacataaatctttatgtcattgaccgggcgaacgtaatcgctcccgtacaagtgcttgcgcttttgtctgaactggtcatagattggaactttggcttcctcaaagattggacaggggtcaaaattccagcccgatttgtcgaagatatcaagagtgtaaaaacagcccattcaccttctgtggtcgcaagtttggtggcgaatgggtcagcttctatgcgcgagctggaagaatattattcgactcaagatgcctttaagatgattgacatcatgacggcgaagagcgtgaatgaggctctagcgtccgaagcatcacagaacagaatcaaaaagggataattcctaagcgagcctgggaaggctatactagacctgccaaatcagaggctttcccatgtccaatattcctttaacatcagcaaaatctaccgacagaacgcgactgatcgccgctcttgacgctcggtcgcggcgggacgcgctcgactttgaagtcatgattcccgcccaggttgttcaatatgatcggaccgaaaatatcgctacaatccaacctctcatcacctgggttgatacggaacacaatgccgtccagaggcaccagctggttgatatcccggtgatttccatgggcgctggcggcttccacataagtttcccgatccagcagggggatatcggctggatttacgcggccgaccgcgacacctcccagttcttggagtcgctatcgatgtcgaagccgaacaccggccgcatccacaaatttgagcatggtatgttcataccggacgtattccgccgatataccatcaattctgaagactcggcagcgatggtcatccaatcgactagtggagcgacccggatttccattcgcggcgacaacatcaagatcactgcgccgtcgaatgtcaccgtagatactccgcaggcgaatttcactggaagtgtgactatcgccaacaccctggttgtaaacggcgtcaacgtgaacaaccacggccacctcgaaaacaatccgcctgatgcccggacgaaaggcggcatgattgcctaaggagaatttcatggctagttttgatttttctgatttaacagcgggggggggttgtaatggctaattatgactacatagtagatactggagtcatagtcgccgataccgctgacgttttgaaagacgttgaagcggaattcagagcggccctcggcgccaatatcaacctggcggcttcaacaccccagggaactctggtcgcggctgagaccattgcgcgttctagcgtgatgaggaatgaagctcgcattgccaacaccatcaacccaaacgtttccttcgggacgttcctggacgccatctgtgcgctgatgggaatcgagcgcggctctgatctttcgacgttcggctatggcgtccaagtgaccggccgcagccagacccgaatttccaccgggtcgcgtgtgcagactccggccggagcgattttcacggtcatgagtgacgttctgattccggcaaccggagtcgccaccatcgacgtaaaatcgcaggaatatggaaacatccctcttcccgtaggaaatctgatcatcatcgatggaaccatcggttgggccggagcgaaagtaatcgcttcaactcgcgtcgatcctggcagccgccaaatgaccgatgcagaattgaagaatgctcgcgtcaatcgtttggcgatccaaggtcgcaactcgactttggccattaaagcgtatgtcagcgccgtacccaatgttacctcggtcaacgttatcgaaaacaataccggcacggttcaagttgtcaacggcgtatcattcacccttccgtatgcggtctgggtctgcgtcgccggaaatccggataaacaggctgtcgcagatgctctgtgggcagcccacaacggcgggactccctgggactatggcgcggccaacaacggcgtcccggtggatgggcctactggcgttcctgttcgcgatccggcatccggtcgaaagtatgtcgtgaagtggactactccgatcatgtatgacggatatgtaaacgtcaccgttcagcaaggctcttcctcggtcgctccggaagcaatccagaacgcagtcgtgaattacgcccaggggaaagtggagggtgaagagggattggtcgtcggcgcgagtctgtctgcctttgaagtggctggggctatcgctcgcgagattcccggtatctacatcaaactatgccaggtggcttgcgtcccggctggatcgccggccccggctcccggcgacttctcgcctgaatacgtcatgagcgcattcggtcaggctaccatttcggttggtaacgttagggtgactttcgtatgactctgcctgcgtacaattctgatattcaacaggcgctgaagtggctccacaaccaggcccctgggatcaccggcttggttcagcgaaaggctcaatggtatgatcgtttcagccgtcagttttgggtgaactgggagcgcgacgttttcaacttgaagactgccaacccgttcggccttatggtgtggtgcatcatcctcggcacgccttcgaaaggcttcggcctgtatccaaaaaacagctcttgggcgttcggtcggctgcgccagaacttcgtttatagcgggaatcaggttccgccgcctgcagacgcatcgccgggcggcaacttctacggtggcggcaatgccgaaatcctcaacttggacgaaatcaggaaagtgcttcagctaagatatgtagcactgatttcgaacggctcgattgcatatatcaatcgcatgcttcgctacatattcaacgatgatgagccgtgggacgaggcgaccgggttgtacttctatctcatggactcaaccggcgagaatggacctgtggagaacttggccatatatcggaaagattgggaagggatggttttattgtctagctcgcccaggacgaaccatgtgctgatatcgacccctgccagtgacgctgattggcctggtgtcgatccggccgcgagcggccgtccggtaacggtcgaaacggcgtccgctacggccccggacggctccgctacggtgtgcaagcttactaagccggccgggagtaccgcctacgtctccgcgccgatagatgggccgctggggtccggtagcactgtaacgttttcgttcttcgcgaaggccggatccacccgtttcattgcaatccagtcggctgccgatttccccagtcgagccgatgccgttttcgacctggattccgggaacgtaatcagcgatcagatgctggacagcagcgtggtaagcgcccgaatgattcgtctggaaaatggctggtggcgctgcgttctcacgaccaaaaccgtcagctcttcgttccgcgctgcttacgtcgccccggcagaaaccaacttcagctggatcgattcgaattccagcacggcgattgacgtgcttatctggggcgctcagatcgaactgggtgatactccaaccggatacttggagactaccggggcgcccgtaaccatcaccgattatgttttgcagaacacccagaccggaacaatcaagttcacacagccccttccgactggagcagaagcgtattggactggagactggaaaggcgggtctgagaccgagccggccagattcgcagtaggggatgggactcaagatacattcaatctgtccagccctgcatacatcggcctacccactagtggggcgttcaagctagaatacagagttggtccggcgcttaatttgtcgccgcaattgatcaacctcatgaatgaccgggcggtcggtatcatgccgacttgcgccggttgcgatgtaaaagtcattcaggagtaatgacgtgatcacacccgaactgatacccagtccgtttgctgcgcagggcgacaaagacccgatcccgcagacttcttccactggcttcgctaaccttcgcgacggctacacgccggactacgaaatcagcctggcgtcgaacaacccgcaggccaaagcggtcgagcgaaagattcaaaaccaactcttcttcatcgcgacccagaacgcacaggcgtggcagcggcaaatggcgccgccgtggtttcagggcatgcctggcggctatgaacagaatgcagaagtcgtgcgcgtcggaaatgacggcataatgcggcgttatcgttccatggtgaatgccaatgcgagcgaccctctcagcagcacgacttgggaagagcaacccgcatggtcggtgatgcgctccaacatcccgatgccggccggaggctcaggcctatcttctggcggagaagtcatcacgaccggccgcaacttcaacgacctgttaaatgggacgtgggagttcttctctgattcagtggttgtcgcttctcagaatgcccccgtatatccggcttctgctggtgccgctgctggcatgttggaggcgaaatcttgggtgtccggggccaatacgttctgcgtccaacgctacactgatcgcgtcgggaacgtcgctgtgcgcgggcttaatgccggagcgtggaccaactggatgtatgcggtaaacgtcatggcccttcaacaaggtcgggtcacctatggagtcgcggccggatcggcgaacgcttacacgttgacgctagttccgcagctccaaggcggcctggtggacggcatgatccttcgggtcaagttcaacaccatgaacaccggcgcctccaccatcaacgtctccggactcggcgccaaggccatcgtcggcgcggccaacttccctctcaccggcggcgaacttggccaaggactcatcgctgagcttgtattcgacgcagcaggcgaccgctggagaatcctcgcaggcgcgccacgcatccaagttggcaacgccgatcaagattaccaggcccccagctggaaacaggtgaaggattacgtcgcgtcccaaaagctgactgaagtggactgggctgacgtcgtcaacaagccgaacgtcgctatccaagacaccacgccgtggttcgccaatctggagctgtccgatgctcggcctttcatcgatttccacttcaacagcaaccgcgccaaagacttcgactatcgctttatctctgaggctgatgggtcgatggcattctattctcgccaggggtctgccagtcctacccaggacatcctgttcagcaggtcgaatgtaacattcctccagccgcgactggatgttgcgaaaaacctcgcgtacatcgccaactctggtcccctttggcagaacaccactgccgatcagcctggttggaaattcaccttcgcacaaggtgtggacgccaacaacaacgcggttatcgcagtcaataccaccaacccggacggctcttatcgctcgcaggtcatgcgatgggactgggcgtccacgaacgtcatattcaacaaccgtccgctcttcgccggtcaatacaccccttgggattctgggaacttcaatccttccaccaagttgacggtgaatgccgtgaaccaaatcgccggcccaaccgggattcggaataccaacggcaacaccggcaacatgaacacctggggttccggctccacgacggcatcctatggcaatgctgccattcaaatcttcggaaaagggggcggtgagcctgccgcgatctatttcgacaactcccagaccggatggtatctgggcatggacaaggatggacagctcaagcgggccggctggtcgctcggcaacaactcttatgtcatcacagatgaattcaacatcagaaaccatatcaacacaatggctgcgcgcccgatttgggggaatgtcgagttctggggtccgtggaacttcgatccgaatcttaaactcactttgaacgctttcaatgatagctcattcaccaggatgaccaacagcggcgcgaaagacgttggtatcgcgtccatgacgagttatgctgatgcggccatgtcattcttcaactatgaagcctcgaatccgaccgggccgcgcgcggccgttatttcgttcgtgagaaatggatcgcgtggagtgctattcggcttggattctgacaacaagctgaagtggggcggatattccctaggggacgtcgcgttcgagattgccgactccaacaacctcatgagcctgtggtcatcccacgctgccgcgccgaactggaacgggcagaccatctggaggtcgggaaacttcaacccagacaccaaggcgactttggcagctcgcaatacgacgtcatcccctacaatattcagttatggggcgtccggaatcgcatcaaccggacaggtcggtgcgttggttgtggaaaacaacagcgtcaccaataccgcagccgccatcacgttccattcgccgcagaaatatcaggtcaacttcggcctggatgcggacaacgtggtaaagatcggtggcggcacaatgggcggcgtagcatatcccatcatccactccggcaactacaacaactacatcaaccaggcgctggttcaggtgggtcttggcggagtcggttcctatggaattttcgcggttctggataatgccgctccaaccgcaaccgttcaacccggagtggtcgtggacggttccattctcatctactcgtcttgcgccgcaaactacaatagcggtaaaagacctgccggaacttggcgctgcatgggatatgtagtcaaccgggatgccaacacccctgactccgcgacccttttccagcgagtgacgtaaaatgaaatggacgcggatcagaaacccacgttggctggacgcagtaaacatccacgccatggtgactttcgagggaatcggtgaagtgccgttcaccgccaatccgcaagacgtggaggcccacggaagggccatctacgctgcgattctatctggggagcacggacctatcgccccggtcgattcgaagcgggagaaggccttgcaggacgctatacgagccagggaaaagcgggctatccttcgggatacccgctggcccatagatcgccacgacgagcaaagacggctgggtatcgaaaccacggacggccctgggctgatcgcagcccttgttcactggaggcagcagattcgcgattggaatagcggggatcggccgcgacttcccatggctctgaaaacaatgttcaaaaatcaggagtattgatgaaaatcacgaagggtgttctgatcaccggaaccgggtgcaccacggatcgggcgatcaagtggctggatgatgtacaggcggccatggacaagttccacatcgagtcaccgcgagccatcgcggcctacctcgccaacatcggcgtcgagtccggcggactggtaagtctggtggagaatctcaactacagcgcccaagggttggccaacacctggccgcgccggtacgcagtagacccgcgagtccgcccgtatgtcccgaatgctctggcgaaccgcctggcccgtaacccggttgccatcgccaacaacgtgtacgcggatcgtatgggtaatggctgtgagcaggatggtgacggttggaagtatcgcgggcgcggcctgatccagctgaccgggaagtcgaactattcactgttcgccgaagactccggcatggacgttctggagaagccggagcttctggaaactccggccggcgcgtcgatgtcttcggcctggttcttctggcgcaatagctgcatccccatggcggagtcaaacaacttctccatggtcgttaaaaccatcaacggcgccgcgccgaacgatgcgaaccacggccagctccggatcaaccgctacctgaagaccatcgccgcgatcaatcaaggatcctgacattcgcccaaagaaaaggccgcttattcagcggcctttttgctttctggctttgcctcttcaaccatcttggcctcgaccggcgcggcggactcctcctgagttaccgaatccacatagttccctagtgaactcagaacgccgattaacagcgctcttactaccttgtccttgactgtctcgcctatgatcttggtcagaacggatattaactcttcccggagtctggggctgattcttggccgaaagcgcttgcgatgctctttgcgtttcatgtttagtcctctgtctgcggtcttctcctcaccccgataatggcttggggatgcgttgtgttaatcggaagggtcgggcgctattataacccgtcgaaaatgctcgcgcttaactgtttaacgatacgcaccgcgatactaaatcgccttctttctggccaaggaactctggcggcctggtccggtctaaggcctaatttgtcgacattaaaacgagaaaacccggatcgcctgtaggacaaggcgtccgggtttatttcgatctagtgtacgctagaatcagtggcttccgccccaaccgtccagccagcaatcgaagacggcgtgtctcggcttgtccttggcgccatgggagaagtgcttgaaccggatgacctggcccttgagatgctccctgtcattccagcggcgctgtttctcatcgtgggtcaggctggaggccgacacgttgaaggtgactccaggccacagacgttcgttgcggcagacgaacgcaccgaccattccggacggcgacaggttttctgcgtggctggagcgggccgtgtggccaagttcattgatgaaagcttcattgttgttgtgcatcaactcttccacgtcgatgatctcagcttcatcgtagtcgtatcgcttgactttcacacagtgcccttccttggcagtcgagcgaccgaacttgtacagtccatcagcgcgcttgcccatggaaccttcgaatcccagcattgtgtggcggcgctcgacttcgctgaactgttcgatggaagtcaccagttcctgctcgaccaggtgaatcctctcatagccgaggcagtgacgaaggaagttcacgcgctcggccgccctggctaggcgatcttcggtcggtgcgcgaggatcggtgaaatcatcgaacacatggaaagaccagtccggctcaccgctgtggcggcgaagatcgccggacgacttctggaaaactttcgggtcgctgatgtcgccgcagaccagctcgccgtccaggccgttgaacagtttatcgctgaggtattcgtagatcgattgattgttctgccgcttgagttgacgagtcagcgcctcgccttcgaatacgaagcagcgaaatccatcgatcttcggcgagaaatacatcggcagttggccttccagcagcttcgggtcaaaattcgatgcgagcatgggtttcatacagttctccagaaaagaagcccggcgaaccgggctaaatggcggtaagccggctcagatggtttcgttggcgtggttcagttcggccatgatcgacgcatagagctcatccgactccttgatgaacacgccgtcgtacatgacgcctttgcgatccttgatggtgtcgtaggcagcagcgtagcaggcgagcatggtggtgtcatgctcttccgtcacgtcgaacagagtcatggcggccgataccaggctcttgatggccaacccatgatttccacgtgccagagcgcctgccagatcgccgaggcgctgcaaatcgtcgccgtaggtgggatgtacttcgccgctctcgatgaaggccgacagatgatcgaacagattttcgccgagttgcgcggccatgatcgtggcaaccaccattacgtcgccgatgccatctttcacatcgaccgggttgttctgaacccaggcttcgcatacttctgcgaactcttcgaccaacttcaggaattgatctttcgcagacgagcctttgatcaggttacggtcggaagcccatttaaccaccaggtcgtgaagttcgcggctcatgatttgttcgatgttcattctttcgattccttttggatttgggatttgactgcgttgattatggacgccgtgctctggcgcgatccatccttggtggtgccgaagtagaaggccattaccgacttcagctcggcgaaccaatagccgatgatggtgccgatggcgaccgaggatgtcgggtccatcagagcctcgcggccgaatgtgaagattgcgatgatgatgagaatggagcctgtcagaagagcgaatgtgatcgccgggcgaacgaaatcgttctgctgcgccgcaagcctcctcgcagaatccctgtcggccgcctctgcggcgaactggctaagctcggcctggagctggttctgctcagactgaaggcgattttgttcggcttgaatcgcaagctcctggagacgaacgcgctcggcgctctggagttcggcgagacgcgctagagcttccggattcgcgtctagagcgctagcgaccgaggctgggtcggccttcgaccccagcgccgtcgcgacgatagcgccaacggcggcgcctgcaggcccacccaggagcgaccccagagccggggcagccgcgccgatcttactacctatgtctttccagtccatttcgactcctcaaaagaaaggcgccattacagcgcctttctccggccggtgatttagaactcttcggcttcggtcgcatcgccgacgccaccggcgtcactgcgaggctgttcctgcttgctgtagtccaccttcacctcgccgccgacgaacgacttgtacaggtcggccgcagccttgaagtgatccgggttcttcaccaggccttccagctcgaactggacgccggaccagctgcccttgtcgttcgacatgcctacggtggtcatacggaccaggttggcgaaagtcggcggggtgcgcaggccctgcggggtctgaacctttttctgggacagcgcggtcatgagcttcttcgaggccttgatctgcgaagacgacagggagatcagagcctggccgaaatcgccggtgtccggatcgatgacgatgacgtaatgaccacgggtgtcggcgaagtagtcagacttcttgtcgctgaccgaaccgtcttcgttcggcgcgtacaggcgtccttcgacttccttcaccttggtcgggtctttcatcatttccttgaagtcttcgacgctgatggcacccttgaaaccgccctcggcctcgcgaccggcccagcggatgaactcgcggcggtacgcggccggaatgatcagcaggccggtcttgccgtcgtaaaccttgccggtgacggtgttcaggaacatgccggccttcgcgccttcgatgtacttcgggtcatcttcatcgacctggggagacatcttctgcaaaacctggatgaaggggatggcataggactcggcatcggcgccttcgaagcctgcgccgtcatacgatcccaaatccatgaagtcgggaacttcggtagtcgcgacggcgccgccaccggtggcaactgctacggccttggtttcttcggttgcttcggaagtttcggttttcttaccagccatgttaggctccttgtttgtcgaatttcagttatcgctaactgtgggtttataataacggaagttgcaactaagtaaagcaaattacatattaagatttgctctttttcaccttcggtttcgtgatcttggcctctttgtattcgtgtacgccgatgaaatctggcagctcttcgcccttctccaggtactcgcgaccgaacgcctggagggtctggtaatggacatcgcggttgatggtggcgtcatagccggcttcgatgatggcctcggccgccttcttcgcatcttccatttcgccgcgaccgaattcggccagaaccttggtcttgatgatgccgtcgttgtcggtgtcttccagccacttccagaacttcgatttgttctcttccttgacggaaatgatggccttcggctctacttttaccgtgcgaccgtccgccagagtagtggtcttctgaccaagctcctccaacagctccggaatggtgttacgcttgagggtcttcagctcctcttccttttcggccagcgccttttgaagatcgaggatttcgccgtccagctgcgaagccttgtccaccaagttcagcagtcgatggccgatgtcggtggcttcaaccgccatttcatccatgacgccaaaatagtcgatttcgcccggcgcgttctctttcaagtattccgggatttcaagctcttgctctttcatgtccgcctccaacttagtgatgttcccttacttgaaccaagtattgagtagatattatgccgcatcttccttgatacggctactgatttacatattaaatttcgtcgcgagtgctaacgtcagcctcaaacacgccatcaacgacataacttgccaggttgcgtttccactccaagctgacctggattttctcgtcgatggaatccagacagatcaggtcgaagtacagaaccgagttgacggtgccgattcgatgatttcggtcttcggactgcatccgcagctcgttgtcttcgtcggtcgtgtagtagatggccacgtctgcggctgtgagtgtgatcccgatccctgctgcggccgggttgcccaggaacacctggacgcgcttggcctggaaatcgtcgatcaatttttcccgctcggcctctttggtctcgccgtagtaggtgccaaacgaaatcccttgggcctccaaatacgccttgatctggtcgatttcctgaatgcgcatggcccagacgatgatggaacgctccgggtcttcctccagcagaccctccagaagatcagtaaacacggcgaatcgcgggttgtcttcgggcggcaggatcaccggctcaccatagacgttgatatagccggacgccacttgcttgagcttcgagcgcgctgccgcagcatcgaaagatacatcaagcatgaaatcttcgttctggagaacaaagtggtagtcttcttccacgcgctggtaaacctttcgttgctcaggcgacatttcgaagtatatgcgcttgtacactttgtccggcaggaatgggagtgcttctttcttcgttacacggaaactgtgcggctcgatcagggaccgcagcttgtccaggttccggaataccgggcgcccacactcgtctttttcgaccagttgcggcggcatggtttgcttcccttccagcttgcgcatgatagcgatcattcgaggatcgtcactgggcaccaagacggaaaattcggccacaaacgcccgataggatttagtccccagaattccattccgcaagaattggaactgcatgaacaaatcggtcggtgcccgcgtcagaggagttccggaaaggatgcgacgggccacggccttctcgcccagctttacgatctttttcgcacgcttggcttgtgggtttttgatcctcgttgactcgtccacaattgcgcaaactttgaatgtatcaaggaatcgctcgacctcatcatagccagcctggtggttgattgcgtcaacgttgatggcgaagacgcgaagaactttttcatctgcgaacgtctcggaatacagacggtccaagcgcgccctggcctttttggaagtcggtcggccgcgccaatccacgctcaaagtcttgatcgcgacgtgggtgggaatctcgcgcagaatccagttggtgtggacgcctttgggggcgacgatgagcagcgcgtccacgcgcccctgtaggaagaggcgaacggcatcggccaaagtcgtccaagtcttcccggtgccctgctccatcaggtatgcgaagttccgtttgttcagggacgctgccagggcattgaattggtgctgcatggcctcggtcttcatgcccttgacgggatatgttttggctttcatttgttctccaaatcggcgaggaactgaacaatgttatccagtccttctgcatagctcgcaacttccaccaagtcgcggctgttaagctcgaacaaatcgagcataggattcagcagcagccaatcggttccgatcttggccaggacgaagccccggccaccccagccgatccgctcccgaagaaaagggatttgcccaggttcgaaacatctggccattgggcaggtggaagcgcgtttcggccactcctccaaagccttgaactcgacccagaactggacacctcgacgattcaggcagatcgaatcggacatgccagaccgccgcgtctccagaaagtcgatcaggattcggccgagcgagcgctgcttaaacgcattcgccgctttcgtttcgcgatcattcatcaccttcgccctctttggaaactttctctgcttgcgctgccagctttgctttttcgcgttcggtcaaaatccgcttgacggccttcacgatgaacatatcgattccgctgagcttccagcctttgatgaggaaccaagaacctgtcggcgtcccttcagcaatctgctttccgtattgcagatatttttcaggccgaattctgaaacgtatcggctgatcaaccgagtcatcaacgcacatgatgtcgagaaactgcgactggcccttgtacaccgggtttttcccttgatcggccctcttcttctggcgaatcggttcgttctcatcagacagaacttttttcaccatcttgacaatgaccagaccatcatctccatcgcggatatcccgaatgttccgaatggggtttccggaagttactccaaccagctccggattgtcataagcatgaccccagagcgtgtgagcttcgttcaaatctgcgaattgaacttcagaattcgacagactcgcggcgactttctcccaatcctgaagcgtcttcaggtgggtgcctgccagctctttatattgagccttcagccccttaagatcggccttcaactccttcagatcggccttcaacagtttctccagttctttgtcttggctgattttcgccgaaagaatctgggcttccagagctgctacatcagcagccttgtcctcaacatcctgtgccgatatcgggcaattggccagggcgatcctcgcggccttgacgtcatcacgaaggcgcaggaacttctctgccttcgccgggccaaagcctttggcgttcatgatgccgccgatcaagcgtccatccgccactacccagttaagttcggaatgctccgggtccagggccgtatattctacgccttccttggccaattcgcgaaggatggacacagtttgctggtcgtctttcgccgcccgaagacacgcggccgcgtattccaggcgatgatatcgcttcatgtagcaggtccagtacgtcaccacagcgtagctgaccgagtgggagcggttgaatccccaggcgccgaaagtcaccatttcctgccacacacggtgagcatcgtctggggcgacgcctatggtcttggcaccctcgatgaacaattcccggcgcttgttgaagaactcttcaccctttcgcgcagacatggctttcctgattgccgatgtctgctcccagtcgaactggccgatgtccttgacgatggacatgatctgttcctgatataggaaaacgccgtatgtccctgacagatattgctcgacctgcggaatggtataggtcacaggctcgcggccggccacgcgctcgatatacttggttgccataccagaagacaacggacccggacgggcgagcgccgtgatgtggtcgatgttctcgaacgcggtgatgttgatcgcgtttgctaccgagcgaacggcctgcccttcgaactggaagatgccggacattttgtcttcattgagaacgtccagaaccgccttgtcgttcaaaggcaagtcgtacaactcttgcgcggtcacgcagttcgcgtcctggatgactcccaaagttcgaagtccaagcgcgtcaattttgaggagattcagatattccgaatcgggcttgtcgagctgcgcaacgccttcggaagtcaccgtacagaagtcgatgacttcatcgttgcagaccaggatgcctgccgcgtggacgccagagtgggatgggtgaatttcgaggtcgcccatgcaggcggacgcgatctcatacttttcacggaagtcgcggccgggctgagttttttcgaaagtgtcctccaatccttttccatatcgttcgtccgctgatgtatattcgatgatcgagtttttgatgttgtcggtatcgtggaaggggatgccgaagcgctttccgacgtgagcgataaccgacgcggccttgagtgtgttgatgttacccaacttcacaacgttccaagtgccatacttctgctggagatattcgaacactagatagcgatgggtatcggcgaagtcgatatctatatcgggaagatcggaacgggaaatgtcgataaagcgctggaagagaaggcgatgcgggagcgggtcaacctcggtaatgcccaggaggtagcagaccaaagagccggctgaagagccgcgagccgggccgaccagcatatgcttcttggcgaacgcaaccagatcggcgaccaccagaaagtagctgtcgaagtctttcagctgaatctgcttgatctcttcttggaatcgatcctcatactcctgggtccattccttgatgtggccgcgactgaggcggtaggcttgcccctcgcgagccagagcgacgatatcaccatccaagtggatcatcggcgccttcgccagtttcacatccgccaactgctcgactaccgcacgagtattggcggcggcggcatcgaactcttcgcgagtcatgatgtggcgtaaacggctccacaactcctcttcggtggcgatgtggcgaaggccgaccgattcccgcaccttccaggccgacgcgaaatcagcatggtcgatggacggcatgtcgttgtaagaggtaatcaccaccggctttccgaatgctctggacgtctccatagcaccgtgcgcggcgaccatcgacgcgggattgatgtcaatgtagtcgattccggccagatccagatgggcataggcctcgccagcgaatttgatgacgccgtcagcttcctggaattcttgcggagtcaatccttgattctggaccgacttggaagtcaagcggtagaacttcttggtgtccttggcgagcacccaggctttgagcttcagctctttctcgccatcgtcggcgcatttgatcgggatttccatgccgaatccgcgaggcagttctgccttggcagcggcttgttcccaacggacgtggccccatgttccatcatcgacgatggcgacgaatggggattcgatctctttggcgcgctcgatgatctccgggaatcgaccatatgcggcgccgtaggagtaaccagagcgaacgcggagctgagggaaagacatcatgcggcctccattgcttgatatgcccgatatacgcccatgcgcttgcaaacttcgtggagcagccgcacgtcgtcgagcgcccggtgtttctgtacatatgggccgcagtagtgctcataaagatgctgcagccgcatgcggtggccgaacaacggcgccgactcttccacagtacagatatcgagcgatgggaaattgacttcgtccaggccgagcttgccgcgagccagatcgcaggtaagcatgaacttatcgaatggaaggttgtgagcaatattcgcgtcggctctggaaaagaagtcgcgaactttctgacgctgatcgaggaaagatgggtgcttgatcagatcttcgttcttcaaccctgtgatcttggtgatgatttcctcgataacgattccaggattgcagatgaactctacttcatccaaaatcttttcaccatcagttatcacgccggcgaattcgatgatcctcggctgcttcctcaaactcaccctctggtggaacgggagtcctgtggtctcagtatcccacacggcgaatatcatgtttgttccctcttatgtcgaaagggccggctgctttcgcgaccggcctgaggagtataccgcgacggctgaagatttacgccttctgtccgtctttcggcgtgatacggccggagcgcatggtggcgtggacaaacgccgaatagttgatcgagtccaaggccgaatcggcatccttgaacccgctattcgccaggcgagtgagtttgcccaccatgtgcatcacgaacagggcgagtcgatggtcatcggcggttttcgccaccaggccgttcgggaagaggatttccatgatctttccgtacatcagatcattgcgaccataggtgctctggcggtcgcggaagacttctgctgcggcgtacagattgttgagaacatcttccgcgaaatcatctggatgggaatcatcttcgcccggccagacggattccatggcgaacggcgcggcgtcttcggtcgggtcttcggactgagccgtttcagcgagcggagacggggctttcgcaaacgcctcgtcgagggtaggggcggagttcggggctgccgggaacggctcgtcgagggtaggggcggagttcggggcggccgggaacggctcgtcgagggtaggggcggagttcggggcggccgggaacggctcgcctgccatgtcgttgggcgcgctatcggggtcgctatcggccgcgacggcgaagaacggcgcatcgcaaccttccaggttcaggatgtaggagtcgatccccaggctattgtaggcatcgatgatgtcctggcgatcatcgaacgccgcgacgatcttggtgacgccttcgattttcttcagtatgtcgagcgcgactgcccgcttgaactgaggcgccggctcggtgttaccatacggccgcatgatgagttcatactcgcgatgttcggcgatgccgagttcgcggtggagcttggccctggtctggaaaaagtggttgtcggttcggccggtgacgaagaaaatcatgaggtcggcgtcgatggcattcctgatgcgacctacagcgtgcgggttgagagtgtccttgtcgagacgagaatgatactcgtcccattgccgttccaaggcgaagctcttgcggtggctatcgtcgaatacgcagccgtccaggtcgaagatgatgatgccattctttggtttgcgttccatattcagatttccttactggttgctttctgggtgacggttttatcgatgaacgtcccatcagaagtgaggcggaaaacttcgccattctggatgaaatcgaacgattgcacgttcatcgtgatgcgaatggattcgctgccgttggtcacttcgacttgtgcgatgtcgccaactttctcgacaatgatcttcatgttacatggacttcccattgacggccacagggttggcctcttgtttttccgatccccagaaatcgcggcgcagttcttcctgctcggccgagcgatccatccaggggcgatagaacttgcactggtagataggttccaacggaacatcaatcacaggaatctgacctggctttgtctccagagcggccatgaaccggtcataggatttctgctggatttcctcttcattcatcaccttcgacccatagcgcgggaaggcgcaggagccggtggcgacgcagtgcggctggagcaggctgtcgaacataggatagacttccagaaccagccggcgcatttcgcggaatacttcctgatattcaccctgggtccgaacgcacaggcgaaccttcgccatgtcgctgagagtccgcagattgaacttggccgcgatcttcgtttccatgttggaagggatgatggcacgagcgtcctggagcgacgcgccggcctccagaagcttctggtagctggtttgcgcgtcggcaatggcgtcatgccacagacggttcagctcttcgcggacatggtaggtcgggtcaggctcgccatttaccgtagccggttcgtcgaattcccagcggaaggcttccggctgaacgacggcgctgatttccagagcgcgactggtttcctgctggtaagccccggtacgggtccgaacgagttgatgggtgaagttcttgctgacaccctcgatctggaaaatgaagtccacgaactcgaacggcgagcggatggtgtccagcatgtacttccagtggtcaagcttttcggcctcggtcatggtcgccgggtcttggccgcgcatgcgagtggatttcgtccccaggagaagttcccaggcgttctgggtgtaactgatcagagaaattttcatcagaaatcttccggaattggcgtgaagtggaattttttggttagagccagggccaggccttgggcttgctctttacgaaggccatactgctctatctcttccttgagcagttcgcaggcctccagacgcgactcatactcttcagcctcctgaacggatgagaaaacggttccatcagaggttctgtacacaagttcaatcgacatgatgacctcagtagcagcggatgatttcggcgcggatatctcgacggtcgaggtagtgctcacgaatcttatcgcgggcgcgctcggcctcttctcgactgccgaacgacaggttgaacgaagtgaaaggcttatcgtccaggcgcccatcgccaatcaggtacaggatgcctaccagcacgaaagacggcgctgtctgtcgcgtttgcggcgggtcgatttgcatttcgaggaaagacatgggaacctcttcaggatgatctggtgcgtacattaatagcgctcctgctgagcagctacggtttccggctcatagatgagcatgtcaacgatttccgggcactggcctttcacccagtcgatggccgcgaccagtgtggtggaagcggagaaagagaaagtgcggtaagactcatggatgtacggcgaccccatcgaatcgcgctcggtcgtgcgagaaatgactgctttgatattaacgatccggcccatcttcggcctccactttagcgattatatctgacaggctcagcttctcgccattcaggaaataactggcgcgaaacttcctgtcaccctctggcccgacgatccgggccgttatggtgagactcccgccgccaagggcatcggtgtccctgaagaaagccagcagcgcccgcttgagcgctgcctcgcgaggatcgacggccattaacctaccacgttccagccgtgctgagcgcaccaaaccgcaccggcccctgcaggaaggctattcagaaggaacacaggagtcaggcgaccgtcctcggtcatatgtatgaagtagcgggcgccttcaccgagccattcggccttggcgatagcgcgttcgagattggccttggtggcgtaggttttggtgtggttcttgtcggtggagaaggttacttcgcgggccatttgtcgattccttttggctgaagggtttcgcgtttcgatgagggaatattacgcccacctgatccagaagtaaagcacttttgtaaattacttcacgaacatctgcttggccttctgataagacgaagaagtcatcaggcgctcgatgacgtccatgtccgaaaccagatcatccagaaggacattgcgccaggtagcgaaccggccgagcgagaagatgccagcctcatgggtgagattccagatcatggattcgcgctcgtcgcggccgagaggaacgattttgcctttggtctggatggtcggctcgccgtcctcgattagctgtttccttctgatcccgaaggccgcgcagacttcatccaggtcccatgccggattccattcgatggtttcgatctcaccatcagcattctccaaaacgccattcgcgacggattccacgatcagagtatcgccggtgatggacgcgcgaaatgtcccgaagtcgggactggggaaataaacggtctggaagacgtcacaagggatggaaagcttgtatcgactcacgatgatggatgtgcctttaccgaatgacgggtcgatacccaggtccatccccgccgcagccaggttggcgcggaacggcgcggtgcttatgacattcacatggtcatcttgccggcgaaggtactggaagaaagaggcgtcgaaaggacgactccaagtgatgcggttcgccagcttggcgacaagctgctcatagaagtcggccggtgcgatccaacgcttttcagtcgccagattccagatggaccggtccgacaggccgcccgttactttcctggagtacatgttgcagtggtcgatgcgcggctgggaaatgaattcgccgtcgatgtagatagctttgtgtacagtgacttcgcggaacgggataccggtgagttggccaattactggcgagcggaatcgcaagagtgcgttgtgacgctccttgttctccggcgtcgccgcgtcgatgatttgggcttgagggaaacgatgcgcggcgatcaggccggcgagtccagcacctacgatgatgactttctgatcaggaatcatgatgtgttccttctgagtgtacaaaacttgagaggataaaaaagggacccattttcatgagtcccttgaagagctagacgattcagtctcagaagagcggcggcttactcttcttcaccatcggaaccgtcggcgccctgatcttcaccgtcgtgctcctggccttcatcaccggccttctcgtcatcgccctggccagcttcgtcttccttcgaagcgatggcaaccagatcgacccagcccatgacttccagcttgctcagatagctgcgaaccgaggctccatacagcaggtgtgccactttctcgccaaaagcttcgatttctaccggctcaccgacggcgcagttctcgttgatgtaggcaaacaccttgccgcgaatcgaaatggcctgcggggtgccatggccgtcgccggtcgggatgaagtgggtggcgcgagggcgacgcgagccgttggacttcagttcctcgcgacgggcttcggccttcgcacggcgctcttcctgctcttccttgcggcgctgcttctcggcttcgcgctcggccttcttctgctcggccaggcgcttgcgctcttcttcacgagcgactttctgggcttcctgcgcggccttcttctcttcggccttcttggcgcgctcggcttccttctcggccttcttctgctcgcgctcggcttccttcgccttcgccttctcggcctgctcagcttccttcgccttggccttttcagcgcgctcggcttccttggcggcggccttttccttcgccttctcggcgcgctcggcttctttcttctcgcgctcggctttgcgcttctcttcgcgctcggctttcttctgctcggcttccttggccttggcttcggccttctcggcgcgctcgcgctctttacgttggcgctcagcggccttctcggccttgcgcagggcagcggcttgttccttggtcagctcttcgccttgggtctgttcgttctggtccatgttcttactccgggaatgtttgaaaggatggcttattggcctgtgagaggattatctctaaactaattgaagaagggaatacctttcgcctgaacttctctaaatatttttctttcgggaaagtccagactccagggaacttatttatgttagcgaagtttttaactcttacgcaaaaacaacaagtattcgattgcgcgagttatcccagtatacatcaactgactataagggatggacggcaagttttcttctaacatggcaacccgtttccattctgaaccctgcgacttgtggaacgtcatcgcccagccgaagtcgaatccgccaatagccttctgcgcctccagccgcacgtcttcctcgaccgaaaagctcagagggttgaacttcacccatcgttcatagttcgtgccgataatgcgaactttggcgaacaacatttcatcaggctcgtcgtcatcttcttgcccttcaggaactggcttgaagtccagcagaatggcttgttcgccgttcatgattccatattcgtgctggttcccagtgcacaccagcttctcaccgattcctggctgcacgcctttgtagccgaggattcggcgagcgcgtgcgttcaagcgacggcgagtattgttgtaagcgcaaagaatcacaccatcgttgtccaggaacgtccgcatttcatcatccgacatatcgaagccggcccggaccactatgtcatcatactcgcggcagggcaggcgctttccctggcggacgaacatcgacgcccgaacgatattgccggcgttgcgctcgatttcggtcatgatggtatcacaactgttctcgtggaagatctggacgccgcgcacaggaggcacctggccaaagtcgccgatttccaggaccggaattcggtgcgacaggaggcgctcttcatcccactcgccgatcatggacgactcgtcgagcacgaccaacttcggcttctcgtcgagcgagtctttgttggcaaacatgatttcgccgtcttcatcttcgccaatcggccgatagatgaagctgtggagggtccgggcattggtgcagcccttctcgcgaagccgcgctgctgctttcccggttggcgcgacgaagaccgtccagtccatcgagcagcaaagttcggcgatgatcttcgcgatggaagtcttaccagttccggcgaaaccagcgagtcgatagacctggcggcggtgcgctcgatcacaccaaccgcgataccagtccacaacggaattgatcgcgtcgatctgctgactgtttggtcgaaagccgaatcgctcttcgatctgatcgacggtgaagttagatgctgacatatttgcgttctccaacgctaggtttaattgaatcgaggctcagtttaagcacgccgtccacagaccagccagtatcacgacgatacttgcggccttgcgggtcgacatagaagttcttcgtgcgccgcagcagaacataatgccaagcagctccaagcgcgtggacccttcctttatacgggaaagccttcgcctgctctgcggcctctttggccccagggagccagcggacggtagaaaggaccaggaccgcacccttaatagcctgggaagcggcgcggccgtcctgtgggctatagcgatgtctatcgaagtctacccagtggtggttgccgcgccggagcttgaccgttcgggatcgcccctcgaacaccacagtgccttcgtgagttaaaatatgttccgccatcgaatgttcctttataacgtacagttatgctttacctctgcgcaggaagagtatactatcagctgactcgccaaagcgagcgaatttaatccaactttacttcggcaggaaagtggccgatactagagccgccgcctgtactgccctccaaaacagaggatacattaaatgcaagaatgcaagatttcccgcgaccaactcccggtcggtaatccgaatcccaatgtcgacaagacccgcgacccgaaccttaagcccggtttcctgcgtcgcagccgcgagctggacccggcgctggccgttcgcatccgtcgcgagctgatccacgccgaagcatccgacttggccaaggccggatgggtcaattcacagtccagcctttatggatcgaaagccttcccgcgccattccgtcgttcgcgtgaccggagttccggaagatggagctttcatcggcatgctgatcggcttcatcgagcatcgcgagcatggcgaatgggcggtcatggaagccggaacgaaagaaggcggcgccgtcattattccagtcgatcacatcatgcgagcgtcattcgccgaagccgaagagttcgccgaaaagtgggagcggaacttggggtggcgtctcctgcgccaactccgcgagtgcggcgccctggccgggactgaagacgagttcctgcggcggatcatcaatcgatacgttcgtgatcgcacgatcctcgatcaccacaaagtcggcgcggacaaaacctatactgatgcagtactcaaaagcatcggcgaaacatggccgaagattccttcggggaaattcgtcggacaccgagtcgcgcagctcctgatcggccacaagctaggtcgagcggggaccatcctgaatgacctggtggacttcctggagaagttcgcggccgggcgcgataaaattctcaacatcgccatctgtaattgaggtgaatgaaatggttgacttggaaaagctgagtccaaagctgagtcctcggcagcatgccgttctactggagatgtacaggcatcctgagcatccagttcacagatcgccaacgaatttaactcttaaggctttgagacgaagggggcttgtcgagctatcctggaaggattccgtggctggatatatgttcggtcgccaaccttgctggaaaataactgatgccggcataaggcgaatcctgggagtgctggggaataatatggaaaaagaacaaagcgaagatcgcccaagcatccctgagtttgagaagaccgacgccaacaaactctatgatgctctggagacgatttcgctgctggagaagaagttggacgaatccgaaaagcgcgggagcgagctggccgcgagctattgtgacggcgtagtcggcgatgaatacggccatccttattgtcgttataaagtggaacgcgacgccgccttggccgaagtagagcgcctgcgagaatcaaaaggcgatccctctggcagcttcgacaggtgtatgaagatgatgtacgagcgcgacgagaatgcaaaacgactcgacgccgccttggccagggtcgcggagctggaagggaagttgacggactgggtgcacgaagggttccggctcaacgaggcgctagcggtcgccaaggctcaacccagcgtgccggaaatatctggcatcggtcgcgatgccgaacatcccagagctgtagtgctgtatctgcgtaacgaacccagcgatgaagatatgcgagcaattcagaactttttgcgcgccatggccgcccccgctcagcacagcgtgccgaaagcatggctcgacgttcaggcagagcgccgccggcaggtcgaggcccaggcgctaaggcaggaagtcgcagcactgcgcgcaagggcggatgttgtgccggaggtgttcgggcttgagcggtaccgcgtagaaaaaactgggaagggtttctggccatactgcgtgcgtgcgggggatggaacgcgtgaactgttcgtcggccacttgaagcagtgtcagcgggtagcgaccgaattggctacggcgtttgaagatgggaagtttatcgccgcgcccggcagctcggctcagcacagcgtgccggaggggtggaagctcgtaccgatggacccgacatcgcagatgacctatgtcggtcagtccctgcgttatgacgcggtaaacagcatcggcgagatttaccggcaaatgctcgccgtagctccctcacccatcgatccggccgcgcatcctcagccgtgccagcaaccacaggcccatcctgcccgctgcgggtgcgagcggtaagtgccaagtaaggaattcatgtaatggaacagaagaaaccttcaccagtagatggagtcatcatgaccagcctcgacgttctccggaaagcacagcccgaagcccaggacgagtatgccgtgtccatgttcgcaacggcgatccgccagaaaatgcagcgctcccgcgataaaggccgaggcggctggatcgactgcgacgaagatattctgatcaacggattcgccgaacatgcgctgaagggaaatgagaacaacctcttggacctggcgacgttcctgatgttcatgtgggtgcgcggcatcgacgatgcgaagattcccccggcgctcgaaaaggcgcgacagcacaagatcatggaagcctggagtcgaatccatgaagatggcctaaactccgccagaaaggcgagtgctgcgcgacaattcgtggaagtgcctcgacgcaaggggcgcccggagcgacttgcatgaagcctcacgaaataagactggcacaggccgaagagttcctgcgcgaactcggccgagggattccagacgacgaacgggtgatggtcggctacgctgaagaggccacagtccaaaccgacgagaacggccgcaagctcaacgccggctggtggcctgtgccctggaaggaagggaaatacataaactcccgatccaacgcctacgcttgcatctcgtcatccatcaagacgcccaacccgaagaccggccagatgcgatactggcgcggcgaagcctctttcggccacggcctggcgttgatggtcgatgacatcggctcaggcaaagggtccaagggcgacttcgaccgcgacgagttccgcgagcgactagagccgaccgcgattgtagagacttcgccgaacaactaccagttctggtatttcttcaaagagccgatgtcacacatgctccagttcaaggcgctgctctattcgttcgtggaccaggtgctaaagaaaggcggcgacaacaccgtcaaggacgtcagccgttacggccggatgccattcggcttcaacaacaagcgcgggaaagacggcaagttcaaatatgccgacgaaaacggcaaacccgaactcgtgcgcctgtacagcgccgactattccaagcgctactcgccagaggaaatcgcgcaggccttcggcgtccgcatcattatgccacagatgaagaaggtggagataaaccgcgacgattgggtgtatgaccaagtatggctgaagtatgccgagcacatctgcacgaaatacaagatgggagaagcggcaggcggccaggtccagcagaatatgtccggcaaataccgcatccgctgtccctggggcgacgagcacaccaacggcgatcctttcggcgcatactttcgcggaccgatacctggcgccgagcacgaatatgtgttcggatgcgggcacgatacttgccgcaaagagcatcgacggacatgggcggccttcactgatgaagtcgtcctgccgtatattgtcgaacaacttgaacgcatcaaccgccgtcacatcggcgaggagtagtaactatgcaaaatgatcctggaattctgattaccgccatcggctcattgcttctcggccttctcgtcttcttcgaaggcctgaatggatggaaaataccagcgtcaaactttctcgcgtcgctcctgtgcttcttcgtcggcctttctgctttaacctgctggttcgtcttggcgtttgacgtgttttagtcgacgaacggtccggaaatttcggatagggacggaacttattagctctgccggtttaggtaggagataatagccgtccctttcgcctcaatatgtagaggcggtgttatatccgatcatgtaaagcagaaggcggcaaacctaacatgattatcgacgacgacaacattcttggtgatgataatattcttggtgatgacgaatcggggtccagtgagttcgatctcacacagatagaagatgctggaatggaccctttgatgaccgccgcaagtaaggcggccgatgatgcgattgcgaggaacgaggcgcaccgcgcgcaaaaggcggcaagatacgccgaggcgtatgctgaaccagacttgaggaagcgagcgcggttgttgatgctcgaccaggcctttgatcttccggtcagccggctggtgaaaggaccgttcgatgactttatcaccaagtacagctcgacttcagacagcaactacctcgcggtctatgatacgttgttctgtaagggcgacggaaccgtcccccacccgcacttcgacgagtttcgcggccggctggttgaccaccgaggcgtggcgttcaataacaagaccctcgaccccattgacctgatgggcgccctcgcggctgcggccttggacgatccatcgatcaagaagacgattgaaacttgctgcgtgtgggcgcgtcgatatcgccgcaactctttgatcgaaacgtttgagaagaagataccggagtgggatggtgaagagcggatcgacacgctgctgatcgacttgttcaaaccgttcgacaccgagcttaaccggatggtgagtaagtatttctggctgagcttgtactgccgcatcaactaccctggaatctcagcgccgatttcgctggcgttgattggtgggcaggatgctgggaagacttacttttcaatcttgatctgtaaagagttgtcgagcgaccgaaagttatcgccggtccagcttgacctgagccgtcatgaccagacgccatttttgcgcaatatcactggcaactcggtgatcgcgaacgtcggcgaaatgtccggcttcaaaaagggcgacatggaacgcattaaagagttcctggtgcgatccgatgatactttcgatcagaagtttgaaccaggcgaaactatcagtcgacaatggatcaccatcatggacggcaacggctatgatggtcttcaacgggatgagtcaggaaaccgtcgattttatccaatgttcgtggcgcaacttcccgacgaggatggcaagccgaattgggttaaaccgggcgatggaaatgaaactttccgcgttgacttcacagacttcggccgcaaattctggcaagccatggctgagtgccgcgcctggattaaggcgaatggcgtggagggatatctcagtctagttcgggcgaccaacaacgaagtccagaaattctctatttcggaaatggagaatgcgcgtggcgtggttcgtgatgacacgattgatatgtatctgatcaacgtgctgatcagttgcgagttcgaagagatcaagcctggcaggaattcaaagaatcctggatggagagtcaacaccatcgaaatcctgaaatggttcgatattctcgccaggaagaagccgatttctcgccacttaactccgcacctgaaggcgctaggatttgttccgaataagaatggcttgaatggctggtgcctgcctgtagataaggttgcgcctggatggaccagagatatgcacacgacgttgccgccgttcaatgatgtgcttgtatacttgctgaggaaggttgattctgaggtgactgatgaagaggcaatgattcaaatccgcaaagttaaggccgagcgcgcaaggatattgggtgaggatttctgatgtagtgatggagtgtacttggactaggccgccttcgggcggtcttttctttggtgcggagtacattcgatttcggttgtggccgagtgagattcggaagctatctggtaattagggtttggtggcgatggcgcgttgtggaaagttcgtgaacgttggatcaaggattttgtgcggtgattggatgaattgtggaaaatcgacgattctgactggatttttggggtcggccgcgccggtcttactggtaattaccgaaaccgggaatttgggtcgagccttagtgccgcgtgggcttgaagcgcttattcggatacttcccggtttcggatgcagccgcaaaagtatactacagcgaaaatcga

SEQ ID NO: 30 - DNA, 67560 bp, synthetic construct
  source 1..67560: mol_type = other DNA
ttgcacaatcctaatagaaaaaatctatcacggacgttacctatctttaaaattaataaaattaatagtaatttggtaatttggtatactttagtatttgaaagccttgcggcactaagcctgtacacttcccgtcaagtttccgattccgctcaactcgcggcagggtcgccggaaacttccggacttccaatccatgggtcgcggcaacaccacggcggactaagcggcaagtgccaaaactcgacgaacggaaccggaaatttggaagcgcgatagaatcgctcagctggacatatttctaacattcgatttaacactcaatccaaacactcaccgccatcgtctcccgccaaccgccgactcgatcctcacccaccagcggatcgcccgtataacatcctataacaccacctaacactcattcatcatcaaacccacccagacctacagcccacccacaagcagcccatagacgcgatccctggccccatagtacaatcgcgccatactcagtgtcgcggcagagcaccaggggccatccgccaaccaagccaccacgacgactccagaatcgaactcagggacgcagcaccaaatgaccaaattctacagccccgacgatctagtcacgccacaggaattcgcagacccgcatttcgcggcgatcaaccaaaagcgattcgacctgtacatcgacctgcgcgtccaaggttacagctcctggcgggtcttccgggccatctggggcgaggagcatatggacggtcccgcgcaggcccgcatcttcgcgatggagtccaacccgtactatcgcaagcagttcaaggccaagttgaacgcgaccaaaacgtccgatttgtggaatccaaagacggcgctccacgaactcctccaaatggttcgtgaccccaccgtcaaggactccagccgtctgtcggccatcaaggaattgaacgttctggctgaaatcacgttcgtggacgagtcgggcaagacccggatcggtcgcggtttggccgatttctacgcatcagaagccgaggctcagaccgcgaccgtcgctgctgcggccgaagccaatggctatgtgccggaaggtgaagagggagatttcccgtctccgtctccggaaccgaccgaggaagaccgcgccaaccccatttagacataaaataacggctaaggatttaaggtaaggaggtttatttatgcaggataaaaagtctaaaagtaagactgccaagattgattggtctcactggacagtgacggtccctgaggagaacccggacaagccaggtaagccgtattcactgggttatccggagattctcaattatgcagaggacaaaatcgcgtcaaaatacatgtacgacgatccaaaggacaaaagtgtcgtgttctacgcattcccgtccggcgtgactaccgctaacacccattacagccggtcagagttacgggaaactatggagaccgggtcaaacaaagttaactggaccttcgctaagggtggcaaaatgcgtggtacttacgctatcgacgacatcagcaaagagccggatggtaagtattcccgcgtaattatcgcccaaatccacggcgtactgaccgacgagcaacgtgatcttattgggcaaaaggacaataatgcccctccgattctcaaggtgtactgggataaaggtaaaattcgggtaaaaacgaaagttttaaaggacctgaacgccccttacaaagagatgcttctggaacacgcttggggtgatgacgaaggccggaactttaaagagaagattgacttaaatacacggttcacattggaggttaaagtgagcgatgggcggatggaagtcattcttaacgacaccgaaagtttggtctatgacgacattcacatgaaaaaatggggcattttcgaaaactactttaaagcagggaactacttccagtctaaaactccgggcacttttgcaaaagttaaaatttattcacttcaggttacccactgaagaagcgacaaagccccggactctagttcagaatccggggctttcttttgggtttcttattctccagcttcgatgatttcgaagttgtatttgacgccttcgtgctcgaaagtcaatttgccggacgctttcagctgcatgcggaatcggatgcacttagaggaaggcaaaccgaactcgatgaaggctgcgttgcaggatttgaactcgccgcgcttgcctttcacggtgaccgccacgccatgacgctcggtgcgcttgcgggcgacttccgggtctttccaggagttggcgatggctgctgacaggtctttggtctctttggttttctccggcgcgttcttcgcctcttcgcgcattttccggatttcttccagcgcttcctcttcggtgatttcttcttccggcttcagattctcttcggccttctcttctgccttcttcttggaagtgcgggttttgtaaaccttggccggggtttcctcttcctggaaggcctcttcctcggccggcagagcgttcaggatggcgaggcagcgacgctcagcggtcttgcggtcagagaagcgcttgacagtcgcatcggcgttgtgagcgttgtagaaggcgaccagttctttcatttctgcgttctggatgtcgccgaaggttttgatggagttggtcattttgcgatcctctgttttggaagatttcgtttgggcttcagtttgtcgccccgttgaaagagattatgcctaggtcgatgctgcgtgtctacatctatttcatcagattgatcacaaagccgacgaacggttgtctgatgtgaaaacaccgcagagcaggctgcggtgtttgttggcgttggggtgatgtcagaaagtcgggactgtgataggctcgatgggcggatcgccgggcctgtcgttgtccgatgcgggcgccgggctggaagggatcgcacccgaccgaagcgccagcgattccgactgcctgcttacctgcggagctggaggcgcttttggcgcatgaggcgcgggcggaaccggcaggcctggaggagccatcggcgccctgggcggctccggaagatcgggcagatcaggaagactcggcgctatgccgccaaaggaccgctgcgaccgctgcgacggattgtcgccgaacatttcggcggatcggttgtccttgatgacttgacctatggccgtcttgtcgccacccggttctgctggatcgaagcccgtgaatggagtggtaacgcagcgcatgttcggatgggtcggcagattgttcaggacgatggagtccgcccagacatacgggtttttgtggttgccgggtccgtggctgatgatctcggcaggaatatggccgttcatggtgagccattccgccatcccttgccgagtcagcgggcttaccacgatctgaccagtggactctttggcgatggcgaacagatcaccgaattcgaatccgatgattgtgtagttggacctggactcgccgacgaaagccagagtttcgatgttgtggtggatatcttggtcttcccagatgtacagcatggttcgctcctcaataaggttgcttttggtgttcgaccagagacataccggccggaactttgaagcggacgtattcgatcatcatcgccgttcgacgccgattcgtgcccgactcgtcattgacgaatagttcgcactggtgcggaatgactcgcgtcaccaggcactcacctttcgagccgtagaacttgctgtaggctgcgacgcctcgcgtcatgttcagacggatcgtttcgcagagtcgctgcgcggccgacgcgctggacagatcggtcggactgaccgtcacccagtaatggccactttgttctttatcggacataagctgccctccaatgagaaagcctctgccgagtcgcagaggctggttgttgttagtcgcgcttcaacagaacgactttgtcatatgcgcgatatttaccgcgccagtcttcccagtagtcgccggccgggcaggtaagctccagggtgatttcgtcgcgccagcattcgacagaaaggacaatcgccttgttcctggctgcggaatccgccctgagcttaatcagaatttcgtcgccagttttcaactcatcaactcttacaacttttgccatggtgttctcctattgggcagcgccgcgagggcggatcgggtcgatgtcatgtaagcagatggtaggatagtccctggccaacttgagcttgaagtccacccagtcagcgccgacaagtgccgagacttcgacacttattttgttgtgcggagcaggactggtgcgcaggactatggcccgacgccgaacgggatcgttgacgtcaacatgagtgagtatttcgtcgccgacgagcaactcacaggccatcaatattttggccatcatacactcctatgagaaggcgcggccaggacgatcccagccgcgccgatggattaacgtttgtgaaggatggacactgcgtccacgtcgaggatgctaatggtacggcgacggcgcggattgctgcgttcatggatgcgaatcaggttcgcagctggagcttcgtccaccacccatacgtcttccggtttctgcgtccggagcaggaccgtcacttcagtattctgggcgaggccgttgcagatgaaagtgaacttggacgagggagttctgtacatttcgagattcctttttggacttctggttcggcttctcagccggtgaagagattatgccctgattctcaccgccgagtaaagcatttgtgtaccaattctcccgtcaggtggaaccaaagtgcggtatcgcttatggctacgctaccgcgccatggcccttcttgctcgcacactgcgaaccacaggctgatttccatccttgccaggactcggccgaaagattcgaacctgcgccgactggacaggatgtcgacattcactcgtcgattgacctcataccggcgaccgttgatgacgaagaccagccgcagggtttgtccgtccagacattcccagtatctggtttcataccgaagccagtagcgcttgccagccgggcctaccatggtcatttaatcgatgctcctggccgcgccacgcggtccggtcggcgggacgggatcgaaccgacccaggatgtagtcgggccggcgcgcttcctgaggacacacggcgagaaggcgccatcctgcgtccagggcagactggagttcgtccgtgcagcagtcttccttgagcagcagacggttgacgttctggagattcggaccaggtatggccgatcctgtgagtgagttccaaccctcgattccactcaccatctccggttggttgatgtagcttacggacataccggccaaccggctcgcggccagctccagacgctccagcatgggtcgcagagcagcttccgggtcaatgtcgtcccagagaaggaccaggctgatgatggtatacggatagtccttgtccagatcccaggctgaagcggtcagacggcccaggccgatttcattacacatcacgggaacgtcgttgctccaggtggacggctcccagttccgctcaccaggattcccgattgttacgccttccaggttccccaggagaacgtggagcttgctgacatattccgcctccaaggctttccgctcttcgtcggtcttgttgtggcgatagaaggatggagggctgactttggcatggtagagtttcataactgttcctcggttttggaagatttgaaagttagagaatggtgtcgcagtatttctcgaaaggactctggcgcttcttctcgcagatcgcgcaggtgatttccaggtcgggcagctcgctgtaagtcttgccgagatacagccagcgcttgcacagactgcggccgtccgacgtgaagaagtggactttgcgagcattgccgggttgcgcccagccgcttggtgccggcttcctgctcataccatcaccacgtcaatttcgtcggcgaagaagttaaagccaactccatctgcgtagccagtgtaacgcagacgaatcgtcccatcaatgtgggcttcctcgacgccgatgacttccagggtggtatcgttgcagtacagcttgacgaacatcttgatgccggagccaatcgccgcgaaggcgatctgcttgtacaggtcttgcttgatcatgctttacgctcctgtttgcggatgtattctgccctgacttcggcttcgaacttcgcccagagcgcgttgtctactggaccccagggaccggtctgagttccgtccaccggttcgaacttgccaccggcgcggcgatatttggacagagttttcaggctgatgatcttctcatcttgggaatcgaattggacgatcatttgacgtacttcccgaagtagcaggtgtggatgatttccagaccattggagatagccttcagcttgatgccgaaattcttgatcgcccagtccagatcgtggtgatagaactcgatgatgttgacgatttgaccggcgctgtagtggatgacgcgaaccttgccgttccagcggaagtcttcgcggctgtttacggcctcgactgcgatggtgtcgtttctgccgatgttccatttggagctagtcatgtcgcaatcctctttttggagtgtttcgcgtttcgatgaggtaactatacctcagtcacctcatcgagtaaagcacttttgaacatattatctgaaatttctgtgagacggatccatcggcggattcagtcagtggaaccgagactccatccgttgcgggcgaaggccgagcgaccagacagcttgcggcactggatggagctgccatcgtcgaaggtgtaagatacggcccagtccaggcgctcgcgacgcactgacgccgcagcgatatcttccagacgggctttgagaagctgttctgctttggtcatttcgagttcctctttggggcgcttcgtgtttcgatgagatgactataactcagtcacctcatcgagtaaagcgcttctgaggaattatctgaagtttctggaggccagaaattgccgccagagccagtcaacgtgatcgttgaggtagcgctcgccatcggacgacagagccaggcatccatcctttatgccgagcttggaactggaaatccattcgaactcgaactggagcgttcctgggcgagggatatgggacaggctgtacttttgcacggtcaggaatcctctaaaggtttggagttcgcgatggacgcgactttctgcatgccgatgcgatagaattcggcctcttccctggccttggccagctgctccctggcttcgcacgccagcttgtgctggttattggcattctggatgcttccgtccagactcctgtccaactcttcccgaagagccttctgcgacgctagctcggcctccaaatcctggattctgatctgaagctggcgattcctttcagaaacatcgttttcgcgagcgatggaattctgaaggcattcgtcaaggcgagtattttcgcgcaccagttgatgcttttctactttcgcctttctgcacgtctctcgcattgctgaaagctcactcgcatgcagatcgtcatccgggtctttacgctcttccttcgactccatccgcaggtagtactggccggctgcgaaggcgagcactgcctggtcggcatacgctgcggcatcggtcatgtatctggatttgtagcgaggcagaaacttgcactcctctggatcccagaggagactatcggcaataggccagaatttgcggaaaccatcaggatcgacttctacattgaccatttgcagctggccggcctccacttcgacttccagaggaacctgaatagtgccggtgatgtactggaagtacactatgctagacataacacaaactccatgagaagtcgcggccgggaccatcctggccgcgcatcgtaatcaatcttcgccttcgtccgcgctcagccactcttcgaaggcgaagtttaccttcgactcgacccaatcctgaagctcatcggcgaactcgtcactgtcgatgtccatggtgatgcccatgacttccatgttccatagcgcggcattcagttcaaactgcaccatccgctcgccatcgacttccataaggatgcggtctgcgacttcatagtcgtctacatcgaacaggtggccgccagtcaggaggtgctggacgaaagcttcatcgaggttggtgacttcgatctggacttgtttggtcattttctgcgatcctctgttttggagtttgggcgcccggcgaaccggggcagggtgtttagcgcggagagtgccgatcttccaattttcaagctcgtcttgcgctgcgatctcaatatctaacagcgcttcctgccgctcgcctgccgctcgcctgcggtaagggtagagttccaagccaaatccttgatggccttgatgatttccttctttgtcatggtcatgcccgtggctcctatgtgcggcgggttggttaggcgaacagaaggcgattgacagcagcgtccacgtcccagccgcaagcgaacagcgccatcgcggcttcgtattcggttgcaaagccggtgtctgccatgaccacttcaacggcggttttgctgtaatgctttgaaagtttcagggcggcgagagagtccgctttgtcggccacagcacaagcctcttgaacagtttcaaatcggcccacctctttgcagcgattttccagaacggcccagccaaagacgttaccagcgccatcagtgattttgtgtactgtgttcatcgtcttaccctccaggtgtttgttcgtttcgatgaggagattatgccgatagtcagaatggaagtaaagtgtctgagtgagaaaaattctgcacaccgacgaacggttgtgctcgaccgtctgctgcggtgtcgatatactcggcctattgcgaacaatggactgattaaatgtacaaactcaatcctgcgctgcgagcggtctggcgaactcgtgcccgttacaaagtcatctatggcggccgggcgtcttcgaagtcacacgacgcaggcggtatcgccgttttcctcgcggccaactacaagctaaagttcctctgtgctcgccagtttcagaaccgcatcagcgaatcggtctacacgttgatcaaggacaagatcgaaaactcagagtataatggcgaattcatcttcaccaagaactctatcaagcacaagagtaccgggtcagagttcctattctatgggatcgcccgtaacctgtcggaaatcaagtccaccgaaggcatcgacattctctggcttgaggaagctcactatctgacccaggagcaatgggaagtcatcgagccgaccatccggaaagagaactcagaaatctggatcatcttcaacccgaacgaagtgaccgacttcgtgtatcagaacttcgtggtcaagccaccgaaagattcctgcgtcaagatgatcaactggaatgaaaatccgttcctcagtgagacgatgctcaaagtcattcacgaagcatatgagcgcgaccgggagcaggccgagcacatttatggcggaattccgaagactggtggcgacaaatccgtcatcaatctcaagttcattcttgcggccatcgacgcccacaagaaactcggctgggagccggccggatcgaagcgcatcggcttcgacgttgcggacgacggcgaggatgcgaacgcaactacgctcatgcacggcaacgtcattatggaagtggacgaatgggacggcctggaagatgaactgctcaagtcgtccagccgcgtttacaacctggcgaagatgaaaggcgcctcggtcacttatgactccatcggcgtcggcgctcacgtcggatcgaagttcgccgagttgaacgatgccagtcccgacttcaaactgatctatgatccattcaacgcgggcggcgctgtcgataagcctgatgatatctacatgaagctgccgcacacgacgatcaagaacaaagaccacttcagcaacatcaaggcgcagaagtgggaagaagtcgcgacccgattccggaagacttatgaagcggttgagcatggaaaggtttatcccttcgacgaattgatttcgatcaactctgaaacgattcacccggacaaactaaatcaactgtgtatcgaactttcgtcgccgcgcaaagacctggacatgaacggccggttcaaagtcgagtccaagaaggatatgcgcgagaaacgcaagatcaagtcgccgaacatcgctgactcggtgattatgtcggccattctgccgatccggaagcccaaaggtttcttcgacttctaaacacagaaaagcccggatcgctccgggcttcgggtcttactcggtgtggttcctggcgctgagtgtcgacgcaacggcctcgccgactcccagggcttcctggccggccgcgagcgcttcggcttccgactcgacgatgaagtcatcaccttggccgtcgcctggcggaacctcgaccagcacggcttcttcgccttcgaaccgcaggtcataagtcttttcgacggacagtccgtaacgggcattgagcgcatcccagagctgagcttcatagttgcgcaggtcttgcagagatttctggtggctgagcatcgccatatcgacggcccgttgcagggtttcgtccaggacgttgaatcgcatgcgaagagaacgaatccgctcgaccacttccgcatccactacatgtctttcgatcatcgcttttcacctttgctgaatgttacgttgtagccattgtcggccaggtaggtcagggcgccttcgaaggaagttccgacgagatgcttgagctgcatttcgcgttgcgcggcgatccagaatgccgttccggagaactctgcgtggccttccgacaataccttgccatcaggcccgtcgatccgaacgtgaacggaagatagcttcagtaccatcaatgaatccctccactggcttgcgacggcatgctttcagcgcgagcggcttcacagtccgggcagggacaggcttggcggacgcgctccaactcgtcggcatccatgacatagagcttcccatcggaagtgtcgtgcgccatggcgatgttcgggaagtcggcagcgctcaggccggcgacagcgcggatttcgtcccagagcgccacatgctcggcattcaggcgagctgcgagcgcttcgtgctctttcgctacacgagccatgaactcgtccatccggaatgcgaattccgcatcgatggatcgggccgaggccatggagttgaggcgaatcggttctttcttcatggtaattctcttttggttggcggttgttcgctgctcaggcctattacagtctgagcagcatgatgaagatgaacgcaaggaacgcaaacggcacaagtatgccggacatcagctttgacaggcgctgcatctcagcgtatttctcggttgacattccgtgctgcgccgcctcagctgcgaagcgggctttcgcctcgataacttccgggcgcagcgacaggacatattctaaggcctcttcccgcgctttttcggcctcgaccgacctagggtcgcgggccgagacttcgctgtgccctggcctcgcgggatgggcctgcagcgatggaggaagttcggcggccacgactccatagtcggcgcaggcccaagcgatcccgatgaggatcgcgaggatggattggacgattcgcagcataactttgtcgctagggaagctcatgatcaatcctccacagaccgaacgatttccaggttgcgcccggcattggtcccggcattgaaggcgcgccgaccgtcgctatcgtccaggcgcatgagcttggtaacatttgacttcttgtagccaggatcgccgaaatgttcgtgcaccgcagcttccttcaccacaaccagagacgttccggcagaagataccagctccatgcgcttcctggtgatggcctgaaggcgatagctgatttcctgggtcgcggccagcttgaattgcgcggcaaccttgacgttgaatcgtccgtatccttgagccttctgatactcccggcacagacgatcaaccgcttcgacaagggagttgaacatgttcaccgccagctcaacgtccgatttgtagcctttaaagcggacggcatgcccccagcgcttcgtagtcccgccgtttgcggcgtgccaagaagccttggcggtcgctcggtgatcgttgatgccaccggcgaaatccatgatgcagtcgttgtacgtcgccacggccaccgagaagaacttcatccagttcgggattgcggaatagtaacgagtcgcgatctgctcatcgaactcttcgcgaatctcgccggtcacttcgaagtcgtgaaggtcatatttgtccttcagcttcttcacacgctcggctgcaatggcggcttcgtgcgggctggaggagtcggccgccatggcagtcagtttgcggatgcggtctttcgccttctcgatggcttccggggtgaattcgttctggtcggtcatggtcggttcctttgtctgaagggtttcgcgtttcaatggagctattctgccttcattcagaattgaagtaaagcactttcttccactatttcggcatcgactggaagaaattccagatccaatcacctgctaccagcaagaggatgagggcggcaaagaacaagacagcggccgcgagctgtgcgcccggcttcagtttgggatggctgagcttgggctctacgggaacggccggagcgctagcgctgcaaccggcgtctcctgggccgtagccgatgccgcgttcacacgcctggagcgacaccagggatttaagatactcggtctgcttttgcgactcttcgtagatgccggcgacggcgaaccagagggcgaacactacggacgtacacacaacccaggcgccggtcagcaggagggccagcgggccgatgacgaagacggtagcagccaggacgattgcgccgccccagatgatgaagccggccagaccattagtgatgtcgacacagaactttttcattttcagattccttcggttacgggatggaggggatttgaaactctgcgccgccgagaacatcaatgacgacttcccagagcgtcggaacagaccactggtaacggtcgaagtcggtttcaggatcgacgcccagcgtcacataggaagtggcaggccatttatgaacactgcctttccgcatgagagtcgccacgcggccgtcaccgagcggattcgttctgtgcggaacgtacgcagacatcgaatattgctgcccggcgtcgacaacaaatctttgcctctggcgcagacatacagagcccacaggattccagccgcgaccgccgcaagcctggcgagccgaagagtgttcataaccttcgtgagtcatttcgccgaggcaagccgagcgatcctcgtaatagttgatgttctccatcgatccaaccagtaccagagactcgaaatcgaatctatgatcgtggatggccgagtgattgaagcaaagccggcgcggcaactccgggtgccaaacatggaggcgccctgccgggagctggacttgaatgaaccccaggccgtgcagcgtgatcttgtccttcatcgggtcatggacggtgctcatggataatcctcagtagcagaaatgtatggtgagagttacgatggccaagccggtcgcccataggagggcgaaccaggccatggctttgatggttatgtagatcatccgaagaactttccggcacagatcggtccaatgcccatttcgatggatgcgtggttggtcaactcgcgaccgcagcaggagcattgaccagtcttccggccgtaggcgactgccgattccatcggcttttcaaacatcttcagaacgtcgtcatgctcagtgtcggtgcagtcgcgactcttgatgaatttgccattggtgatccggccgaggtagatgtcgcccaagacgtacaagctaccggcgttccggctgtgagcgctagcctctttcacaataacgatgagcggctcctcgccttcgccagccaggcggattttcgggcgcttgatgccagattctttcgccttctcaaacgccttctcgatgccggaaatgtccagagtcggtgcagcagcttcctgcgcggccactttctcgcgatatttggcgaggttttcgatggcgcgcttcgcagcagcgatctgattttctgtcaaggagccgtatttatacaacgactcctgaaggctctgagcgaagctgaaggaatttccagtccaccactcgacgatgtccgggtgcgcagcttcgaaggctttaattttgaggtcgcgctcttgcgcagcgctacatattttctcgatgcgcttttctgccgccttagcacgactcttggcgcgctgctccgggctggttttgtactctttgtatccaacaccgccgcaggcgaagcaggcgcgaccataagacgaagggccacggtacaggccggtgcctgcgcatttggtgcacttgtcgcgatacagcttcacttccttccgggaattcgggcgagcgcccatggacgcgtcttccagggtcttcggcgcttcgttgttgatcgctacggtagcgaagtcgtcacccaggtcttcgaagccggtgaacagattctctgctgcgttcatatcgattctcctgtttggaaagttcgtttcgatgggttgactatacgccagaaatggaaaacggtagcactttcgcactaccgttcgtcggatcgcagagggtcaggctacacggatcaactgcgacatgactgccaggttccgctcggcgacgccgatgatgacgttggttccgatgatgaacttccaagggtcttccctgttcttgtcgtagaacggatttctgaacagggtccgccatgtctcttcagtgaagaacgttttatggtccaggtcttggtgggcgatgttggagttgtagaatggaacaacgacattgagcgtcgcgccgactgccatggcccgctgcaggtctttcaccaaatcgatgacctgggctccggtgagatgttcgaagaagtgaaatgcgtagaccgccgtcaattcgccgtcttcatacggcactcggccgctggcgccgtcccagttcggccagtcgagcgattcgacgccgggaatcggcgaattgcctgcgcccaggtttactgcgcggcggtgatccggctcgatcaactgagcgatgtcgcgcttcatgccgagtttgaacaggttttgaatatccatttggttctccaggttgctgttagtaaatgtcgctgttgatcttgaatccatgctcagcgccgtcgttgtggtcgtactcagcatagctgtcgcagtagtcattcaaatgctgaatgatgccaagaacgtcgttcgcggccttgtgccgtttcgcggcgatggtcttggcgatgttgtcgccgacttccagggtttcggccgtccggcgatggatcagcaggcgactccaaagatagagccggacgcgacgaatgatgtcgcgatggcgctccagtcgtccgtgcaactcttcaatttcgtgctcgcgagattttaatactcgtcgaagctgctgaacttctaattccaaatcggccttagtagccatgttcacctcaaaaaggaaaatcgtctgggactccaggaagctcgacgactattgttgagcctgatcgatctagaatgcatccgaccgagccagccctgtggggatagggtctacacgaactataacaggtgacttccatgactattcgccaggtcgatcctccacaccatctacaaattggcggtcgcttcgacttcagttttcgttcgtccaagacggcgcgtctgtcgcaggaaaggcagcgcgccttaaccgacgtaaccatgggtatagtcgatcattcggatgaggccatcatcctctgattccctcgacttcagaccgcccaaagagtccgactggccgttgcatttcgcatcgatatccatcgaagacaagaatcctgccgatactacggtgatatcaactttgtcgccggccttcttgaagtcttcgcactcagcatcgagggccacaaccgcactcgcagccatgttcacatgacttatgaggtcggggaagatcacaggaacttcacgcgacatgccacggaccgtcatcttcagtactacatacttcatactcactatcccttttgtatgtgaggaaagaatttgctgttttccggatggtggaagcgctcggccgcaggctgtctttcttccggacattgaatcgtcgaaggcgggaaaaccgcgccggcgataatcgccgcgaggagtgcagcggatgtcgacatccagagggcggtttccaggctcacccgaacttccggacggcgcggcttcattcgctccaccctcttcccggttcataggatggtagactgccgccgcgaacccagtcgtcccacatgtggttcagaccagtcggtggctggggcggcggactgtagaatccgggagtctcagtgctgctcaggaaataaggtgtgcaaacggcctggacggccagttggtgccgctcccacatcttatcaatcgctcttagcatgacgtcttcgcactgagtcttactgtcgaaccgtctgctagtatggtccggtatctggacacatccgtctccagtgcaaaggaaagcagtagcaatccatacggtgatactcgccatttcgtcacctctttagttgatgagcagagtctattccatctgctcgccaggagtaaagcgcttttcgtcgggataaatgccgatgatgtctgcgtcgagcatccaaatgtccacggacggatcgtcgctgctgatttgatatagattgtacagctcccgtccgcctacagcacgctcgcctcgcggctcaaccgccagaaccttgccgtggccttctccgtgctcgtccaggtatatgacgtgatcaccgacttcatagctttctttcgtgacgaggcgtgaacgcgagttgttctgcgattcaaccacccaggaatccagcacgccgcctttcatgtcgcggaacaatcttgccgatttgtcgcaatcgaacacgcccagaacttcgccgtctttcaacacgatgtgtacgataggaagaagagtattcatgtttaatctccattgactgataattagagtctaatctgccgaaaagttcccgtaaagaattatttctcagaactgattagttgtaactgttaatctgatgtatgtgtttgaatctcttttgaacgtttgatgtttcccctataataagcgcacacagccaacaaccacgtggaactacaatgtttaaactttcctggatattcgggcgcaaaaaggatagtgctgcctgttctgaatcggcgccggagaaagtcgcacaaatccctcaacacgatccgctcgaccctatgattaagctgggcagaattcgcggctggaacgtcgagccggagaaagccccggtcatccgtagcgtgaaggattttctggaaccgggcctatccgtcgcaatggacagcgcgtatggtgacggaccgactccggccgcgaaggttgctgcgggcggccagaatccctatgtcgtcccgaccatgctgcaggattggtacaactcccaaggtttcatcggacaccaagcttgcgccatcatttcccagcactggttggtagacaaggcttgttccatgtccggcgaagacgccgcacggaacggatgggaactcaagtcggacggccggaagctatccgatgaacaaagcgcgctgatcgcccggcgcgacatggagttccgcgtcaaagacaaccttgtcgagctgaaccgattcaaaaacgtcttcggcgttcgtatcgcactgttcgtcgtggagtccgacgatccggactactatgagaaaccgttcaatccggatggaatcacgcccggctcctacaagggaatctcccaggtcgatccatattgggcgatgccgcagcttactgctgcctcgacggccgatccgtctgccgaacatttctatgagccggatttctggatcatcagcgggaagaagtatcaccgcagtcacctggtcgtcgttcgtggaccgcagccgccagatatcctgaagcccacatatctattcggcggcatcccgctcacccagagaatctatgagcgcgtgtatgcagcggaacggacggcgaacgaagccccgctgcttgccatgtcgaagcgaaccagcaccattcacgttgacgtggaaaaggccatcgcgaatgaagacgctttcaatgctcgcctggcgttctggatcgccaaccgtgataaccacggcgtgaaagttctgggaattgacgaaggcatggagcagttcgacacgaacctggccgacttcgacagcatcattatgaaccaatatcagctggtcgcggccatcgccaagactccagccacgaagctcctcggcacttctccaaaaggattcaacgccactggtgagcacgaaacgatttcttatcacgaagaactggaatccattcaagagcacatattcgacccacttctcgaacgtcactatttgcttctggcgaagtcggaagaaatcgatgtgcagctggaaatcgtctggaatcctgtagactccacgtccagccagcaacaagccgaattgaacaacaagaaggccgctaccgacgaaatctacatcaactctggcgttgtgtctccggatgaagttcgcgagcgtctgcgcgacgatccgcgttccggctacaaccgactcaccgacgatcaggcagaaaccgaaccgggcatgtctccggaaaacctggccgaattcgagaaggccggtgcacagtcggtcaaggcgaaaggcgaagccgagcgagccgaagcccaggcgggagccgtagagggcgcaggcggcccggttcccgccgctccacgcgcgactaagcctctcgcgaaggcggccgaggaaggggccagcgaggccgctgaaccgccgtcgcggccggaccccaaggccgagctgcggaacttgttggtcgatcttttgtcgaagctccaagacctggacgacattaaggcgccggacggcgtagacatagagcacaatgatgcgcctggcttaaagcgcacgtccaaacctggcgtgtctggcatggagccttcagtgttttcgtccaaccgcatcgtcgggcctcgtgatcattcggaactccagagaatcaaggtgaatggaataaccaccttgatcgaaaatccgcgaggaagcattcgacaaggaaaggatgggagttggcgagttcagatgaaacaccactacgggttcatcaagggaacgaaaggcgctgatggggatgaagtcgattgcttcgtcggtccgaatctgggatccaaacgggtcttcgtcgtcaaccaggtgaacaaggaaggtcagtttgacgagcacaagtgcatgctcggcttcaacaacatcaacgatgcgaagtccggatatctgtcctgcttccgtccgggctgggatggtctcggctccatccatgaagttgacctgcccgctttccgtcgctggctggcgaacggcgacaccaccaaaccattcgggggcgagtgatggcattcaaggcctccaaaaagcgcgagcgccgggcacctcttccagtcggaagagggaagcccataattccatcggcaggaatcgaggcctggtatcgaaagcagatgaaggatatgtccaagctcatgatctccgactatcgaaacgagattgagaaggcgctgtcccagcctgcggccgaacggttcttcgccagagacgaatccgttaacgtcctgttcaagatgacccttcgaagcctacagcagcgatggagccgcatttttgaaggtttcgcggccaagatcgccccagagttcgtcaaccggaccgaagaagccgccactgccgcgacccttcacagcttgtcggtggccggcgtcgatcagccacgagctgcgtataatgagagcgtcaggaacaccctggaggccgcaaccacttacaatcatactctcatcaccaagatccaagaggaagtccacgagaagatttacacatcagtaatgctgtctctgacttccccgaatccggaagagcaaggaacttccggcataactaacgcacttcgcaaagtcgggaagttttctgaagatcgaatcgaactcatcgcaagagatcaaacaagcaagctttacagttctctgagcgatgagagaatggcggaaaatggagtcgaggagttcgagtggctacactcttctgccggcaagactcctcgccacacccacctggagaaagatgggaagaggttcaagctgaatgaccccagactttgggagggtccgaaagcagaccaggggccgccaggatgggcgattaactgtagatgcagaaagataccagtcatttgacgtcgataggagcgctatatgccgttagttcatggcacttccaatgaggctcgttctgaaaacatcaagcgggaaatcgaagccggtaaagacccaaagcaggctgcggccatcgcttattccatccagcgcagtgagaaagggaagacggcgaaagattgttcgcctgagctcgtcgccgatcttcgcgccctggtggacgctctgtcgaggctcgtgaaatgaaccgcaagacgtgccggcgccgactcgtggtcgatgtaatcagggccaatattcacggcggattcttcagcctgaagtttgccgccatcgatttggcaatcatcggcttcgccatcttgatggcttttggccgatgatgctgagaaaatctggattctgactaaaaattctagtccggatagccgcaaattaccgtttacggaaaatggcagtaatttggaaatcctactgccgcgaggctttaacagagccagttcctaatttccgatttagccgcatgcttcaaaagtatatagcctgggaaattagaagtaacgttccaatagaattcatctataagcaacgttataatataacgtcaatctatatgctctagacgtattgaaattcaatttttaatcggtaaattggtaatttgaattagtttagaagttgaaagtctcgcggcagtaggcttagacaaatcccgtcaagtttccgagaccaaattaccggattttcgcggctgaggaaactggtaattagatcataatacaaattataatgtaagttaacagtcgcggctacatctaattattgttccgcttatttacccttagatgtactgcgtatataatacagccatagtccacgactcttcgaattaacgatggcaaagtcgaaaagaaaaattgacgaaaatggatatatgaccatagagggctgcccgatcagctcttatggcgttttccaatattctgctggtcaactcggtcttccgggcgatccgacgcggattgtcaacgtatatcgcccggagtctgccgtcagcgatccggagtacatcgaatctctgaagaatctcccgttgatcgacgagcatgagatgctgtcgggattcgacgatgatgacgatagcgtggcccccgaagacaaaggggtggagggcatcatcacatccaacgcttactacgaagccccatgggcacgcggcgatatccgcatctattcccgcaacatgcagaatcagctggaaaggggcaaagaagacctgtccctaggctatagttgccgctacactgagcaacccggcatctggaacggaacgccttatgaagtcgtccaggacaagatgcgcggcaaccacattgccctggtaaaagagggtcgtgtgccgggggccagagtattggatggtctgtgttttgaccatctcagttttgatttcagaccatccgatgagggtaatgaaatgagtctcaagaaagccaagcggaagccccctgtccagcgcgtagggcaagctgctgactcggcggtcgaagagttgcgcgccctgtggccgaagctatctgcgtctgtccagaagttcctgggcgaagaagagcaggagccggagcatcaggaaggcgcagctccggccgaaccgaccgacagcgagcacctgaccgagcatccgactctggaaggtgctcagaaggatgacgaagagcaggaagaggagccttccgttgtcgatccggccgtggccgccgtcgagccggagcatcaagaaggtgccgcatccgaaatgtccggtgaaggcgaagtcgccgaactgatctctcaagtcaaggccattctggctcgactggagggcacggtagccgaaggggcggacgaagagcatggcgaaggtcaagatgtcgtcgagggcttggaagagcagagcagcctcagcggcgcgcaaaccgccagcgacgatggtggtgagggcaaggataacagcgaggaacttcctgaaatggcacagaagaacgcgcaagatgctgcaattcgcggtctctatcgcgacattgctgctaaagatcgcctctacaagcgtcttagctccgtggttggtgcgttcgatcaccgagctatggactcggctgaagtcgctgtttacggcgtgaagaagctgaatatcagctgcgcgaagggccaggaagcactggcgctcgacatgtacctgaaaggtgtcgaagccgcgcgcggcgcggccagccgtcaatcgaaagcccaggattcggccggttctgctccgcagtgcgccgagctggacagctacctgaagggggagtaactcatgttccagaaacaagtttaccgccagtacactcctggttttccgggcgatctgatcgaggacggcccgaagcgggcgcggccgggtcgaatcatgtctctgtctgccgtaaatccggctgccaccgccaccggccccaaccgcatcagtcgcgctttcggttacgccggtgacgtcagctccctcggcgaaggtcagccgaagactatcgcggctcgcgcttctgaagtcgtgatcggcggcgccaacttctttggtgtcctcggtcatccgaagcactatgcgctgttcggttcggccggagactccctggctcccagctatgatctgcccgatggcgccgaaggcgagttcttcgacatggccaccggcctggtcgtcgaaattttcaacggcgccgcaaccgccctggacctggactatggtgacctggtcgcctatgtaccaaacaacctgcctaccgccgacaacgcgcttggcctgccggccggcgccctggttggcttcaaggctggctccatgccgaccggcttggtccagattcccaacgcacgcatcgttaacgccatcagtctgccggcccagtcggcggggaatctggttgctggcgttaccatcgtccagctcacgcagtaaggaggcgtcatgagccagatcagcaagacccattcgcgcctcgcaggccgcaatgcgaaacctttcgacctgaaaaacatcaccaatgacgccgtggcgtctctgcgccgcatcggcctggtattcgatcacgccgtcgtccaggaccagatcaaggccttggcgaaggccggcgcgttccgctccggctcggccatggacagcaacttcaccgccccggtgaccacgccgtccatcccgactcccatccagttcctgcagacctggttgccgggcttcgtgaaggttatgaccgctgcacggaagatcgacgaaatcatcggcatcgataccgttggctcctgggaagatcaagaaatcgtccagggcatcgtggagccggccggcactgcggtggaatacggcgaccacaccaacatcccgctgaccagctggaacgccaacttcgaacgtcgcaccatcgttcgtggcgagctgggtatgatggtgggcaccctggaagagggtcgtgcctcggccatccggctgaacagcgccgaaaccaaacgccaacaggcggccatcggtctggaaatcttccgcaacgccatcggcttttatggctggcagagcggcctgggcaaccgcacctatggtttcctgaacgatcccaacctgccggcattccagaccccgccgagccagggctggtccactgccgactgggcaggcatcatcggcgacatccgcgaggccgttcgccagctgcgtattcagagccaagatcagatcgatccgaaggcggaaaagatcactctggccctggccaccagcaaggtggactacctgtcggtaaccacgccttacggcatttcggtttcggactggatcgaacagacctatccgaaaatgcggatcgtgtcggctccggaattgtccggcgtccagatgaaaaaccaagagccggaagatgctctggtgctcttcgtcgaagacgtgaacgcggccgtcgatggcagcaccgatggcggcagcgtgttcagccagctggtacagagcaagttcatcaccctgggtgtcgaaaagcgggcgaagtcgtacgtggaagacttctccaacggcaccgccggtgcgctgtgcaagcgtccgtgggctgtggtgcgctacctcggcatctaacagatgcctattcaccaaaggccgggcttccggcctttgttcactctgactctaactcggttgtaggggccggttagggcataattactaggactacgccaatgactgtttatatcgtttcctccatgactcaatcggtgtcttacaatgcgtatgacacctctgatccgtccaatcctcgcctccagcgaaagattctgattcgcggccgcgcaggcatcgcatccgaaacttccggcttcggcgacatgatttccgacgaggcaggacgtccgatctggaccccacagggcgattgcactgccgtgagcgattcggatttcgagctgcttcaggccaataagattttcatgcgtcacatggagaagggttatctgcgagtcgtgaagaccgacatcaccagtgaccaccagcggatttccaaagagactcgcaccatggagcgcgatggattccagcctctggatgctactcgcctgcagcagaaaatcaaggtgaccacagccagcgcttcccaggaacaagagttccggatttaaccgagggtttcggtatggtgattttcgacgaaaataagtttcgcacgctgtttccggagtttgctgatccagccgcttatccggacgtgcgcctgcagatgtatttcgacattgcgtgcgaattcatttctgatcgcgattcgccataccggattctcaatggcaaagccctggaagcgtgcctgtatcttctgaccgcccacctcctgtcgctgtccacgatgcaagttcagggcgcggctggaggtggcgtcaccgccggtggaacccaaggcggtttcatcaccagcgctacggtcggcgaggtcagcgtggccaagctcgcgcccccggccaagaatggttggcagtggtggctttccgggacgccttatggccaagagttgtgggcgctcctcagcgtcaaagcggtgggcggattctacatcggcggtcttccagagcgccgaggcttccggaaggttggagggacgttctggtgatccctggtgcgaatcttctgcgaatggccttcggggtcatcggtactcaaattgtgaaatatcgcaagtttgagcagcgagtgaagaatgatcaagcccagtatgtctccatgttcggggagcctttcgacctggcagcgtctgtccagcgagtccgacgcgatcagtatgcccagtttaatctggagttccaacggaattatgttatgatcttcgccaactttgatatggttgacttggatcgcaatatggccggtgaccagttcctctggactggaagagtttttcagctggagtctcaaggctcctggttttatcaggacggctggggagtttgcctggccgtggatatcggtgcggccaagttcaccgatgacgggaaaccgactttctaggtggtgtatgtttgacggcgaactgatagcgaaaatggttgtcgagctgaatgcggcgatggcatctgctcaagaggctttgcagttcccggattttgaagtcgtccagaaagctcagccgacccaacaggggacgtcaaccaggccgaccatctttttccagaaactgtttgacattcctcgcggctggcctgccaccgattggtacctggacaacacggcccgcaaatatgtggaaataactcgacagcatgtagagacgactttccagatcagttcccttcattggcagaatcctgaaatcactcacgtggttacggcttctgatatcgccaactatgtgagagcttatttccaagctcgatccacaattgagcgcgtaaaggaactggacttcctcattcttcgcgtgtctcaaatttccaacgaggcattcgagaacgacaatcaccagttcgaattccacccaagttttgacatggttgtcacttacaaccaatatattcgcctgtacgaaaacgcagcatattcggccgatggggtattgataggcatatgagtctgaggcgcgattcagagctaatcgccgcgcacctccagatgttaagagccatgcgcggcaggtccgtttcagccggatggtattccacggctcgatatcctgacaaggcaggcggatcggtcggaatacaagtcgcgagaatcgcacgtctcaatgagtacggcggaactatcgaccatccgggcgggaccaggtatattagggacgccattgttcggggccggtttgttggcgttcggttcgtcagaaacgactttccgggagaaaccgaggtaactaagcctcacagaattaccatcccggctagaccgtttatgcgatatgcttggaacttgttttccgcagatcgcgccgcaatccagaaccggatagccatgaggctggccagaggacagatcactccagatcaagctcttgcccagatcggcctggcattggaaggatacatagccagaagcatcaggaccgggccatgggtggctaactcagcatctacggtcaggagaaagggattcaacagaccgctggtcgatacggcgcacatgcttcaatcgattagcagcagagtaacataaccaggagatcatccagtgatcagtcagagccgttatatccggatcatttcgggcgtaggcgcaggcgctccggtcgcaggccgaaagctgattctgcgcgtcatgactaccaacaacgtcatcccgcccggaatcgtcatcgagttcgacaacgccaacgcagtcctgtcatacttcggcgcgcagtcggaagagtatcagcgggctgcggcttatttcaagttcatcagtaaaagcgtgaattcgccgtccagcatcagcttcgctcgctgggtaaacaccgccatcgcgccgatggttgttggtgacaatctgccgaagaccatcgccgatttcgccggcttctcagcaggggttctgaccatcatggtcggcgcggccgaacagaacatcaccgccatcgatacgtccgccgcgacttctatggacaacgtggcgtcgatcatccagaccgaaatccgcaagaacgctgacccgcagctggcccaggctaccgttacctggaatcagaacaccaaccagttcaccttggtcggcgccaccattggcaccggcgttctggccgtggcgaaatctgccgacccccaggacatgtccactgccctcggctggtccacctccaacgtcgtcaacgtcgccggccaggctgccgatcttcccgacgcggccgttgccaagagcaccaatgtcagcaacaacttcggttcgttcctgttcgccggtgcgccgctcgacaatgaccagatcaaggccgtgtcggcctggaacgcggctcagaacaaccagttcatctacacggtcgctacttccctggcgaacctcggcactcttttcaccttggtgaatggcaacgccgggaccgccctgaacgtgctgtcggcgactgctgccaacgacttcgtggagcagtgccccagcgagattctggccgccaccaactacgatgagccgggcgcttcgcaaaactacatgtactaccaattccctggccgcaacatcaccgtttccgacgataccgttgcgaacaccgtcgacaagagccggggcaactacatcggcgtcacccaggccaatggccagcaactcgcgttctaccagcgcggcattctgtgcggcggtccgaccgatgcggtggacatgaacgtctatgccaacgaaatctggctgaagtcggctatcgctcaagcgctcctggacctgttcctgaacgtcaatgcggttccggcgagcagcactggcgaggcgatgaccctggcggtgctgcagccggttctggacaaggcgactgccaacggcacgttcacctacggcaaggaaatcagcgccgtccagcagcagtacatcacccaagtcaccggtgatcgccgcgcctggcgtcaagtccaaaccctgggttactggatcaacatcaccttctccagctatatcaacagcaacactggcttgaccgagtggaaggccaactacacgctgatctattcgaagggcgatgccatccgcttcgtcgaagggtcggatgtgatgatctaatggtttgcggcggactcgatccgccgcaaccttccataaatggagtgaggaataagcaatgatcaacatttctgcgttcggctcgatctgccagttcacggcaagcagaactttcccgaacggattcaccgtcaccgagttcgccgacgatgccgatcccatcgacagcccgccgttcaccgctgccgataccggcgtcggtctcaacggtgacatggtagtttggaaccgggcgaacatcctggaagtagtcgtcaacgtcattccgaataccgagggcgagcgcaacctggcagtcctgctggatgccaaccgcaccggaaaggacaagtcgggcgctcgtgatgtcgtcggtctggtcgtggcgatgccggacggcagcaaaatcacctgcaccaacggcacccccatcgacggcgttctgatcaacgcggtggcaagcgtcggccgtctgaagaccaagccgtatcggttccgatttgaaaaagtgatcaaagccggtactagctgatgaagaaaattccgctgacagcagtccccaatcaagcgatctcatttaacgccggtagcagctattggaagattcgcctgtaccagaacatggacatgatgaatgccgatatcagtcgcgacggcgtgatcgtttgccatggggcccgctgcttcggcgggattcctcttctccagtacagccatcagtaccgacctgactatggcaatttcgtcttcgaccgcgacgccgattggacgttgttcggcgacggaatcaacctgttctatctggacggcgccgaattcgcagagtatcaggcgctcgccacgaggaaagaatgagcacatcaacgatcagaaccgggacgaacaatgatatccttttggacgacaatggaaacatggtcatcctcaggggtgtcgaagcgtgcgcccaggacgttcgggcggcgatgctcatgcgcaccggcgaaaatattttcgatgtgaactccggcgtgggatatttcgaatacatcttctcgccgcagaaaagctatgatgacgctcgcaaatccatcgcggatgcaattttgtcctcgccggatgtgaccggcatcgagcagctggacatcgacatcaccggggaagtcttcggcgtcgatgcgaaagtcatcaccatccacgggcctgttaccacaggagtttgaaatgagtaccatccgcatccaatacgccaacggcacccaactgttcctggacggcaaaaatccgccgcccctggacccgctgccctcgtttaacccgtctgtcgaagatctggaaggcctgggccgcgaaaagaacaccgacaagggcgactcctcgccggccggtcttcccgttcccccggtagacgtcgattccaatgtcgacaacggcggaaccatcccggctccggtatcgaccgacgctcctgcggccgaatcggccccggaaggcgcccaggaagctcctgcagcaggccaaggcgacgagaaaggcgccgaggaagccccgactaccgccccagtagaaaaggccgaggaaacggcctcgccggccgctgaagaggcaaccccggctcccgccaaggccacctctcgcaaaaccaccagcaagtaaggactcgacatgatcaacgtcagcggcttcggcacaggaattgtaatagtttccgcctcatcgttcccgatggggttttccttgtcgaagttcgctgatgatgagagtccgatatcctccaaagagctggagccgttcggatatgagatgctttatgacggcggcctattcgcctttgacaaggctgctcctctggaagtatctgtatccgtcatcgcagggagcgaggatgatattaaccttcgcatccttctcaattccaaaaagggatcattcagatttcttccgggaatcatcccggacatgacgactctcgtggccactcttcctgatggcggccgcaccgttctgtccaatgggaccatcctcaagggtccggccatcgacaccatacagaacaccggacggcgcaaaggcaacacgtacacttttgttttcggtagctatcttggcgcccagactgcgcgtcaagccatttctaacgttatccaatcggtactggaggtggtctgatgttagggattttcaccagcctcctaagttcgcgatctttttcgattgtggaccaaaacacaaaccagctagttgctgcggatttgaggataagccgggtcaacacccggttttcttctgtaggacaacgccacatgctggaagatggtacgaccaagatggattccagaacgatccaccctatggaaatcatcgtcgaagtattttgcccttcaattggtgtcgtcgatcagatcaatcaattgctcctggatcgcgacacactgtacaaagtcatcactcgcggcatggtattcgaacggatgatgtgtaccagcgaagcgctcaatcagactccggatgtgatatcggcgactcctgcacggctgacattctcccaagttctcgtccagaatcccaagcctataatgttccgaaatgcaggggactcttctatgatcgaccgagggctggccctagctgaagacgtggttggctcggccggcgatctgttcgactacgcagtgaacggcgtccagaacgccgcagacttgttctgaggtgccaattgaactctttcctcaagtctattctcaacacgcctactctcaccatacgcgatgatgttaccaaacttcctgtctggaagagtcttcaagtcaagaaagtggaaatttactcgccggcttccgtagtgtcgaaacctctggcgacgaaagaccagacggaagctcaagtgtacaccgaagctctggacattgatgtgaagaatggaaagatcatccaaccggtgcgactccgcatcaatgctatctgtccggacctgtccaccgttgaaagtatcatgaacgctttcaatgataacacctcgactttcgctatcacttctaagtcgatattggccgataaaatggccatcatgacgctcgatgtagatcagtctccagacatgttgaacgcggctgagatcaatatggaattcgagcaggttgagcctccagtattgaataaattcgatcctgcgttccctcaagatagtccgacttatggggtacagattcaatctctttctgatgctaatttgctggattttggcgccatcggcgattcgatatcttcggccgcaaaatcgctatataatcgcgtgaccagctacttctgaggatgtatcatgcttgaaatcaatcttcccgatggccgtcaaactcgcgtacaaatcgaggcgtggtcggcattggatggctgggaactccagcgccgtttcgtcgaattcgctgtcagccaagattccgacttccgccgctctttcaccatggaaatcctgggctatgcgaaagtgctgcttggcgacgatgacaccggcattccgctgaccaccgcggcagtcatcaacaaccacctcggccactggaagaacgtggaactggttttcaactctgttctcaagcacaatggcatcgacccggccacgcacgccgaccggccggactattgggaacaagtcggatcgcagatggccatcgcatttctggccgaggcgtccaagctcattggtccagcaatgaagatcgccgaaggactcgccaacaagccggagtgattcatgtctagtgatttggatgaattcatacttcggtatgaggccgatactgccagagccgagcgcaatctggagcgcctccagaaccagatcaggcgcgtgaacagcgcatcgacgagtggccttcaggatttgcgccacttcgcagacggcgcggccactgaactcggccgagtcgttccgcagatcgattctgtgacgagcgcgattcgcgggatgaacgcgcaactggcgataggcgccactggcgtggccctggtcgcggccggcgtcaaggcgttcatgaacaccagggaccagtacaatcagcagcgcatccaggcgatggacatcggcatcgccccggcacgcttggaagagtaccagagaaaattcgttcgccagtccggtggaaccatcagccgcgagcagggcgcggagatgaccaaaaatctggcagacactttccggcgtgcttatcgcgatattgggcgagtcggcccggaagcgcgaattctgcgtatggccggcgttgatgtcgggagcttccaaaagggcatgcgcccgctcaacgacatcattactgatctggccacgaaaatggccaagctgaagccggacgaaatttctgcctacgctgatgcccttggcgtctcgcgagactacctgagcaccctggctaagatcggcccggccatgggaaaagtcaccgagatgacgactgcggaactccagtccagggtccagggcgagtccaacattcagaaattcaacgatgctctggcgaatctcaaccagacgttcaccaccctggaaaaccgagtcggcgaaaagctcgcgcctgcgttcaccaagctgatcgaaatcatcgacaagatagtccaggctattcccaatgaagtggaaagcttcgcgaaggacaccaaatcccgttgggaagatggagtgctcgggaaggcgaccgttggcagtgatatcctatccctcctcagccccggcgccctgctcggtcgcctggcagcgtgggggactcgtcgcggcatggaagaatcagggctcatcgacaaggacaaggttcccggcgctcaaaccagcgaagacctggccaagaaacaagaagaccaggacaaggctactaagtccatgaaagagctagagaagctggctgaccagaccacgaagtctaccaatgattttgcggtggcgatcaacatgttcagtggcgcggtatcgtcgttcgcgaatgccgttgacgagcgccaagcttgggcagcctgggcgggggaaattggtcgggcggtcggtatgggaagcaccgcgccgacttcgcgggcaaccggcgtctatccgcacgcgatctatgatcagtcgaagagtggcgcggccggacaagtcttcggcgagccaatcggcgcccagtctcttcgcaatcgcatgttctcgccgcagcgcaaggcagagccggtcaccgttccatcgtacatcaacgatatcatcaaagatgcttcgaagatgtacaacattcctgagctggacatcaagaaactcatatacaccgaaagccgattcaacgccagggccaccagcgaagccggagcgaaaggcctcatgcaactgatgccggaaatcgccaaggcgtatggtatcactgacgtatatgaccctcgccagaacatcctcggcggaacgcgcctactgcgtgaaaacctagatcgagcaaatggcgacatgcggttggccttgacatactatcatggcggactcgatccgaagaactggggcccaaggactcgcgcatatccgggtttggtaatgagcgctccaatcgagctgatggaagaggctcagcgcaagcagaaggctgcggccatgaccgtcgccaacgagacgttcgccccggaaggcggcgacatggacattcgtccctatgatggcgggcgactggaaaccccagaccagggcaagaaggaagatgagcgccgcgaagcccgtcgatatgacgacagggttgtgcgaccggaaattcgcatcatcgaccgcatgccagaccgcagcgacggcgaaatcctcaagatgtctagacgtcaagaggccgaccgggcagattctggattccggaagttcccgaatcaagttcgcggcgagaccaagcagaacatccaggctcaactcactgcaggagccatcgcgcaagtgatcggcgttaaccccaaccagatcatgcgccgcgaaatcagccgttctgacttgctgttcggatacaaccaagccatcctgggcaagcaacaggagatcaaggccgccgcgaccgaagccaacaacgtattcctgtctccagccaagcttgccgaagccacggccaaggtgaacgccgcatcgcgagaaatggatattctcaggacgtacggcgagcaacttctgaagagcgctccagagcgcggccaggagctgaccatcggtcggatcgacatgttggtcaacgtcaccggcgcgaattctccggaagaggctcgtgagatattcagcaagcagactgcagaccagctgactacggcaatccaggacgctcaaaacgattccgcaactaagatactctactgatgaaaaagagaattctgcgagtaacattcaacatgccttatggacccgaagtcatccgcgaagatctggatgttcgggtccggattatgaaggctgcgttgcggattcagaaccgggcgacgatggaaattttcggcctcaccactcagctgcgcgagtctcttctgtcgcagttcaccgcgtggaagcaccggcaacgtcaagtgggcagggaagatgaattgatgatcaaggtgtcggtggaagccggctactctgaccaggggcgcgagcaagtttccagagtctttgtcggcgaagttgccattgtcgatatcatttctccgccacctgacattggaatccgcatccagtgctataccaggcaaatcgacaggacgaagaccattcggaatatgccgcccgccaacacgacgtttgtcaagttcgtcgagtggggcgcgaacgaaatggggttgaacttcatctgcgataccagctacaatgatcaagttttgaagaatccgggccgttcgatcactgtcgcgtcggcaatcctggcgtcaattcaggatatgtacatgccggatgtggccgcgttcgtcgatgatgacgttttgatcgtgaaggatcgtgacaaagtcattcgtccggatgaagtcgccaacattaactcattcgtcggcatcccttcatggtcggaatggggtgtggaatttcaatgtctgtttgaaccgtcgattcgcgtggctggcggtgtcgcggtcgaatctctcatgaatccaagcgtcaacggcaactatgtaatcaccgctctagagtatgatttggccagtcgggatcggcctttctatatcaaagtcatggggagtccagcagcgtaatggccagggaaatcaaatcgttcaatatgttcggcgtgcactacaactcgcggcaattctctgcggtcgatggactcaggatgatgtcgggaatccatgatgttccgccggaagaattgctcaaagggaccgacgtgctggcccatacagaggaacaaccggaaggcgtttggcttcccttgatcgctgcgaacataaatctttatgtcattgaccgggcgaacgtaatcgctcccgtacaagtgcttgcgcttttgtctgaactggtcatagattggaactttggcttcctcaaagattggacaggggtcaaaattccagcccgatttgtcgaagatatcaagagtgtaaaaacagcccattcaccttctgtggtcgcaagtttggtggcgaatgggtcagcttctatgcgcgagctggaagaatattattcgactcaagatgcctttaagatgattgacatcatgacggcgaagagcgtgaatgaggctctagcgtccgaagcatcacagaacagaatcaaaaagggataattcctaagcgagcctgggaaggctatactagacctgccaaatcagaggctttcccatgtccaatattcctttaacatcagcaaaatctaccgacagaacgcgactgatcgccgctcttgacgctcggtcgcggcgggacgcgctcgactttgaagtcatgattcccgcccaggttgttcaatatgatcggaccgaaaatatcgctacaatccaacctctcatcacctgggttgatacggaacacaatgccgtccagaggcaccagctggttgatatcccggtgatttccatgggcgctggcggcttccacataagtttcccgatccagcagggggatatcggctggatttacgcggccgaccgcgacacctcccagttcttggagtcgctatcgatgtcgaagccgaacaccggccgcatccacaaatttgagcatggtatgttcataccggacgtattccgccgatataccatcaattctgaagactcggcagcgatggtcatccaatcgactagtggagcgacccggatttccattcgcggcgacaacatcaagatcactgcgccgtcgaatgtcaccgtagatactccgcaggcgaatttcactggaagtgtgactatcgccaacaccctggttgtaaacggcgtcaacgtgaacaaccacggccacctcgaaaacaatccgcctgatgcccggacgaaaggcggcatgattgcctaaggagaatttcatggctagttttgatttttctgatttaacagcgggggggggttgtaatggctaattatgactacatagtagatactggagtcatagtcgccgataccgctgacgttttgaaagacgttgaagcggaattcagagcggccctcggcgccaatatcaacctggcggcttcaacaccccagggaactctggtcgcggctgagaccattgcgcgttctagcgtgatgaggaatgaagctcgcattgccaacaccatcaacccaaacgtttccttcgggacgttcctggacgccatctgtgcgctgatgggaatcgagcgcggctctgatctttcgacgttcggctatggcgtccaagtgaccggccgcagccagacccgaatttccaccgggtcgcgtgtgcagactccggccggagcgattttcacggtcatgagtgacgttctgattccggcaaccggagtcgccaccatcgacgtaaaatcgcaggaatatggaaacatccctcttcccgtaggaaatctgatcatcatcgatggaaccatcggttgggccggagcgaaagtaatcgcttcaactcgcgtcgatcctggcagccgccaaatgaccgatgcagaattgaagaatgctcgcgtcaatcgtttggcgatccaaggtcgcaactcgactttggccattaaagcgtatgtcagcgccgtacccaatgttacctcggtcaacgttatcgaaaacaataccggcacggttcaagttgtcaacggcgtatcattcacccttccgtatgcggtctgggtctgcgtcgccggaaatccggataaacaggctgtcgcagatgctctgtgggcagcccacaacggcgggactccctgggactatggcgcggccaacaacggcgtcccggtggatgggcctactggcgttcctgttcgcgatccggcatccggtcgaaagtatgtcgtgaagtggactactccgatcatgtatgacggatatgtaaacgtcaccgttcagcaaggctcttcctcggtcgctccggaagcaatccagaacgcagtcgtgaattacgcccaggggaaagtggagggtgaagagggattggtcgtcggcgcgagtctgtctgcctttgaagtggctggggctatcgctcgcgagattcccggtatctacatcaaactatgccaggtggcttgcgtcccggctggatcgccggccccggctcccggcgacttctcgcctgaatacgtcatgagcgcattcggtcaggctaccatttcggttggtaacgttagggtgactttcgtatgactctgcctgcgtacaattctgatattcaacaggcgctgaagtggctccacaaccaggcccctgggatcaccggcttggttcagcgaaaggctcaatggtatgatcgtttcagccgtcagttttgggtgaactgggagcgcgacgttttcaacttgaagactgccaacccgttcggccttatggtgtggtgcatcatcctcggcacgccttcgaaaggcttcggcctgtatccaaaaaacagctcttgggcgttcggtcggctgcgccagaacttcgtttatagcgggaatcaggttccgccgcctgcagacgcatcgccgggcggcaacttctacggtggcggcaatgccgaaatcctcaacttggacgaaatcaggaaagtgcttcagctaagatatgtagcactgatttcgaacggctcgattgcatatatcaatcgcatgcttcgctacatattcaacgatgatgagccgtgggacgaggcgaccgggttgtacttctatctcatggactcaaccggcgagaatggacctgtggagaacttggccatatatcggaaagattgggaagggatggttttattgtctagctcgcccaggacgaaccatgtgctgatatcgacccctgccagtgacgctgattggcctggtgtcgatccggccgcgagcggccgtccggtaacggtcgaaacggcgtccgctacggccccggacggctccgctacggtgtgcaagcttactaagccggccgggagtaccgcctacgtctccgcgccgatagatgggccgctggggtccggtagcactgtaacgttttcgttcttcgcgaaggccggatccacccgtttcattgcaatccagtcggctgccgatttccccagtcgagccgatgccgttttcgacctggattccgggaacgtaatcagcgatcagatgctggacagcagcgtggtaagcgcccgaatgattcgtctggaaaatggctggtggcgctgcgttctcacgaccaaaaccgtcagctcttcgttccgcgctgcttacgtcgccccggcagaaaccaacttcagctggatcgattcgaattccagcacggcgattgacgtgcttatctggggcgctcagatcgaactgggtgatactccaaccggatacttggagactaccggggcgcccgtaaccatcaccgattatgttttgcagaacacccagaccggaacaatcaagttcacacagccccttccgactggagcagaagcgtattggactggagactggaaaggcgggtctgagaccgagccggccagattcgcagtaggggatgggactcaagatacattcaatctgtccagccctgcatacatcggcctacccactagtggggcgttcaagctagaatacagagttggtccggcgcttaatttgtcgccgcaattgatcaacctcatgaatgaccgggcggtcggtatcatgccgacttgcgccggttgcgatgtaaaagtcattcaggagtaatgacgtgatcacacccgaactgatacccagtccgtttgctgcgcagggcgacaaagacccgatcccgcagacttcttccactggcttcgctaaccttcgcgacggctacacgccggactacgaaatcagcctggcgtcgaacaacccgcaggccaaagcggtcgagcgaaagattcaaaaccaactcttcttcatcgcgacccagaacgcacaggcgtggcagcggcaaatggcgccgccgtggtttcagggcatgcctggcggctatgaacagaatgcagaagtcgtgcgcgtcggaaatgacggcataatgcggcgttatcgttccatggtgaatgccaatgcgagcgaccctctcagcagcacgacttgggaagagcaacccgcatggtcggtgatgcgctccaacatcccgatgccggccggaggctcaggcctatcttctggcggagaagtcatcacgaccggccgcaacttcaacgacctgttaaatgggacgtgggagttcttctctgattcagtggttgtcgcttctcagaatgcccccgtatatccggcttctgctggtgccgctgctggcatgttggaggcgaaatcttgggtgtccggggccaatacgttctgcgtccaacgctacactgatcgcgtcgggaacgtcgctgtgcgcgggcttaatgccggagcgtggaccaactggatgtatgcggtaaacgtcatggcccttcaacaaggtcgggtcacctatggagtcgcggccggatcggcgaacgcttacacgttgacgctagttccgcagctccaaggcggcctggtggacggcatgatccttcgggtcaagttcaacaccatgaacaccggcgcctccaccatcaacgtctccggactcggcgccaaggccatcgtcggcgcggccaacttccctctcaccggcggcgaacttggccaaggactcatcgctgagcttgtattcgacgcagcaggcgaccgctggagaatcctcgcaggcgcgccacgcatccaagttggcaacgccgatcaagattaccaggcccccagctggaaacaggtgaaggattacgtcgcgtcccaaaagctgactgaagtggactgggctgacgtcgtcaacaagccgaacgtcgctatccaagacaccacgccgtggttcgccaatctggagctgtccgatgctcggcctttcatcgatttccacttcaacagcaaccgcgccaaagacttcgactatcgctttatctctgaggctgatgggtcgatggcattctattctcgccaggggtctgccagtcctacccaggacatcctgttcagcaggtcgaatgtaacattcctccagccgcgactggatgttgcgaaaaacctcgcgtacatcgccaactctggtcccctttggcagaacaccactgccgatcagcctggttggaaattcaccttcgcacaaggtgtggacgccaacaacaacgcggttatcgcagtcaataccaccaacccggacggctcttatcgctcgcaggtcatgcgatgggactgggcgtccacgaacgtcatattcaacaaccgtccgctcttcgccggtcaatacaccccttgggattctgggaacttcaatccttccaccaagttgacggtgaatgccgtgaaccaaatcgccggcccaaccgggattcggaataccaacggcaacaccggcaacatgaacacctggggttccggctccacgacggcatcctatggcaatgctgccattcaaatcttcggaaaagggggcggtgagcctgccgcgatctatttcgacaactcccagaccggatggtatctgggcatggacaaggatggacagctcaagcgggccggctggtcgctcggcaacaactcttatgtcatcacagatgaattcaacatcagaaaccatatcaacacaatggctgcgcgcccgatttgggggaatgtcgagttctggggtccgtggaacttcgatccgaatcttaaactcactttgaacgctttcaatgatagctcattcaccaggatgaccaacagcggcgcgaaagacgttggtatcgcgtccatgacgagttatgctgatgcggccatgtcattcttcaactatgaagcctcgaatccgaccgggccgcgcgcggccgttatttcgttcgtgagaaatggatcgcgtggagtgctattcggcttggattctgacaacaagctgaagtggggcggatattccctaggggacgtcgcgttcgagattgccgactccaacaacctcatgagcctgtggtcatcccacgctgccgcgccgaactggaacgggcagaccatctggaggtcgggaaacttcaacccagacaccaaggcgactttggcagctcgcaatacgacgtcatcccctacaatattcagttatggggcgtccggaatcgcatcaaccggacaggtcggtgcgttggttgtggaaaacaacagcgtcaccaataccgcagccgccatcacgttccattcgccgcagaaatatcaggtcaacttcggcctggatgcggacaacgtggtaaagatcggtggcggcacaatgggcggcgtagcatatcccatcatccactccggcaactacaacaactacatcaaccaggcgctggttcaggtgggtcttggcggagtcggttcctatggaattttcgcggttctggataatgccgctccaaccgcaaccgttcaacccggagtggtcgtggacggttccattctcatctactcgtcttgcgccgcaaactacaatagcggtaaaagacctgccggaacttggcgctgcatgggatatgtagtcaaccgggatgccaacacccctgactccgcgacccttttccagcgagtgacgtaaaatgaaatggacgcggatcagaaacccacgttggctggacgcagtaaacatccacgccatggtgactttcgagggaatcggtgaagtgccgttcaccgccaatccgcaagacgtggaggcccacggaagggccatctacgctgcgattctatctggggagcacggacctatcgccccggtcgattcgaagcgggagaaggccttgcaggacgctatacgagccagggaaaagcgggctatccttcgggatacccgctggcccatagatcgccacgacgagcaaagacggctgggtatcgaaaccacggacggccctgggctgatcgcagcccttgttcactggaggcagcagattcgcgattggaatagcggggatcggccgcgacttcccatggctctgaaaacaatgttcaaaaatcaggagtattgatgaaaatcacgaagggtgttctgatcaccggaaccgggtgcaccacggatcgggcgatcaagtggctggatgatgtacaggcggccatggacaagttccacatcgagtcaccgcgagccatcgcggcctacctcgccaacatcggcgtcgagtccggcggactggtaagtctggtggagaatctcaactacagcgcccaagggttggccaacacctggccgcgccggtacgcagtagacccgcgagtccgcccgtatgtcccgaatgctctggcgaaccgcctggcccgtaacccggttgccatcgccaacaacgtgtacgcggatcgtatgggtaatggctgtgagcaggatggtgacggttggaagtatcgcgggcgcggcctgatccagctgaccgggaagtcgaactattcactgttcgccgaagactccggcatggacgttctggagaagccggagcttctggaaactccggccggcgcgtcgatgtcttcggcctggttcttctggcgcaatagctgcatccccatggcggagtcaaacaacttctccatggtcgttaaaaccatcaacggcgccgcgccgaacgatgcgaaccacggccagctccggatcaaccgctacctgaagaccatcgccgcgatcaatcaaggatcctgacattcgcccaaagaaaaggccgcttattcagcggcctttttgctttctggctttgcctcttcaaccatcttggcctcgaccggcgcggcggactcctcctgagttaccgaatccacatagttccctagtgaactcagaacgccgattaacagcgctcttactaccttgtccttgactgtctcgcctatgatcttggtcagaacggatattaactcttcccggagtctggggctgattcttggccgaaagcgcttgcgatgctctttgcgtttcatgtttagtcctctgtctgcggtcttctcctcaccccgataatggcttggggatgcgttgtgttaatcggaagggtcgggcgctattataacccgtcgaaaatgctcgcgcttaactgtttaacgatacgcaccgcgatactaaatcgccttctttctggccaaggaactctggcggcctggtccggtctaaggcctaatttgtcgacattaaaacgagaaaacccggatcgcctgtaggacaaggcgtccgggtttatttcgatctagtgtacgctagaatcagtggcttccgccccaaccgtccagccagcaatcgaagacggcgtgtctcggcttgtccttggcgccatgggagaagtgcttgaaccggatgacctggcccttgagatgctccctgtcattccagcggcgctgtttctcatcgtgggtcaggctggaggccgacacgttgaaggtgactccaggccacagacgttcgttgcggcagacgaacgcaccgaccattccggacggcgacaggttttctgcgtggctggagcgggccgtgtggccaagttcattgatgaaagcttcattgttgttgtgcatcaactcttccacgtcgatgatctcagcttcatcgtagtcgtatcgcttgactttcacacagtgcccttccttggcagtcgagcgaccgaacttgtacagtccatcagcgcgcttgcccatggaaccttcgaatcccagcattgtgtggcggcgctcgacttcgctgaactgttcgatggaagtcaccagttcctgctcgaccaggtgaatcctctcatagccgaggcagtgacgaaggaagttcacgcgctcggccgccctggctaggcgatcttcggtcggtgcgcgaggatcggtgaaatcatcgaacacatggaaagaccagtccggctcaccgctgtggcggcgaagatcgccggacgacttctggaaaactttcgggtcgctgatgtcgccgcagaccagctcgccgtccaggccgttgaacagtttatcgctgaggtattcgtagatcgattgattgttctgccgcttgagttgacgagtcagcgcctcgccttcgaatacgaagcagcgaaatccatcgatcttcggcgagaaatacatcggcagttggccttccagcagcttcgggtcaaaattcgatgcgagcatgggtttcatacagttctccagaaaagaagcccggcgaaccgggctaaatggcggtaagccggctcagatggtttcgttggcgtggttcagttcggccatgatcgacgcatagagctcatccgactccttgatgaacacgccgtcgtacatgacgcctttgcgatccttgatggtgtcgtaggcagcagcgtagcaggcgagcatggtggtgtcatgctcttccgtcacgtcgaacagagtcatggcggccgataccaggctcttgatggccaacccatgatttccacgtgccagagcgcctgccagatcgccgaggcgctgcaaatcgtcgccgtaggtgggatgtacttcgccgctctcgatgaaggccgacagatgatcgaacagattttcgccgagttgcgcggccatgatcgtggcaaccaccattacgtcgccgatgccatctttcacatcgaccgggttgttctgaacccaggcttcgcatacttctgcgaactcttcgaccaacttcaggaattgatctttcgcagacgagcctttgatcaggttacggtcggaagcccatttaaccaccaggtcgtgaagttcgcggctcatgatttgttcgatgttcattctttcgattccttttggatttgggatttgactgcgttgattatggacgccgtgctctggcgcgatccatccttggtggtgccgaagtagaaggccattaccgacttcagctcggcgaaccaatagccgatgatggtgccgatggcgaccgaggatgtcgggtccatcagagcctcgcggccgaatgtgaagattgcgatgatgatgagaatggagcctgtcagaagagcgaatgtgatcgccgggcgaacgaaatcgttctgctgcgccgcaagcctcctcgcagaatccctgtcggccgcctctgcggcgaactggctaagctcggcctggagctggttctgctcagactgaaggcgattttgttcggcttgaatcgcaagctcctggagacgaacgcgctcggcgctctggagttcggcgagacgcgctagagcttccggattcgcgtctagagcgctagcgaccgaggctgggtcggccttcgaccccagcgccgtcgcgacgatagcgccaacggcggcgcctgcaggcccacccaggagcgaccccagagccggggcagccgcgccgatcttactacctatgtctttccagtccatttcgactcctcaaaagaaaggcgccattacagcgcctttctccggccggtgatttagaactcttcggcttcggtcgcatcgccgacgccaccggcgtcactgcgaggctgttcctgcttgctgtagtccaccttcacctcgccgccgacgaacgacttgtacaggtcggccgcagccttgaagtgatccgggttcttcaccaggccttccagctcgaactggacgccggaccagctgcccttgtcgttcgacatgcctacggtggtcatacggaccaggttggcgaaagtcggcggggtgcgcaggccctgcggggtctgaacctttttctgggacagcgcggtcatgagcttcttcgaggccttgatctgcgaagacgacagggagatcagagcctggccgaaatcgccggtgtccggatcgatgacgatgacgtaatgaccacgggtgtcggcgaagtagtcagacttcttgtcgctgaccgaaccgtcttcgttcggcgcgtacaggcgtccttcgacttccttcaccttggtcgggtctttcatcatttccttgaagtcttcgacgctgatggcacccttgaaaccgccctcggcctcgcgaccggcccagcggatgaactcgcggcggtacgcggccggaatgatcagcaggccggtcttgccgtcgtaaaccttgccggtgacggtgttcaggaacatgccggccttcgcgccttcgatgtacttcgggtcatcttcatcgacctggggagacatcttctgcaaaacctggatgaaggggatggcataggactcggcatcggcgccttcgaagcctgcgccgtcatacgatcccaaatccatgaagtcgggaacttcggtagtcgcgacggcgccgccaccggtggcaactgctacggccttggtttcttcggttgcttcggaagtttcggttttcttaccagccatgttaggctccttgtttgtcgaatttcagttatcgctaactgtgggtttataataacggaagttgcaactaagtaaagcaaattacatattaagatttgctctttttcaccttcggtttcgtgatcttggcctctttgtattcgtgtacgccgatgaaatctggcagctcttcgcccttctccaggtactcgcgaccgaacgcctggagggtctggtaatggacatcgcggttgatggtggcgtcatagccggcttcgatgatggcctcggccgccttcttcgcatcttccatttcgccgcgaccgaattcggccagaaccttggtcttgatgatgccgtcgttgtcggtgtcttccagccacttccagaacttcgatttgttctcttccttgacggaaatgatggccttcggctctacttttaccgtgcgaccgtccgccagagtagtggtcttctgaccaagctcctccaacagctccggaatggtgttacgcttgagggtcttcagctcctcttccttttcggccagcgccttttgaagatcgaggatttcgccgtccagctgcgaagccttgtccaccaagttcagcagtcgatggccgatgtcggtggcttcaaccgccatttcatccatgacgccaaaatagtcgatttcgcccggcgcgttctctttcaagtattccgggatttcaagctcttgctctttcatgtccgcctccaacttagtgatgttcccttacttgaaccaagtattgagtagatattatgccgcatcttccttgatacggctactgatttacatattaaatttcgtcgcgagtgctaacgtcagcctcaaacacgccatcaacgacataacttgccaggttgcgtttccactccaagctgacctggattttctcgtcgatggaatccagacagatcaggtcgaagtacagaaccgagttgacggtgccgattcgatgatttcggtcttcggactgcatccgcagctcgttgtcttcgtcggtcgtgtagtagatggccacgtctgcggctgtgagtgtgatcccgatccctgctgcggccgggttgcccaggaacacctggacgcgcttggcctggaaatcgtcgatcaatttttcccgctcggcctctttggtctcgccgtagtaggtgccaaacgaaatcccttgggcctccaaatacgccttgatctggtcgatttcctgaatgcgcatggcccagacgatgatggaacgctccgggtcttcctccagcagaccctccagaagatcagtaaacacggcgaatcgcgggttgtcttcgggcggcaggatcaccggctcaccatagacgttgatatagccggacgccacttgcttgagcttcgagcgcgctgccgcagcatcgaaagatacatcaagcatgaaatcttcgttctggagaacaaagtggtagtcttcttccacgcgctggtaaacctttcgttgctcaggcgacatttcgaagtatatgcgcttgtacactttgtccggcaggaatgggagtgcttctttcttcgttacacggaaactgtgcggctcgatcagggaccgcagcttgtccaggttccggaataccgggcgcccacactcgtctttttcgaccagttgcggcggcatggtttgcttcccttccagcttgcgcatgatagcgatcattcgaggatcgtcactgggcaccaagacggaaaattcggccacaaacgcccgataggatttagtccccagaattccattccgcaagaattggaactgcatgaacaaatcggtcggtgcccgcgtcagaggagttccggaaaggatgcgacgggccacggccttctcgcccagctttacgatctttttcgcacgcttggcttgtgggtttttgatcctcgttgactcgtccacaattgcgcaaactttgaatgtatcaaggaatcgctcgacctcatcatagccagcctggtggttgattgcgtcaacgttgatggcgaagacgcgaagaactttttcatctgcgaacgtctcggaatacagacggtccaagcgcgccctggcctttttggaagtcggtcggccgcgccaatccacgctcaaagtcttgatcgcgacgtgggtgggaatctcgcgcagaatccagttggtgtggacgcctttgggggcgacgatgagcagcgcgtccacgcgcccctgtaggaagaggcgaacggcatcggccaaagtcgtccaagtcttcccggtgccctgctccatcaggtatgcgaagttccgtttgttcagggacgctgccagggcattgaattggtgctgcatggcctcggtcttcatgcccttgacgggatatgttttggctttcatttgttctccaaatcggcgaggaactgaacaatgttatccagtccttctgcatagctcgcaacttccaccaagtcgcggctgttaagctcgaacaaatcgagcataggattcagcagcagccaatcggttccgatcttggccaggacgaagccccggccaccccagccgatccgctcccgaagaaaagggatttgcccaggttcgaaacatctggccattgggcaggtggaagcgcgtttcggccactcctccaaagccttgaactcgacccagaactggacacctcgacgattcaggcagatcgaatcggacatgccagaccgccgcgtctccagaaagtcgatcaggattcggccgagcgagcgctgcttaaacgcattcgccgctttcgtttcgcgatcattcatcaccttcgccctctttggaaactttctctgcttgcgctgccagctttgctttttcgcgttcggtcaaaatccgcttgacggccttcacgatgaacatatcgattccgctgagcttccagcctttgatgaggaaccaagaacctgtcggcgtcccttcagcaatctgctttccgtattgcagatatttttcaggccgaattctgaaacgtatcggctgatcaaccgagtcatcaacgcacatgatgtcgagaaactgcgactggcccttgtacaccgggtttttcccttgatcggccctcttcttctggcgaatcggttcgttctcatcagacagaacttttttcaccatcttgacaatgaccagaccatcatctccatcgcggatatcccgaatgttccgaatggggtttccggaagttactccaaccagctccggattgtcataagcatgaccccagagcgtgtgagcttcgttcaaatctgcgaattgaacttcagaattcgacagactcgcggcgactttctcccaatcctgaagcgtcttcaggtgggtgcctgccagctctttatattgagccttcagccccttaagatcggccttcaactccttcagatcggccttcaacagtttctccagttctttgtcttggctgattttcgccgaaagaatctgggcttccagagctgctacatcagcagccttgtcctcaacatcctgtgccgatatcgggcaattggccagggcgatcctcgcggccttgacgtcatcacgaaggcgcaggaacttctctgccttcgccgggccaaagcctttggcgttcatgatgccgccgatcaagcgtccatccgccactacccagttaagttcggaatgctccgggtccagggccgtatattctacgccttccttggccaattcgcgaaggatggacacagtttgctggtcgtctttcgccgcccgaagacacgcggccgcgtattccaggcgatgatatcgcttcatgtagcaggtccagtacgtcaccacagcgtagctgaccgagtgggagcggttgaatccccaggcgccgaaagtcaccatttcctgccacacacggtgagcatcgtctggggcgacgcctatggtcttggcaccctcgatgaacaattcccggcgcttgttgaagaactcttcaccctttcgcgcagacatggctttcctgattgccgatgtctgctcccagtcgaactggccgatgtccttgacgatggacatgatctgttcctgatataggaaaacgccgtatgtccctgacagatattgctcgacctgcggaatggtataggtcacaggctcgcggccggccacgcgctcgatatacttggttgccataccagaagacaacggacccggacgggcgagcgccgtgatgtggtcgatgttctcgaacgcggtgatgttgatcgcgtttgctaccgagcgaacggcctgcccttcgaactggaagatgccggacattttgtcttcattgagaacgtccagaaccgccttgtcgttcaaaggcaagtcgtacaactcttgcgcggtcacgcagttcgcgtcctggatgactcccaaagttcgaagtccaagcgcgtcaattttgaggagattcagatattccgaatcgggcttgtcgagctgcgcaacgccttcggaagtcaccgtacagaagtcgatgacttcatcgttgcagaccaggatgcctgccgcgtggacgccagagtgggatgggtgaatttcgaggtcgcccatgcaggcggacgcgatctcatacttttcacggaagtcgcggccgggctgagttttttcgaaagtgtcctccaatccttttccatatcgttcgtccgctgatgtatattcgatgatcgagtttttgatgttgtcggtatcgtggaaggggatgccgaagcgctttccgacgtgagcgataaccgacgcggccttgagtgtgttgatgttacccaacttcacaacgttccaagtgccatacttctgctggagatattcgaacactagatagcgatgggtatcggcgaagtcgatatctatatcgggaagatcggaacgggaaatgtcgataaagcgctggaagagaaggcgatgcgggagcgggtcaacctcggtaatgcccaggaggtagcagaccaaagagccggctgaagagccgcgagccgggccgaccagcatatgcttcttggcgaacgcaaccagatcggcgaccaccagaaagtagctgtcgaagtctttcagctgaatctgcttgatctcttcttggaatcgatcctcatactcctgggtccattccttgatgtggccgcgactgaggcggtaggcttgcccctcgcgagccagagcgacgatatcaccatccaagtggatcatcggcgccttcgccagtttcacatccgccaactgctcgactaccgcacgagtattggcggcggcggcatcgaactcttcgcgagtcatgatgtggcgtaaacggctccacaactcctcttcggtggcgatgtggcgaaggccgaccgattcccgcaccttccaggccgacgcgaaatcagcatggtcgatggacggcatgtcgttgtaagaggtaatcaccaccggctttccgaatgctctggacgtctccatagcaccgtgcgcggcgaccatcgacgcgggattgatgtcaatgtagtcgattccggccagatccagatgggcataggcctcgccagcgaatttgatgacgccgtcagcttcctggaattcttgcggagtcaatccttgattctggaccgacttggaagtcaagcggtagaacttcttggtgtccttggcgagcacccaggctttgagcttcagctctttctcgccatcgtcggcgcatttgatcgggatttccatgccgaatccgcgaggcagttctgccttggcagcggcttgttcccaacggacgtggccccatgttccatcatcgacgatggcgacgaatggggattcgatctctttggcgcgctcgatgatctccgggaatcgaccatatgcggcgccgtaggagtaaccagagcgaacgcggagctgagggaaagacatcatgcggcctccattgcttgatatgcccgatatacgcccatgcgcttgcaaacttcgtggagcagccgcacgtcgtcgagcgcccggtgtttctgtacatatgggccgcagtagtgctcataaagatgctgcagccgcatgcggtggccgaacaacggcgccgactcttccacagtacagatatcgagcgatgggaaattgacttcgtccaggccgagcttgccgcgagccagatcgcaggtaagcatgaacttatcgaatggaaggttgtgagcaatattcgcgtcggctctggaaaagaagtcgcgaactttctgacgctgatcgaggaaagatgggtgcttgatcagatcttcgttcttcaaccctgtgatcttggtgatgatttcctcgataacgattccaggattgcagatgaactctacttcatccaaaatcttttcaccatcagttatcacgccggcgaattcgatgatcctcggctgcttcctcaaactcaccctctggtggaacgggagtcctgtggtctcagtatcccacacggcgaatatcatgtttgttccctcttatgtcgaaagggccggctgctttcgcgaccggcctgaggagtataccgcgacggctgaagatttacgccttctgtccgtctttcggcgtgatacggccggagcgcatggtggcgtggacaaacgccgaatagttgatcgagtccaaggccgaatcggcatccttgaacccgctattcgccaggcgagtgagtttgcccaccatgtgcatcacgaacagggcgagtcgatggtcatcggcggttttcgccaccaggccgttcgggaagaggatttccatgatctttccgtacatcagatcattgcgaccataggtgctctggcggtcgcggaagacttctgctgcggcgtacagattgttgagaacatcttccgcgaaatcatctggatgggaatcatcttcgcccggccagacggattccatggcgaacggcgcggcgtcttcggtcgggtcttcggactgagccgtttcagcgagcggagacggggctttcgcaaacgcctcgtcgagggtaggggcggagttcggggctgccgggaacggctcgtcgagggtaggggcggagttcggggcggccgggaacggctcgtcgagggtaggggcggagttcggggcggccgggaacggctcgcctgccatgtcgttgggcgcgctatcggggtcgctatcggccgcgacggcgaagaacggcgcatcgcaaccttccaggttcaggatgtaggagtcgatccccaggctattgtaggcatcgatgatgtcctggcgatcatcgaacgccgcgacgatcttggtgacgccttcgattttcttcagtatgtcgagcgcgactgcccgcttgaactgaggcgccggctcggtgttaccatacggccgcatgatgagttcatactcgcgatgttcggcgatgccgagttcgcggtggagcttggccctggtctggaaaaagtggttgtcggttcggccggtgacgaagaaaatcatgaggtcggcgtcgatggcattcctgatgcgacctacagcgtgcgggttgagagtgtccttgtcgagacgagaatgatactcgtcccattgccgttccaaggcgaagctcttgcggtggctatcgtcgaatacgcagccgtccaggtcgaagatgatgatgccattctttggtttgcgttccatattcagatttccttactggttgctttctgggtgacggttttatcgatgaacgtcccatcagaagtgaggcggaaaacttcgccattctggatgaaatcgaacgattgcacgttcatcgtgatgcgaatggattcgctgccgttggtcacttcgacttgtgcgatgtcgccaactttctcgacaatgatcttcatgttacatggacttcccattgacggccacagggttggcctcttgtttttccgatccccagaaatcgcggcgcagttcttcctgctcggccgagcgatccatccaggggcgatagaacttgcactggtagataggttccaacggaacatcaatcacaggaatctgacctggctttgtctccagagcggccatgaaccggtcataggatttctgctggatttcctcttcattcatcaccttcgacccatagcgcgggaaggcgcaggagccggtggcgacgcagtgcggctggagcaggctgtcgaacataggatagacttccagaaccagccggcgcatttcgcggaatacttcctgatattcaccctgggtccgaacgcacaggcgaaccttcgccatgtcgctgagagtccgcagattgaacttggccgcgatcttcgtttccatgttggaagggatgatggcacgagcgtcctggagcgacgcgccggcctccagaagcttctggtagctggtttgcgcgtcggcaatggcgtcatgccacagacggttcagctcttcgcggacatggtaggtcgggtcaggctcgccatttaccgtagccggttcgtcgaattcccagcggaaggcttccggctgaacgacggcgctgatttccagagcgcgactggtttcctgctggtaagccccggtacgggtccgaacgagttgatgggtgaagttcttgctgacaccctcgatctggaaaatgaagtccacgaactcgaacggcgagcggatggtgtccagcatgtacttccagtggtcaagcttttcggcctcggtcatggtcgccgggtcttggccgcgcatgcgagtggatttcgtccccaggagaagttcccaggcgttctgggtgtaactgatcagagaaattttcatcagaaatcttccggaattggcgtgaagtggaattttttggttagagccagggccaggccttgggcttgctctttacgaaggccatactgctctatctcttccttgagcagttcgcaggcctccagacgcgactcatactcttcagcctcctgaacggatgagaaaacggttccatcagaggttctgtacacaagttcaatcgacatgatgacctcagtagcagcggatgatttcggcgcggatatctcgacggtcgaggtagtgctcacgaatcttatcgcgggcgcgctcggcctcttctcgactgccgaacgacaggttgaacgaagtgaaaggcttatcgtccaggcgcccatcgccaatcaggtacaggatgcctaccagcacgaaagacggcgctgtctgtcgcgtttgcggcgggtcgatttgcatttcgaggaaagacatgggaacctcttcaggatgatctggtgcgtacattaatagcgctcctgctgagcagctacggtttccggctcatagatgagcatgtcaacgatttccgggcactggcctttcacccagtcgatggccgcgaccagtgtggtggaagcggagaaagagaaagtgcggtaagactcatggatgtacggcgaccccatcgaatcgcgctcggtcgtgcgagaaatgactgctttgatattaacgatccggcccatcttcggcctccactttagcgattatatctgacaggctcagcttctcgccattcaggaaataactggcgcgaaacttcctgtcaccctctggcccgacgatccgggccgttatggtgagactcccgccgccaagggcatcggtgtccctgaagaaagccagcagcgcccgcttgagcgctgcctcgcgaggatcgacggccattaacctaccacgttccagccgtgctgagcgcaccaaaccgcaccggcccctgcaggaaggctattcagaaggaacacaggagtcaggcgaccgtcctcggtcatatgtatgaagtagcgggcgccttcaccgagccattcggccttggcgatagcgcgttcgagattggccttggtggcgtaggttttggtgtggttcttgtcggtggagaaggttacttcgcgggccatttgtcgattccttttggctgaagggtttcgcgtttcgatgagggaatattacgcccacctgatccagaagtaaagcacttttgtaaattacttcacgaacatctgcttggccttctgataagacgaagaagtcatcaggcgctcgatgacgtccatgtccgaaaccagatcatccagaaggacattgcgccaggtagcgaaccggccgagcgagaagatgccagcctcatgggtgagattccagatcatggattcgcgctcgtcgcggccgagaggaacgattttgcctttggtctggatggtcggctcgccgtcctcgattagctgtttccttctgatcccgaaggccgcgcagacttcatccaggtcccatgccggattccattcgatggtttcgatctcaccatcagcattctccaaaacgccattcgcgacggattccacgatcagagtatcgccggtgatggacgcgcgaaatgtcccgaagtcgggactggggaaataaacggtctggaagacgtcacaagggatggaaagcttgtatcgactcacgatgatggatgtgcctttaccgaatgacgggtcgatacccaggtccatccccgccgcagccaggttggcgcggaacggcgcggtgcttatgacattcacatggtcatcttgccggcgaaggtactggaagaaagaggcgtcgaaaggacgactccaagtgatgcggttcgccagcttggcgacaagctgctcatagaagtcggccggtgcgatccaacgcttttcagtcgccagattccagatggaccggtccgacaggccgcccgttactttcctggagtacatgttgcagtggtcgatgcgcggctgggaaatgaattcgccgtcgatgtagatagctttgtgtacagtgacttcgcggaacgggataccggtgagttggccaattactggcgagcggaatcgcaagagtgcgttgtgacgctccttgttctccggcgtcgccgcgtcgatgatttgggcttgagggaaacgatgcgcggcgatcaggccggcgagtccagcacctacgatgatgactttctgatcaggaatcatgatgtgttccttctgagtgtacaaaacttgagaggataaaaaagggacccattttcatgagtcccttgaagagctagacgattcagtctcagaagagcggcggcttactcttcttcaccatcggaaccgtcggcgccctgatcttcaccgtcgtgctcctggccttcatcaccggccttctcgtcatcgccctggccagcttcgtcttccttcgaagcgatggcaaccagatcgacccagcccatgacttccagcttgctcagatagctgcgaaccgaggctccatacagcaggtgtgccactttctcgccaaaagcttcgatttctaccggctcaccgacggcgcagttctcgttgatgtaggcaaacaccttgccgcgaatcgaaatggcctgcggggtgccatggccgtcgccggtcgggatgaagtgggtggcgcgagggcgacgcgagccgttggacttcagttcctcgcgacgggcttcggccttcgcacggcgctcttcctgctcttccttgcggcgctgcttctcggcttcgcgctcggccttcttctgctcggccaggcgcttgcgctcttcttcacgagcgactttctgggcttcctgcgcggccttcttctcttcggccttcttggcgcgctcggcttccttctcggccttcttctgctcgcgctcggcttccttcgccttcgccttctcggcctgctcagcttccttcgccttggccttttcagcgcgctcggcttccttggcggcggccttttccttcgccttctcggcgcgctcggcttctttcttctcgcgctcggctttgcgcttctcttcgcgctcggctttcttctgctcggcttccttggccttggcttcggccttctcggcgcgctcgcgctctttacgttggcgctcagcggccttctcggccttgcgcagggcagcggcttgttccttggtcagctcttcgccttgggtctgttcgttctggtccatgttcttactccgggaatgtttgaaaggatggcttattggcctgtgagaggattatctctaaactaattgaagaagggaatacctttcgcctgaacttctctaaatatttttctttcgggaaagtccagactccagggaacttatttatgttagcgaagtttttaactcttacgcaaaaacaacaagtattcgattgcgcgagttatcccagtatacatcaactgactataagggatggacggcaagttttcttctaacatggcaacccgtttccattctgaaccctgcgacttgtggaacgtcatcgcccagccgaagtcgaatccgccaatagccttctgcgcctccagccgcacgtcttcctcgaccgaaaagctcagagggttgaacttcacccatcgttcatagttcgtgccgataatgcgaactttggcgaacaacatttcatcaggctcgtcgtcatcttcttgcccttcaggaactggcttgaagtccagcagaatggcttgttcgccgttcatgattccatattcgtgctggttcccagtgcacaccagcttctcaccgattcctggctgcacgcctttgtagccgaggattcggcgagcgcgtgcgttcaagcgacggcgagtattgttgtaagcgcaaagaatcacaccatcgttgtccaggaacgtccgcatttcatcatccgacatatcgaagccggcccggaccactatgtcatcatactcgcggcagggcaggcgctttccctggcggacgaacatcgacgcccgaacgatattgccggcgttgcgctcgatttcggtcatgatggtatcacaactgttctcgtggaagatctggacgccgcgcacaggaggcacctggccaaagtcgccgatttccaggaccggaattcggtgcgacaggaggcgctcttcatcccactcgccgatcatggacgactcgtcgagcacgaccaacttcggcttctcgtcgagcgagtctttgttggcaaacatgatttcgccgtcttcatcttcgccaatcggccgatagatgaagctgtggagggtccgggcattggtgcagcccttctcgcgaagccgcgctgctgctttcccggttggcgcgacgaagaccgtccagtccatcgagcagcaaagttcggcgatgatcttcgcgatggaagtcttaccagttccggcgaaaccagcgagtcgatagacctggcggcggtgcgctcgatcacaccaaccgcgataccagtccacaacggaattgatcgcgtcgatctgctgactgtttggtcgaaagccgaatcgctcttcgatctgatcgacggtgaagttagatgctgacatatttgcgttctccaacgctaggtttaattgaatcgaggctcagtttaagcacgccgtccacagaccagccagtatcacgacgatacttgcggccttgcgggtcgacatagaagttcttcgtgcgccgcagcagaacataatgccaagcagctccaagcgcgtggacccttcctttatacgggaaagccttcgcctgctctgcggcctctttggccccagggagccagcggacggtagaaaggaccaggaccgcacccttaatagcctgggaagcggcgcggccgtcctgtgggctatagcgatgtctatcgaagtctacccagtggtggttgccgcgccggagcttgaccgttcgggatcgcccctcgaacaccacagtgccttcgtgagttaaaatatgttccgccatcgaatgttcctttataacgtacagttatgctttacctctgcgcaggaagagtatactatcagctgactcgccaaagcgagcgaatttaatccaactttacttcggcaggaaagtggccgatactagagccgccgcctgtactgccctccaaaacagaggatacattaaatgcaagaatgcaagatttcccgcgaccaactcccggtcggtaatccgaatcccaatgtcgacaagacccgcgacccgaaccttaagcccggtttcctgcgtcgcagccgcgagctggacccggcgctggccgttcgcatccgtcgcgagctgatccacgccgaagcatccgacttggccaaggccggatgggtcaattcacagtccagcctttatggatcgaaagccttcccgcgccattccgtcgttcgcgtgaccggagttccggaagatggagctttcatcggcatgctgatcggcttcatcgagcatcgcgagcatggcgaatgggcggtcatggaagccggaacgaaagaaggcggcgccgtcattattccagtcgatcacatcatgcgagcgtcattcgccgaagccgaagagttcgccgaaaagtgggagcggaacttggggtggcgtctcctgcgccaactccgcgagtgcggcgccctggccgggactgaagacgagttcctgcggcggatcatcaatcgatacgttcgtgatcgcacgatcctcgatcaccacaaagtcggcgcggacaaaacctatactgatgcagtactcaaaagcatcggcgaaacatggccgaagattccttcggggaaattcgtcggacaccgagtcgcgcagctcctgatcggccacaagctaggtcgagcggggaccatcctgaatgacctggtggacttcctggagaagttcgcggccgggcgcgataaaattctcaacatcgccatctgtaattgaggtgaatgaaatggttgacttggaaaagctgagtccaaagctgagtcctcggcagcatgccgttctactggagatgtacaggcatcctgagcatccagttcacagatcgccaacgaatttaactcttaaggctttgagacgaagggggcttgtcgagctatcctggaaggattccgtggctggatatatgttcggtcgccaaccttgctggaaaataactgatgccggcataaggcgaatcctgggagtgctggggaataatatggaaaaagaacaaagcgaagatcgcccaagcatccctgagtttgagaagaccgacgccaacaaactctatgatgctctggagacgatttcgctgctggagaagaagttggacgaatccgaaaagcgcgggagcgagctggccgcgagctattgtgacggcgtagtcggcgatgaatacggccatccttattgtcgttataaagtggaacgcgacgccgccttggccgaagtagagcgcctgcgagaatcaaaaggcgatccctctggcagcttcgacaggtgtatgaagatgatgtacgagcgcgacgagaatgcaaaacgactcgacgccgccttggccagggtcgcggagctggaagggaagttgacggactgggtgcacgaagggttccggctcaacgaggcgctagcggtcgccaaggctcaacccagcgtgccggaaatatctggcatcggtcgcgatgccgaacatcccagagctgtagtgctgtatctgcgtaacgaacccagcgatgaagatatgcgagcaattcagaactttttgcgcgccatggccgcccccgctcagcacagcgtgccgaaagcatggctcgacgttcaggcagagcgccgccggcaggtcgaggcccaggcgctaaggcaggaagtcgcagcactgcgcgcaagggcggatgttgtgccggaggtgttcgggcttgagcggtaccgcgtagaaaaaactgggaagggtttctggccatactgcgtgcgtgcgggggatggaacgcgtgaactgttcgtcggccacttgaagcagtgtcagcgggtagcgaccgaattggctacggcgtttgaagatgggaagtttatcgccgcgcccggcagctcggctcagcacagcgtgccggaggggtggaagctcgtaccgatggacccgacatcgcagatgacctatgtcggtcagtccctgcgttatgacgcggtaaacagcatcggcgagatttaccggcaaatgctcgccgtagctccctcacccatcgatccggccgcgcatcctcagccgtgccagcaaccacaggcccatcctgcccgctgcgggtgcgagcggtaagtgccaagtaaggaattcatgtaatggaacagaagaaaccttcaccagtagatggagtcatcatgaccagcctcgacgttctccggaaagcacagcccgaagcccaggacgagtatgccgtgtccatgttcgcaacggcgatccgccagaaaatgcagcgctcccgcgataaaggccgaggcggctggatcgactgcgacgaagatattctgatcaacggattcgccgaacatgcgctgaagggaaatgagaacaacctcttggacctggcgacgttcctgatgttcatgtgggtgcgcggcatcgacgatgcgaagattcccccggcgctcgaaaaggcgcgacagcacaagatcatggaagcctggagtcgaatccatgaagatggcctaaactccgccagaaaggcgagtgctgcgcgacaattcgtggaagtgcctcgacgcaaggggcgcccggagcgacttgcatgaagcctcacgaaataagactggcacaggccgaagagttcctgcgcgaactcggccgagggattccagacgacgaacgggtgatggtcggctacgctgaagaggccacagtccaaaccgacgagaacggccgcaagctcaacgccggctggtggcctgtgccctggaaggaagggaaatacataaactcccgatccaacgcctacgcttgcatctcgtcatccatcaagacgcccaacccgaagaccggccagatgcgatactggcgcggcgaagcctctttcggccacggcctggcgttgatggtcgatgacatcggctcaggcaaagggtccaagggcgacttcgaccgcgacgagttccgcgagcgactagagccgaccgcgattgtagagacttcgccgaacaactaccagttctggtatttcttcaaagagccgatgtcacacatgctccagttcaaggcgctgctctattcgttcgtggaccaggtgctaaagaaaggcggcgacaacaccgtcaaggacgtcagccgttacggccggatgccattcggcttcaacaacaagcgcgggaaagacggcaagttcaaatatgccgacgaaaacggcaaacccgaactcgtgcgcctgtacagcgccgactattccaagcgctactcgccagaggaaatcgcgcaggccttcggcgtccgcatcattatgccacagatgaagaaggtggagataaaccgcgacgattgggtgtatgaccaagtatggctgaagtatgccgagcacatctgcacgaaatacaagatgggagaagcggcaggcggccaggtccagcagaatatgtccggcaaataccgcatccgctgtccctggggcgacgagcacaccaacggcgatcctttcggcgcatactttcgcggaccgatacctggcgccgagcacgaatatgtgttcggatgcgggcacgatacttgccgcaaagagcatcgacggacatgggcggccttcactgatgaagtcgtcctgccgtatattgtcgaacaacttgaacgcatcaaccgccgtcacatcggcgaggagtagtaactatgcaaaatgatcctggaattctgattaccgccatcggctcattgcttctcggccttctcgtcttcttcgaaggcctgaatggatggaaaataccagcgtcaaactttctcgcgtcgctcctgtgcttcttcgtcggcctttctgctttaacctgctggttcgtcttggcgtttgacgtgttttagtcgacgaacggtccggaaatttcggatagggacggaacttattagctctgccggtttaggtaggagataatagccgtccctttcgcctcaatatgtagaggcggtgttatatccgatcatgtaaagcagaaggcggcaaacctaacatgattatcgacgacgacaacattcttggtgatgataatattcttggtgatgacgaatcggggtccagtgagttcgatctcacacagatagaagatgctggaatggaccctttgatgaccgccgcaagtaaggcggccgatgatgcgattgcgaggaacgaggcgcaccgcgcgcaaaaggcggcaagatacgccgaggcgtatgctgaaccagacttgaggaagcgagcgcggttgttgatgctcgaccaggcctttgatcttccggtcagccggctggtgaaaggaccgttcgatgactttatcaccaagtacagctcgacttcagacagcaactacctcgcggtctatgatacgttgttctgtaagggcgacggaaccgtcccccacccgcacttcgacgagtttcgcggccggctggttgaccaccgaggcgtggcgttcaataacaagaccctcgaccccattgacctgatgggcgccctcgcggctgcggccttggacgatccatcgatcaagaagacgattgaaacttgctgcgtgtgggcgcgtcgatatcgccgcaactctttgatcgaaacgtttgagaagaagataccggagtgggatggtgaagagcggatcgacacgctgctgatcgacttgttcaaaccgttcgacaccgagcttaaccggatggtgagtaagtatttctggctgagcttgtactgccgcatcaactaccctggaatctcagcgccgatttcgctggcgttgattggtgggcaggatgctgggaagacttacttttcaatcttgatctgtaaagagttgtcgagcgaccgaaagttatcgccggtccagcttgacctgagccgtcatgaccagacgccatttttgcgcaatatcactggcaactcggtgatcgcgaacgtcggcgaaatgtccggcttcaaaaagggcgacatggaacgcattaaagagttcctggtgcgatccgatgatactttcgatcagaagtttgaaccaggcgaaactatcagtcgacaatggatcaccatcatggacggcaacggctatgatggtcttcaacgggatgagtcaggaaaccgtcgattttatccaatgttcgtggcgcaacttcccgacgaggatggcaagccgaattgggttaaaccgggcgatggaaatgaaactttccgcgttgacttcacagacttcggccgcaaattctggcaagccatggctgagtgccgcgcctggattaaggcgaatggcgtggagggatatctcagtctagttcgggcgaccaacaacgaagtccagaaattctctatttcggaaatggagaatgcgcgtggcgtggttcgtgatgacacgattgatatgtatctgatcaacgtgctgatcagttgcgagttcgaagagatcaagcctggcaggaattcaaagaatcctggatggagagtcaacaccatcgaaatcctgaaatggttcgatattctcgccaggaagaagccgatttctcgccacttaactccgcacctgaaggcgctaggatttgttccgaataagaatggcttgaatggctggtgcctgcctgtagataaggttgcgcctggatggaccagagatatgcacacgacgttgccgccgttcaatgatgtgcttgtatacttgctgaggaaggttgattctgaggtgactgatgaagaggcaatgattcaaatccgcaaagttaaggccgagcgcgcaaggatattgggtgaggatttctgatgtagtgatggagtgtacttggactaggccgccttcgggcggtcttttctttggtgcggagtacattcgatttcggttgtggccgagtgagattcggaagctatctggtaattagggtttggtggcgatggcgcgttgtggaaagttcgtgaacgttggatcaaggattttgtgcggtgattggatgaattgtggaaaatcgacgattctgactggatttttggggtcggccgcgccggtcttactggtaattaccgaaaccgggaatttgggtcgagccttagtgccgcgtgggcttgaagcgcttattcggatacttcccggtttcggatgcagccgcaaaagtatactacagcgaaaatcga

SEQ ID NO: 31 - DNA, 67697 bp, synthetic construct
  source 1..67697: mol_type = other DNA
cgattgcacaatcctaatagaaaaaatctatcacggacgttacctatctttaaaattaataaaattaatagtaatttggtaatttggtaaactttagtatttgaaagcctcgcggcactaagcttgtacatatcccgtcaagtttccgattccagctagctcgcggcagggtcgccggaaacttccggacttccaatccatgggtcgcggcgacaccacggcggactaagcggcaaggaccaaaactcgacgaacggaaccggaaatttgggagcgcgatagaatcgctcagctggacatatttctaacattcgatttaacactcaatccaaacactcaccaccagcgtctcccgccaaccgccgattcgatcctcacccaccagcggatcgcccgtataacatcctataacaccacctaacactcattcatcatcaaacccacccagacctacagcccacccacaagcagcccatagacgcgatccctggccccatagtacaatcgcgccatactcagtgtcgcggcagagcaccaggggccatccgccaaccaagccaccacgacgactccagaatcgaactccagggacgcagcaccaaatgaccaaacactacagccccgacgatctagtcacgccacaggaattcgcagacccgcatttcgcggcgatcaaccaaaagcgattcgacctgtacatcgacctgcgcgtccaaggttacagctcctggcgggtcttccgggccatctggggcgaggagcatatggacggtcccgcgcaggcccgcatcttcgcgatggagtccaacccgtactatcgcaagcagttcaaggccaagttgaacgcgaccaaaacgtccgacttgtggaacccaaagacggcgctccacgaactcctccaaatggttcgtgaccccaccgtcaaggactccagccgtctgtcggccatcaaggagttgaacgttctggctgaaatcacgttcgtggacgagtctggcaagaccaggatcggtcgcggtttggccgacttctacgcatcagaagccgaggctcagaccgcgaccgtcgctgctgcggccgaagccaatggctatgtgccggaaggcgaagagggcgatttcccgtccccgacgccggaaccgaccgaggaagaccgcgccaaccccatttagacataaaataacggctaaggatttaaggtaaggaggtttatttatgcatccgtttgaccaagctgtggttaaggatcctaccgcaagctatgtagatgttaaagcacgtcgtacctttctgcagagcggtcagctggatgatcgtctgaaagcagcactgccgaaagaatacgactgcaccaccgaagcgaccccgaacccgcagcagggtgaaatggttatcccgcgtcgctacctgtctggtaaccacggtccggttaatccggactacgaaccagttgttaccctgtaccgcgacttcgaaaaaatctctgcgaccctgggtaacctgtacgttgcgaccggtaaaccagtgtatgcgacctgcctgctgaacatgctggacaaatgggcgaaagccgacgcgctgctcaactacgatccgaaatctcagagctggtatcaggttgaatggtctgcggcgaccgctgcattcgcgctgtctaccatgatggcggaaccgaacgttgacaccgcgcagcgtgaacgtgttgttaaatggctgaaccgcgttgcgcgtcaccagacctctttcccgggtggtgatacctcttgctgcaacaaccactcttactggcgtggtcaggaagccacgatcatcggtgttatctctaaagacgacgaactgttccgttggggtctgggtcgttacgttcaagcgatgggtctgatcaacgaagacggttcctttgttcacgaaatgacccgtcacgaacagtctctgcactaccagaattacgcgatgctgccgctgactatgattgcggaaaccgcctctcgtcagggtatcgacctctacgcctacaaagaaaacggtcgtgacatccactctgcgcgtaaattcgtttttgcggcggttaaaaacccggacctcatcaagaaatacgcgtctgaacctcaggacacccgtgcgttcaaaccgggtcgtggtgacctgaactggatcgaatatcagcgtgcgcgtttcggtttcgcggacgagctgggtttcatgaccgttccgatcttcgacccgcgtaccggtggctctggtacgctcctcgcgtataaaccacagggcgccgccgcacaagcaccggtgagtctcgagcaccaccaccaccaccactgaagaagcgacaaagccccggactctagttcagaatccggggctttctttttgggcgccttactcgccagcttcgatgatttcgaagttgtatttgacgccttcgtgctcgaaagtcatcttgccagccgccttcagctgcatgcggaagcggatgtgtttcgaagaaggcaggccgaactcgatgaatgctgcgttggtggaccggaactcgccgcgcttgccttttacagtcacagccacgccatggcgctgggtgcgtttcttggaaacttctgggtctttccaggagttggcgatggctgccgacaaatccttggcctctttggctttctccggcgcgttcttggcctcttcgcgcatcttccggatttcttccagcgcttcctcttcggtgacttcttcttccggcttcagattctcttcctcggccttctcttcttccttcttcttggaagtgcgggtcttgtaaaccttggccggggcttcctcttcctggaaggcctcttcctcggccggcagagcattcaggatggcgaggcagcgacgctcagcagtcttgcggtcagagaagcgcttgacagtcgcatcagcgttgtgagcgttgtagaaagcgaccagttctttcatttctgcgttctggatgtcgccgaaggttttgatggagttggtcatcttgcgatcctctgttttggaagatttcttttgggcttcggtttgtcgcccccgttgaaagagattatgcctaggtcgatgctgcgtgtctacatctatttcatcagattgatcacaaagccgacgaacggttgtcggatgtgaaaacaccgcagagcaggctgcggtgtttgttggtgagggcgatggtcagaaagtcgggatcgtgatcggctcgatgggcggatcgccgggcctgtcgttgtccgatgcgggcgccgggttggacgggattgcgccggaccgaagctccagagattccgactgcctgctcacctgcggagctggaggcgcctttggcgcaggaggagcaggcgggaccggcaggcctggaggcgccatctgcgtcatgggcggttccggaagatcgggaaggcttggcgctatgctgccaaaggaccgctgcgactgctgtgccggattttcgccgaacatttcggcggatcggttgtccttgatgacttgacctatggccgtcttgtcggcgcccggttctgccggatcgaagccagtgaatggagtggttgtgcagcgcatgttcggatgggtcggcagattgttcagggcgatggagtccgcccagacgtacgggtttttatgcttgccagggctgtggctgatgatctcggcaggaatgtgaccgttcctgttcagccatctcgccatctcctgccgattcagagggctggccacgatctggccagtggaatcttcgacgatagcgaacagatcaccgagtttgaatccgatgattgtgtagttggacctggactcgccgacgaaagccagggtttcgatgttgtggtagatatcttggtcttcccagatgtacagcatggttcactcctcaataaggctgcttgttgtgttcgaccagagacataccggccggaactttgaagcggatgtattcgatcatcatcgcggttcggcgtttgttggcgccggattcgtcgttgacgaagagttcgcattggtgcggaatgactcgcgtcaccaggtcttcgcctttcgaaccgtagaacttgatgtaggctgcgacgcctcgcgtcatgctcagatggatcgtttcgcagagtcgctgcgcggccgacgcgctggacagatcggtcggactgaccgtcgcccagtaatggccactttgttctttatcgggcataagctaccctccaatgagaaagcctctgccgaggctggttgttagtcgagccagtcagtcgtacttcctgccgtgaaatgcgtgtccgcagccgaagattgatctgtatgcgttgattgaattcctgttcctttcagattcgatttgaatactgagcatctccagctcgtatcgggccagtccgccccattcgcgctcaatgcgtgaatactcggcctccagttgcctcaatcgttcgctcatataacctccaacaatcgtcattaatcgatcaacccctgccgaaccgcagaggctggttgttaatcgcgcttcagcaaaaccactttctcgtttgcgcgatgattcctgtgccagtcttcccaatagtctccgcactgacgggccaactccagagtgacatagccgtcgtcgctgctacattcgacagaaaggacaatcgcgttgcctctggactcgctgccagacccgaatccgatcagaacttcgtcgccagttttcagctcatctgccctgattactttggccatggcgttctcctattgggtagcgccgcgagggcggatcgggtcgatgtcatgtaagcagatggtgggatagtccctggccagcttgagcttgaagtccacccagtcagcaccgatgagcgccgcgacttcgatgcttactttgcggtgcggcgcagctccagatcgcaggactatagcccgacgccgaacgggatcgttgacgtcaacatgcgtgagtatttcgtcgccgacgagcaactcgcaagccatcaatattttggccataatacactcctatgaggaggcgcgcccaggacgatcccagccgcgccgatggattaacgtttgtgaaggatggacactgcgtccacgtcgaggatgctgatggtacggcgacggcgcggattgctgcgttcatggatgcgaatcaggtcagcggatggcgcttcgtgcaccacccatacatcctccggcttctgcgtccggagcaggaccgtcacttctgtgttctgggcgaggccgttgcagatgaacgtgaacttggacgagggagttctgtacatttcgagattcctttttggacttcgggtccggctcctcagccggtgaagagattatgcctgatcatcgcagtcgagtaaagcacttgtgtaccaattctccagttaaatggaaccaaagcgcggtatcgctgattgctacgctcccacgccatggcccttcttgctcacagacttcgaaccacaagctgatttccattctggccaggactcggccgaaggattcgagccggcaccggctggacagaatgtcgacattcacccgtcgattgatttcgtaccggcgaccgttgatgacgaataccaagcgtagagtttgtccgtccagacattcccagtatctggtttcataccgaagccaatagcgcttgctagcagggcctaccatagtcatttaatcgatgctcctggccgcgccacgcggtccggtcggcgggacgggatcgaaccgacccaggatgtagtcgggccggcgcgcttcctgaggacacacggcgagaaggcgccatcctgcgtccagggcatgctggagttcgtccgtgcagcagtcttccttgagcagcagacgattgatgctctggagatttggaccagggatagcagagccggtgaccgagttccagccttcgataccgtgcaccatctgcggctggttgatgtagccttctgacctgccagccaaccggctcgcggccagctccaggcgctccagcattggccgcagagcggcttccgggtcaacatcgtcccagagcaggaccaggttgatgatggtgtacggatagtccttgtccagatcccaggccgaagcggtcagacggcccaggccgatttcattacacatcacgggaacgtcgttgctccaggtggacggctcccagttccgctcgccaggattcccgattgttacgccttccaggttccccaggagaacgtggagcttgctgacatattccgcctccaaggctttccgctcttcgtcggtctggttgtggcgatagaaggatggagggctgacttttgcatggtagagtttcataactgttcctcggttttggaaggcttgaacgttagagaattgtgtcgcagtatttctcgaaaggactctggcgcttcttctcgcagatcgcacaggtgatttccaggtcgggcagctcgctgtaagtcttgccgaggtacagccagcgcttgcacaggctgcgaccgtccgacgtgaagaaatggactttgcgagcgtcgccgggttgcgcccagccgccctgatagttttcgcgcttgctcatggcgatatttccttttggatcgtggatccatggtgtacgttcagtcacccaaactccatctacatagatcaggactgacagagcagtcgcgccaaacccgaagcctacatagaatgaacctggatcgatttccatggtggcgctattagtggcgctattgcaatcgacttcaaagtcgaatagcgaatgaccaatcataccatcaccatgtcgatttcattgacgaagaaatggacatcgacaccatcggcgctgccggtgtaacgcagccgagtcgtcccatcaatgtgggcctcctcgacgccgacgacttccaggatggtgtcgttgcagtacagtttgacgaacatcttgatgccagagccaatcgcctcgaaggcgatctgcttgtacaggtcttgcttgatcatgctttacgctcctgtttgcggatgtattctgccctggcttcggcttcgagcttcgcccaaagcgcgttgtcgactggaccccagggacctgtctgagttccgtccaccggtgcgaacttgccaccggcgcgacgatacttggacagagttctcagaccgatgattttctcttcttgggaatcgagttggacgatcacttaacatacttcccgaagtagcaggtgtggaggatttccaggcccttggaaatggccttcagcttgataccgaaattcttgatcgcccagtccagatcgtggtgatagaactcgatgatgttgacgatttgaccggcgctgtagtggatgacgcgaaccttgccattccagcggaaatcttcgcggctgtttacggcctcgacttcgatagtgtcatttctgccgatggtccatttggagctagtcatgtcgcaatcctctttttggagcgtttcgcgtttcgatgaggtaactatacttcagtcacctcatcgagtaaagcccttttgaacagattgcctaaaatttctggaagacaaaatcaatcggtcgcgtcatcgatagcgaacgccgagcgcgccaggtcgatgatctctggccaggtcaaagtgaaggttttgccgtcatcgagaatgatgatgggagtccgcagcggctcgccaaccagcagttcgtaggaatgtttctcgctggatgcggagccgatgcgggtgtggagggtgagttaggccggggaaatctcggccgccgtaaaggccgcaatgcgaccgctattcagcctgacgaacaccgggaatgcgccgccctcgcgaatctcgctgatcacgccgtggccgccgccttgcgcatagacattctgtccaacagacaattttttgaggatgtcgctaaaaactacggttttcatcgtcttgccctcggtgatgcccggcgaaccgggcggggtttgctacagcatgcctgctttgcgttcggccttgatggtgtataccgcctcatcgaccagccactcttcagcttccaggtaggctttggcgacttctacggttacgttggcgaatttggctacgttctggattttggcttgcttggtcatttcgatttccttttgtctgaagggtttcgcgtttcgatgaggtaactatacctcagtcacctcatcgagtaaagcattttcttcagattatctgaaaccttttgaagccaggaattgccgccagagccagtcgatgtgttcgttgcagtaacgctcgccatcggacgacatagctaaggcgccatcattgatgccgaagtgggccgcagcgagacattcgaactcgaactggagcgttcctgggcgagggatatgggacatggcgtatttctgcacggtcagtgatcctcagaaggtttcgcgtttgcgatagccgctactttctgcataccgaggcgatagaattcggcctcttccctggccttggccagattatccctggcttcgcacgccagcttgtactgattgttggcattctggatgcttccgtccagactcctgtccagttcttcccgaagagccttctgcgacgctagctcggcctccaaatcctggattctgatctgaagctggcgattcctttcagacatctcgttttcgcgggcgatggagttctgaaggcattcgtcaaggcgagtattttcgcgcaccagctgatgcttttcgactttcgcctttctgcacgtctctcgcattgctgaaagctcactcgcatgcagatcgtcatccgggtctttacgctcttccttcgactccatccgcatatagtactggccggctgcgaaggcgagcactgcctggtcggcatacgctgcggcatcggtcatgtatctggatttgtagcgaggcagaaacttgcactcctctggatcccagaggagactatcggcaataggccagaatttgcggaagccatcaggatcgacttctacattgaccatttgcagctggccggcctccacttcgacttccagaggaacctgaatggtgccggtgatgtactggaagtacactatgctagacataacacaatcctcataagaagttgcggccaggaccatcccagccgcatcgtaatcactcttcgccttcgtccgcgctcagccactcttcgaaggcgaaatttaccttcgactcgacccaatcctgcagctcatcggcgaactcgtcactgtcgatgtccatggtgattcccataacttccatgttccatagcgcggcattcagttcgaactgtaccatctgctcgccatcgacttccaacaggatgcggtctgcgacttcatagtcgtctacatcgaacagatggccgcccgccaggaggtgctggacgaaagcttcatcgaggttggtgacttcgatctggacttgtttggtcattttcgtatccttacttagcggctttgaattgggctttgaggttggcaagttcagctttcagatcgatcatcgcctgaccgcgcaggccttccatttcagcctcgctgattgcgatcttggctgcgcggattttgtcgttgatttgatctttagtcatttcggcttccttttgtttgaagggtttcgcgtttcgatgaggagattatgccgatagtcagaatggaagtaaagtgtctgagtgaagaaatttctgtacaccgacgaacggtcgcgctcgactgtctgctgcggtgtcgatatactcggcctattgcgaacgatggactgattaaatgttcaagctcaatcctgcactgcgagcggtctggcgaactcgtgcccgttacaaagtcatctatggcggccgggcgtcttcgaagtcgcacgacgctggcggtatagccgttttcctcgcggccaactacaagctcaaattcctctgtgctcgccagttccagaaccgcatcagcgaatctgtctacacattgatcaaagacaagatcgaaaactcagagtataatggcgaattcatcttcaccaagaactccatcaagcacaagattaccggctcagagttcctgttttatgggatcgcccgtaacctgtcggaaatcaagtccaccgaaggcatcgacattctctggcttgaggaagctcactacctgacccaggagcaatgggaagttatcgagcctaccatccggaaagaaaactctgaaatctggatcatcttcaaccctaacgaagtcaccgatttcgtgtatcagaacttcgtggtcaaacccccgaaagactcctgcgtcaagatgatcaactggaacgaaaatccgttcctcagtgagacgatgctcaaagtgattcacgaagcctatgagcgcgaccgggagcaggccgagcacatttatggcgggattccgaagacgggaggcgacaaatccgtcatcaacctcaagttcattctcgcggccatcgacgctcacaagaaactcggctgggagccggccggatcgaagcgcatcggcttcgacgttgcggacgacggcgaggatgcgaacgcaactacgctcatgcacggcaacgtcatcatggaagtggacgaatgggacggcctggaagatgaactgctcaagtcgtccagccgcgtttacaacctggcgaagatgaaaggcgcctcggtcacttatgactccatcggcgtcggtgctcacgtcggttcgaagttcgccgaattgaacgatgccagcccagacttcaaactgatctatgatccattcaacgcgggcggcgctgtcgataagcctgatgacgtctacatgaagctgccgcacacgacgatcaagaacaaagaccacttcagcaacattaaggcgcagaagtgggaagaagtcgcgacccgattccggaagacttatgaagcggttgagcatggaaaggttcatccattcgacgaattgatttcgatcaactctgaaacgattcacccggacaaactgaatcagctgtgcatcgaactttcgtcgccgcgcaaagacctggacatgaacggccggttcaaagtcgagtccaagaaggatatgcgcgagaagcgcaagatcaagtcgccgaacatcgctgactcggtgattatgtcggccattctgccgatccggaagcccaaaggcttcttcgacttctaaacatagaaaagcccggagcgatccgggcttcgggtcttactcggtgtggttcctggcgctgagtgtcgacgaaacggcctcgccgacgcccagagcttcctgaccggccgcgagcgcttcggcttccgactcgacgttgaagtcatcaccttggccattgcctggcggaacctcgaccagcacggcttcttcgccttcgaaacgcaggtcataggtcttgtcgacggacagaccgtaacgagcgttgagcgcgtcccagagctgggcctcataggtacgcaggtcttgcagagctttctggtggctgagcatggccatgtcaacggcccgttgcagggtttcgtccaggacgttgaaccgaatgcgaagagcacgaatccgctcgacggtttccgcatccactacatgtctttcgatcattgcttttcacctttgctgaatgttacgttgtagccgttgtcggccaggtaggtcagggcgccttcgaaggaagttccgacgaggtgcttgagcttcatttcgcgttgcgcggccaaccagaatgcagttccggaaaactctgcgcggccttcggacaaaaccctgccatcaggcccggcgatccgtacatggacggaagatagcttgatcggcatcagtgaatacctccactggcttgcgacggcatgctttcggcgcgagcggcttcgcagtccgggcagggacaggcttggcggacgcgctccaactcgtcggcatccatgacatagagcttcccatcggcagtgtcatgtgccatagcgatgttcgggaagtcggttgcgctcaggccggcgacagtgcggatttcgtcccagagcaccagatgctcggcattcagtcgggcggcgagcgcttcgtgctctttagcgacgcgcgccatgaactcgtccatccggaatgcgaattccgcatcgatggcacgggccgaggccatggagctgagtcgaatcggttctttcttcatgatgattctcttttggttggtggttgttagctgctcaggcctattacagcctgagcagcatgatgaagatgaacgcaaggaacgcgaacggcacaagtatgccggacatcagctttgacaggcgctgcatctcagcgtatttctcggtagacattccgtgctgcgccgcctcggccgcgaagcgggctttcgcctcgataacttccgggcgcagcgacaggacatattctaaggcctcttcccgcgctttttcggcctcgaccgacctagggtcgcgggccgagacttcgctgtgccctggcctcgcgggatgggcttgcagcgatggagggagttcagcggccacgactccataatcggcacaggcccaagcgatcccaatgaggatcgcgaggatggactggacgattcgcagcatcactttgtcgctagggaagctcatgatcaatcctccaccgaccgaacgatttccatgttgcggccggcattggtcccggcattgaaggcgcgccgaccgtcgctatcgtccagacgcatgagcttagtaacattagacttcttgtagccaggatcaccgaaatgttcgtgaaccgcagcttccttcgccaccaccagagacgttccggcagaagataccagctccatgcgcttcctggtgatggattgaaggcgatagctgatttcctgggtcgcggccagcttgaattgcgcggcaacctttacgttgaaacgttcgtacccttgagacttctgatactcccggcacagacgatcaacggcctcgaccaaggagttgaacatgttcactgccagctcaacgtccgacttgtagcctttaaagcgtacggcatgaccccagcgcttggtagtgcttccgtcgcgggcactcctggacgccttagccgatgctctgtggttgttgacgccaccggcgaaatccatgatgcaatcattgtacgtcgccacggccaccgagaagaacttcatccagttcgggattgcggaatagtaacgagtggcaatttgctcatcgaactcttcgcgaatctcgccggtcgcttcgaagtcgtgaaggtcatatttgtccttcaatttcttcacgcgctcggctgcgatagcagcttcgtgcggactggaggagtcggccgccatggcggtcagtttgcggatgcggtctttcgccttctcgatggcttccggagtgaattcgttctggtcggtcatggtcggttccttttgtctgaagggtttcgcgtttcaatggagctattctgccttcattcagaatggaagtaaagcactttcttccactatttcggcatcgactggaagaaattccagatccaatcacctgctaccagcaagaggatgagggcgacaaagaacaggacggcggccgcgagctgtgcgcccggcttcagcttgggatggctgagcttgggctctgcgggaacggatggagcgttggcgctgcgaccgtcttctcccaggccgtagccgatgccgcgctcgcgcgcatggagcgacaccagaagtttcagatactcggtctgcttttgcgactcttcgtagatgccggcgacggcgaaccagagggcgaacacgacggacatacacacaacccaggcgccggtcagcaggagggccagcgggccgatgacgaagacggtggcagccaggacgattgcgccgccccagataatgaagccggccagaccattggtgatgtcgatacagaactttttcatttgcggattccttcggttacaggattgaggggatttggaactctgcgccaccgagcacatcggtgacgacttcccagagcgtcggcactgaccactggtagcggtcgaagtcggtttcaggatcgacgcccagcgtcacataggaagtggcaggccatttatgaacgctacctttccgcatgagagtcgccacgcggccgtcaccgagcgggttcgtcttgtgcggaacgtacgcagacatcgaatattgctgcccagcatcaacgatgaatctttgtctctggcgcagacatacagagccaacaggattccaaccgcgaccgccgcaggcctggcgagccgaagaatgctcatacccttcatgagtcatttcgccgaggcaagccgagcgatcttcgtaataattgatgttctccatcgatccaaccagcaccagagactcgaaatcgaatcggtgatcgtgaatggacgagtgatggacgcaacgccggcgcggcaactccgggtgccaaacatggaggcgccctgccgggagctggacctggatgaaccccaggccgtgcaaagtgatcttgtccttcagcggatcatggactgtactcatggataatcctcaatagcagaagtgtatggtgagagttacgatggccaagccggtcgcccatagaagggcgaaccaggccatagcttttatggttatgtagatcatccgaagaattttccggcacagatcgggccgattcccatttcgatggacgcgtggttggtcaactcgcgaccgcagcaggagcattgaccagtcttccggccgtaggcgactgccgattccatcggcttttcgaacatcttcagaacgtcgtcgtgctcggtatcggtgcagtcgcgactcttgatgaatttgccattggtgatacggccgaggtagatgtcgcccaggacgtacaagctaccggcgttccggctgtgagcgctagcctctttcaccacaacgatgagcggctcctcgccttcgccagccaggcgaattttcgggcgcttgattccagattctttcgccttctcaaacgccttctcgatgccggaaatgtccagagtcggcgcagcagcttcctgcgcggccactttctcgcgatacttggcgaagttttcgatggcgcgcttcgcagcagcgatctgattttctgtcaaggagccgtatttatacaacgactcctgaaggctctgagcgaagctgaaggaatttccagtccaccactcgacgatgtccgggtgcgcggcttcgaaggccttaattttgaggtcgcgctcttgcgcagcgctacagattttctcgatgcgcttttctgccgccttagcacggctcttggcgcgctgctccgggctggttttgtactctttgtatccgacaccgccgcaggcgaaacaggcgcgaccataagatgaagggccacggtacaggccggtgcctgcgcattttgtgcacttgtcgcgatacagcttcacttccttccgggagttcgggcgggcgcccatggacacgtcttccagcgtcttcggcgcttcgtcagtgatcgctacggtagcgaagtcatcgcccaggtcttcgaagccggtgaacagattctctgctgcgttcatatcgattctcctgtttggaaagttcgtttcgatgagttgactatacgccagaaatggaaaaacggtagcgatttctcactaccgttcgtcgggtcgaagataatcaatagatgtcgctattgatcttgaacccatgctcagcgccgtcgttgtagtcatactcagcatagctgtcgcagtagtcgttcaaatgctgaatgatgcctagaacgtcgttagcggccttgtgccgtttcgcggcgatggtcttggcgatgctatcgccgacttccagggtttcggccgtccggcgatggatcagtagacgactccaaagatagagccggacgcgacgaattatgtcgcgatggcgctccagtcgtccgtgcagctcttcaatttcttgctcgcgagatttcaccactcgtcgaagctgttgaacttccaattccaaatcggccttagtagccatgttcacctcagaaaggaaaatcgtctgggactccaggaagctcgacgattattgttgagcctgatcggtccagaatgcatccgaccgagccggccctgtggggatagggtctacacgaactataacaggtgacttccaggactatccgccaggtcgatcctccacaccatctacagactggtgggcgcttcgacttcagttttcgttcgtccaagacggcgcgtctgtcgcaggaaaggcagcgcgccttaaccgacgtaaccatgggtatagtcgatcattcggatgagatcatcatcctctgattccctcgacttcagaccgcccaaagagtcagactggccgttgcatttcgcatcgatatccatcgaagacaagaatcctgccgatactacggtgatatcaactttgtcgccggccttcttgaagccttcgcactcagcatcgagggccacaaccgcactcgcagccatgttcacatgacttatgaggtcggggaagatcacgggaacttcacgcgacatgccacggaccgtcatcttcaggactacatacttcatactcactatcccttttgtatgtgaggaaagaatttactgttttccggatggtggaagcgctcggccgcaggcggtcttccttccggacattgaatcgtcgaaggcgggaaaaccgcgcaggcgataatcgccgcgaggagtgcagcggatgtcgacatccagagggcggtttccaggctcacccgaacttccggacggcgcggcttcattcgctccaccctcttcccggttcataggatggtagactgccgccgcgaacccagttgtcccacatgcggttcagaccagtcggtggctggggcggcggactgtagaatccgggagtctcagtgctgctcaggaaataaggcgtgcaaacggcctggacggccagttggtgccgctcccacatcttatcaatcgctcttagcatgacgtcttcgcactgagccttactgtcgaaccgtctgctagtgtggtccggtatctggatgcatccgtctccagtgcaaaggaaagcagtagcaatccacacggtgatactcgccatttcgtcaccctctttagttgatgagcagagtctattccatctgctcgccaggagtaaagcgcttttcgtcgggataaatgccgatgatgtctgcgtcgagcatccaaatgtccacggacggatcgtcgctgctgatttgatataggttgtacagctcccgtccgccgacagcacgctcacctcgcggctcaaccgccagcaccttgccgtgtccttctccgtgctcgtccaggtatatgacgtgatcaccgacttcatagctttcttttgtgacgaggcgtgaacgcgagctgttctgcgattctactacccaggaatccagcacgccgcctttcacgtcgcgaaacaatcttgccgatttgtcgcaatcgaatacgcccagaacttcgccgtctttcaacacgatatgtacgattggcaaaagagtattcatgtttaatctccattggttgataattagagtctaatctgccgaaaagttcccgtaaagaattattttctcataactgattagttgcaactgttaatctgatgtatatgtttgaatctcttttgaacgtttgatgtttcccctataataagcgcacacagccaacaaccacgtggaactacaatgtttaaactttcctggatattcgggcgcaaaaaggataatgctgcctgttctgaatcggcgccggagaaagtcgcacaaatccctcaacacgatccgctcgaccccatgatcaagctgggaaggattcgcggctggaacgtcgagccggagaaagccccggtaattcgtagtgtgaaagatttcctggagccgggcctatctgtagcaatggatagtgcgtatggtgatggaccaactccggccgcgaaggctgctgcgggcggccagaatccctatgtcgtcccgactatgttgcaggactggtacaattcccaagggttcatcggataccaagcttgcgcaatcatttcccaacactggttggtggacaaagcttgttccatgtctggggaagacgcagcacggaacggatgggaactcaaatcggacggcaggaagctatccgatgaacaaagcgcgctgatcgcccggcgcgacatggagtttcgcgtcaaagacaacctcgtcgaactcaacagattcaagaacgttttcggcgttcgcatcgcgctgttcgttgtggagtctgacgatccggactactacgaaaaaccgttcaatccggatggaatcacgcccggctcctacaagggaatctcccagatcgatccatactgggcgatgccgcagctcactgccggctcgacggccgatccgtcttccgaacatttctatgagccggatttctggattatcagcgggaagaaatatcatcgcagccatctagtagtcgttcgcggaccgcagccgccagatatcctgaagcctacatacatcttcggcggtatcccgctcacccagagaatctatgagcgcgtgtatgcggcggaacggacggcgaacgaagccccgctgcttgccatgtcgaagcgaaccagcaccattcacgttgacgtggaaaaggccatcgcgaatgaagacgctttcaacgctcgcctggcgttctggattgccaatcgcgataaccacggcgtgaaagtcttgggtactgatgaaagcatggagcagttcgacacgaaccttgccgacttcgacagcatcatcatgaaccaatatcagctggtcgctgccatcgccaagactccagccacgaagctcctcggcacttctccaaaaggattcaatgccactggtgagcacgaaacgatttcttatcacgaagaactggagtccattcaagagcacatattcgacccacttcttgaacgccactatttgcttctggcgaagtcggaagaaatcgatgtgcagctggaaatcgtctggaaccctgtggactccacgtccagccagcaacaagccgaattgaacaataagaaagccgcgaccgatgaaatctacatcaactctggcgttgtgtcgccggatgaagttcgcgagcgtctgcgcgacgatccgcgttccggctacaaccggctcaccgacgatcaggcagaaaccgaaccgggcatgtctccggaaaacctggccgaattcgagaaggccggtgcacagtcggccaaggcgaaaggcgaagccgagcgagccgaagcccaggcgggcgccgtagagggcgcaggcgacccggttcccgccgctccacgcgggactaagcctctcgcgaaagcggccgaggaaggggccagcgaggccgctgaaccgccgtcgcggccggaccccaaggccgaactgcggaacttgttggtcgatcttttgtcgaagctccaagacctggacgacattaaggcgccggacggcgtagacatagagcacaatgatgcgcctggcgtaaagcgcacgtccaaacctggcgtgtctggcatggagccttcggtgttttcgtccaaccgcatcgtcgggcctcgtgatcattcggaactccagagaatcaaggtgaatggaataaccaccttgatcgaaaatccgcgcggaagcattcggcaaggaaaggatgggagttggcgagttcagatgaaacaccactacgggttcatcaagggaacgaaaggcgctgatggggatgaagtcgattgcttcgtcggtccgaatctgggatccaaacgggtcttcgtcgtcaaccaggtgaacaaggaaggtcagtttgacgagcacaagtgcatgctcggcttcaacaacatcaacgatgcgaagtctggatatctgtcctgcttccgcccaggttgggatggtctcggctccatccatgaagttgacctacccgctttccgtcgctggctggcgaacggcgacacaaccaaaccgtttggaggcgagtgatggcattcaaggcctccaaaaagcgcgaacgccgggcacctcttccggtcggaagagggaagcccataattccatcgtcaggaatcgaggcctggtatcgaaagcagatgaaggatatttccaagctcatgatcgccgactatcgaagcgagattgagaaggcgctgtcccagcctgcggccgaacggttcttcgccagcgacgaatccgttaacgtcctgttcaagatgacccttcgaagcctacagcagcgatggaaccgcatttttgaaggcttcgcggccaagatcgccccggagtttgtcaaccggaccgaagaagcggccaccgccgcgaccctgcacagcttgtctgtggccggcgtcgatcagccaagagctgcgtacaatgagagcgtcaggaataccctggaggcagcaactacttacaaccatactctcatcaccaggattcaagaggaagtccacgagaagatttatacatcagtaatgttgtctctgacttccccaaatccggaagagcaaggaacttccggcataacgaacgcacttcgcaaagtcgggaagttctctgaagatcgaatcgaactcatcgcaagagatcaaaccagcaagctttacagttctctgagcgatgagagaatggcggaaaatggagtcgaggaattcgagtggatgcactcttctgccggcaagactcctcgccatacccacctggagaaagatgggaaaaggttcaagctgaatgaccccagactttgggagggtccgaaggccgaccaggggccgccaggatgggcgattaactgtaggtgcagaaagataccaatcatttgatatcgataggagcgctatatgccgttagttcatggcacttccaatgaggctcgttctgaaaacatcaagcgggagatcgaagccggtaaagacccaaagcaggctgcggccatcgcttactccatccagcgcagtgagaaagggaagacggcgaaagattgttcgcctgagctcgttgccgatcttcgcgccctggtggacgctctgtcgaggctcgtgaaatgaaccgcaagacatgccggcgccgactcgtggtcgatgtaatcagggccaatattcacggcggattcttcagcctgaagtttgccgccatcgatttggcaatcatcggcgtcgccatcttgatgacttttggccgataatgctgagaaaatctggattctgactaaaattctagtccggatagccgcaagttaccgtttacggaaaatagcagtaatttggaaagcctactgccgcgaggctttaacagagctagttcctaatttccgatttagccgcgtgcttcaaaagtatatagcctgggaaattagaagtaacgtcccaatagaattcatctataagtaacgttataatataacgtcaatctatatgctctagacgtattgaaatttaatttttaatcggtaaattggtaatttgaattagtttatgagttgaaagcctcgcggcagtaggcttagacaaatcccgtcaagttccctagaccaaattaccggattttcgcggctgaggaaactggtaattagatcataatacaaattatagtgtaagttaacagtcgcgactacatctaattattgttccgcttatttacccttagatgtactgcgtatataatacagccatagtccacgactcttcgaattaacgatggcaaagtcgaaaagaaaaattgacgaaaatggatatatgaccatcgagggttgcccgatcagctcttatggcgttttccaatattctgctggtcaactcggtcttccgggcgatccgatgcggattgtcaacgtatatcgcccggagtctgccgtcagcgatcctgagtacatcgaatctctgaagaatctcccgttgatcgacgagcatgagatgctgtcgggattcgacgacgatgacgacagtgtggcccccgaagacaaaggggtggagggcatcatcacctccaacgcttactacgaagccccatgggcgcgcggcgatatccgcatctattcccgcaacatgcagaatcagctggaaaggggcaaagaagacctgtccctaggctatagttgccgctacactgagcaacccggcatctggaacggaacgccttatgaagtcgtccaggacaagatgcgcggcaaccacatcgccctggtaaaagaggggcgtgtgccgggggccagagtattggatggtctgtgttttgaccatctcagttttgatttcagaccatccgatgagggtaatgaaatgagtctcaagaaagccaagcagaagccccctgtccagcgcgtagggcaagctgctgactcggcggtcgaagagttgcgcgccctgtggccgaagctctctgcgtctgtccagaagttcctgggcgaagaggcgcaggagccggagcatcaggaaggcgcggccgctccggccgaaccgaccgacagcgagcacatgaccgagcatccgactctggaaggcgctcagaaggacaacgaagagcatgaagaggcgccttccgttgtcgatccggctgtggccgccgccgagtcggagcgtcaagaaagtgccgcatccgaaatgtccggtgaaggcgaagtcgccgaactgatctcccaggtcaaggccattctggctcgactggagggcacggcggccgaaggggcggacgaagagcatggcgaaggcaaagatgtcgtcgagggtttggaggagcagagcagcctcagcggctcgcaaaccgccagcgacgatggtggtgagggcaaggataacagcgaggaacttcctgaaatggcacagaagaacgcgcaagatgctgcaattcgcggtctctatcgcgacattgctgctaaagatcgcctctacaagcgtcttagctccgtggttggcgcgttcgatcaccgagctatggactcggctgaagtcgctgtttacggcgtgaagaagctgaacatcaactgcgcgaagggccaggaagctctggcactcgacatgtacctgaaaggcgtcgaggcctcacgtggcgcggccagccgtcaatcgaaagcccaggattcggccggctctgctccgcagtgcgccgagctggacagctacctgaagggggagtaactcatgttccagaaacaagtttaccgccagtacactcctggttttccgggcgatctgatcgaggacggcccgaagcgggcgcggccgggtcgaatcatgtctctgtctgccgtaaatccggctgccaccgccaccggccccaaccgcatcagtcgcgctttcggttacgccggtgacgtcagcgccctcggcgaaggtcagccgaagaccatcgcggctcgtgcttctgaagtcgtgatcggcggcgccaacttctttggtgtcctcggtcatccgaagcactatgccctgttcggttcggccggagactccctggctcccagctatgatctgcccgatggcgccgaaggcgagttcttcgacatggccaccggcctggtcgtcgaaattttcaacggcgccgcaaccgccctggacctggactatggtgacctggtcgcctatgtacccaacaacctgcctaccgccgacaacgcgcttggcctgccggcaggcgccctggtgggcttcaaggctggctccatgccgaccggtttggtccagattcccaacgcacgcatcgttaacgccatcagtctgccggcccagtcggcggggaatttggttgctggcgttaccatcgtccagctcacgcagtaaggaggcgtcatgagccagatcagcaagacccattcgcgcctcgcaggccgcaatgcgaaacctttcgacctgaaaaacatcaccaatgacgccgtggcgtctctgagtcgcatcggcctggtattcgaccacgccgtcgtccaggaccagatcaaggccttggcgaaggccggcgcattccgctccggctcggccatggacagcaacttcaccgccccggtgaccacgccgtccatcccgactcccatccagttcctgcagacctggttgccgggcttcgtgaaggtcatgaccgctgcacggaagatcgacgaaatcatcggcatcgataccgttggctcctgggaagatcaagaaatcgtccagggcatcgtggagccggccggcactgcggtggaatacggcgaccacaccaacatcccgctgaccagctggaacgccaacttcgaacgtcgcaccatcgttcgtggcgagctgggtatgatggtgggaaccctggaagagggtcgcgcctcggccatccggctgaacagcgccgaaaccaagcgccaacaggcggccatcggtctggaaatcttccgcaacgccatcggcttctatggctggcagagcggcctgggcaaccgcacctatggtttcctgaacgatcccaacctgccggcgttccagaccccgccgagccagggctggtccactgccgactgggcaggcatcatcggcgatatccgcgaggccgttcgccagctgcgtattcagagccaagatcagatcgatccgaaggcggaaaaaatcaccctggccctggccaccagcaaggtggactacctgtcggtcaccacgccatacggcatttcggtttctgactggatcgaacagacctatccgaaaatgcggatcgtgtctgctccggaactgtcaggcgtccagatgaaagcccaagagccggaagatgctctggtgctcttcgtcgaagacgtgaacgcggccgtcgatggaagcaccgatggcggcagcgtgttcagccagctggtacagagcaagttcatcaccctgggtgtcgaaaagcgggcgaagtcgtatgtggaagacttctccaacggcaccgccggtgcgctgtgtaagcgtccgtgggccgtggtgcgctacctcggcatctaaccgatgcctattcaccaaaggccggaaacccggcctttgttcactctgactctgactcggttgtaggggccggttagggcataattactaggactacgccaatgactgtttacatcgtttccgccatgactcaatccgtgtcttacaatgcgtatgacacctctgatccgtccaatcctcgcctccagcgaaagattctgattcgtggccgcgccggcatcgcatccgaaacttccggcttcggcgacatgatttccgacgcggccgggcgtccgatctggaccccgcagggcgattgcactgccgtgagcgattcggatttcgagctgcttcaggccaataagattttcatgcgtcacatggacaagggttatctgcgagtcgtgaagacagacatcaccagtgaccaccagcggatttccaaagagactcgcaccatggagcgcgatggattccagcctctggacgctgatcgtctgcagcagaaaatcaaggtgaccaccgccagcgcttcccaggaacaagagttccggatttaaccgagggtttcggtatggtgattttcgacgaacataagtttcgcacgctgtttccggagtttgctgatccagccgcttatccggacgtgcgcctgcagatgtatttcgacattgcgtgcgaattcatttctgatcgcgattcgccataccgtattctcaatggtaaagccctggaagcctgtctgtatcttctgaccgcccacctcctgtcgctgtccacgatgcaagttcagggcgcggctggaggtggcgtcactgccggtgggacccaaggcggtttcatcaccagcgctacggtcggcgaggtcagcgtggccaagctcgcgcccccggccaagaatggttggcagtggtggctttccgggacgccttatggccaagagctgtgggcgctcctcagcgtcaaagcggtgggcggattctacatcggcggtcttccagagcgccgaggcttccggaaggttggagggacgttctggtgatccctggtgcgaatcttctgcgaatggccttcggggtcatcggcactcaaattgtgaaatatcgcaagtttgagcagcgagtgaagaatgatcaagctcagtacgtttccatgttcgaggagcctttcgacctggcagcgtctgtccagcgagtccgacgcgatcagtatgtccagtttaatctggagttccaacggaattatgttatgatcttcgccaactttgagatggttgacttggatcgcgatgtggccggtgaccagttcctctggaccggaagagtttttcagctggagtctcaaggctcctggttttatcaggacggctggggagtttgcctggccgtggatatcggtgcggccaagctaactgatgacgggaaaccgactttctaggtgatgtatgtttgacggcgaactgatagcgaaaatggttgtcgagctgaatgcggcgatgacatctgctcaagaggctttgcagttcccggattttgaagtcgtccagaaagctcagccgacccaacagggaacgtcaaccaggccgaccatctttttccagaaactgtttgacattcctcgcggctggcctgccaccgattggcacctggacaacacgacccgcaaatatgtagaaataactcgacagcatgtagagacgactttccagatcagttcccttcattggcagaatcctgaaataactcacgtggttacggcttctgatatcgccaactatgtgagggcttatttccaagctcgatccacgattgagcgcgtaaaggaactggacttcctcattcttcgcgtttctcaaatttccaacgaggcattcgagaacgacaatcaccagttcgaattccatccaagttttgacatggttgtaacttacaaccaatatattcgcctgtacgaaaacgcagcatattcggccgatggggtattaataggcgtatgagtctgaggcgcgattcagagctaatcgccgcgcacctccagatgttaagagccatgcgcggcaggtccgtttcagccggatggtattccacggctcgatatcctgacaaggcaggcggatcggtcggaatacaagtagcgagaatcgcacgtctcaatgagtacggcggaactatcgaccatccgggcgggaccaggtatattagggacgccattgttcggggccggtttgttggcgttcggttcgtcagaaacgactttccgggagaaaccgaggtaactaagcctcacagaattaccatcccggctagaccgtttatgcgatatgcttggaacttgttttccgcagatcgcgccgcaatccagaaccggatagccatgaggctggccagaggacagatcactccagatcaagctcttgcccagatcggcctggcgttggaaggatacatagccagaagcatcaggaccgggccatgggtggctaactcagcatctacggtcaggagaaagggattcaacagaccgctggtcgatacggctcatatgcttcaatcgattagcagcagagtaacataaccaggagatcatccagtgatcagtcagagccgttatatccggatcatttcgggcgtaggcgcaggcgctccggtcgcaggccgaaagctgattctgcgcgtcatgactaccaacaacgtcattccgcccggaatcgtcatcgagttcgacaactccaacgcagtcatgtcttacttcggcgcgcagtcggaagaataccagcgcgctgccgcatatttcaagttcatcagtaaaagtgtgaattcgccgtccagcatcagcttcgctcgctgggttaacaccgccatcgcgccgatggtagttggtgacaatctgccgaagaccattgccgatttcgccggcttctccgcaggcgttctaaccatcatggtcggcgcggccgaaaagaacatcaccgccatcgatacgtccgccgcgacttccatggacaatgtggcgtcgatcatccagaccgaaatccgcaagaacaccgacccgcagctggcccaggctaccgtgacctggaatcagaacaccaaccagttcaccttggtcggcgccaccatcggtaccggcgtcctggccgtggcgaaatctgccgacccccaggacatgtccaccgccctcggctggtccacctccaacgtcgtcaacgtcgccggccaggctgccgatcttcccgacgcggccgttgccaagagcaccaatgtcagcaacaacttcggttcgttcctgttcgccggtgcgccgctcgacaatgaccagatcaaggccgtgtcggcctggaacgctgctcagaacaaccagttcatctacacggtcgccacttccctggcgaacctcggcactcttttcgacttggtgaagggcaacgccgggaccggcctgcatgtgctgtcggcgactgccgccaacgacttcgtggagcagtgccccagcgagatttttgccgccaccaactacgatgagccgggcgcttcgcaaaactacatgtactaccaattccctggccgcaacatcaccgtttccgacgataccgttgcgaacaccgtcgacaagagccggggcaactacatcggcgtcacccaggccaatggccagcagctcgctttctaccagcgcggcattctgtgcggcggtccgaccgatgcggtggacatgaacgtctatgccaacgaaatctggctgaagtcggctatcgctcaagcgcttctggacctgttcctgaacgtcaatgcggttccggcgagcagtactggtgaggcgatggtcctggcggtgctgcagccggttctggacaaggcgaccgccaacggcacgttcacctacggcaaggaaatcagcgccgtccagcagcagtacattacccaagtcaccggtgatcgccgtgcctggcgccaagtccaaaccctgggctactggatcaatatcaccttctccagctataccaacaacaacaccggcttgatcgagtggaaggccaactacacgctgatctattcgaagggcgatgccatccgcttcgtcgaagggtcggatgtgatgatctaatggtttgcggcggactcgatccgccgcaaccttccataaatggagtgaggagtaagcaatgatcaacatttctgcgttcggctcgatctgccagttcacggcaagcagaactttcccgaacggattcaccgtcaccgagttcgccgacgatgccgatcccatcgacagcccgccgttcaccgctgccgataccggcgtcggtctcaacggtgacatggtagtttggaaccgggcgaacatcctggaagtagtcgtcaacgtcattccgaataccgagggcgagcgcaacctggcagtcctgctggatgccaaccgcaccggaaaggacaagtcgggcgctcgtgatgtcgtcggcctggtcgtggcgatgccggacggcagcaaaatcacctgcaccaacggcaccccaatcgacggcgttctgatcaacgcggtggcaagcgtcggccgtctgaagaccaagccgtatcggttccgatttgaaaaagtgatcaaagccggtactagctgatgaagaaaattccgctgacagcagtccccaatcaagcgatctcatttaacgccggtagcagctattggaagattcgcctgtaccagaacatggacatgatgaatgccgatatcagccgcgacggcgtgatcgtttgccatggggtccgctgcttcggcgggattcctcttctccagtacagccgtcagtaccgacctgactatggcaatttcgtcttcgaccgcgacgccgattggacattgttcggcgacggcatcaacctgttctatctggacggcgccgaattcgccgagtatcaggcgcttgccacgaggaaagaatgagcacatcaacgatcagaaccgggacgaacaacgatatccttttggacgacaatggaaacatggttatcctcagggatgtcgaagcgtgcgcccaggacgttcgggcggcgatgctcatgcgcaccggcgaaaacattttcgatgtgaactccggtgtgggatatttcgaatacatcttctcgccgcagaaaagctatgatgacgctcgcaaatccatcgcggatgcaattttgtcctcgccggatgtgaccggcatcgagcagctggacatcgacatcaccggggaagtcttcggcgtcgatgctaaagtcatcaccatccacgggcctgttaccacaggagtttgaaatgagcacaatccgcatccaatacgccaacggcacccagctgttcctggacggcaaaaatccgccgctcctggaccctctaccctcgttcaacccgtctgtagaagatctggaaggcctggaccgcgaaaagaacaccggcaagggcgactcctcgccggccggtcttcccgttcccccggtaaacgtcgattccaatgtcgacaacggcggaaccatcccggctccggtatcgaccgacgctcctgcggccgaatcggccccggaaggcgcccaggaagctcctgcagcgggacaaggcgacgagaaaggcgccgaggaagccccgactaccgccccagtagaaaaggccgaggaaacggcctcgccggccgctgaagaggaagccccggctcccgccaaggccacctctcgcaaaaccaccagcaagtaaggactcgacatgatcaacgtcagcggcttcggcacaggaattgtaatagtttccgcctcatcgttcccgatggggttttccttgtcgaagttcgctgatgatgagagtccgatatcctccaaagagctggagccgttcggatatgagatgctttatgacggcggcctattcgcctttgacaaggctgctcctctggaagtatctgtatccgtcatcgcagggagcgaggatgatattaaccttcgcatccttctcaattccaaaaagggatcattccgatttcttccgggaatcatcccggatatgacgactctcgtggccactcttcctgatggcggccgcaccgttctgtccaatgggactatcatcaagggtccggccatcgacaccatacagaacaccggacgacgcaaaggcaacacgtacacttttgttttcggtagctatcttggcgcccagactgcgcgtcaagccatttctaacgttatccaatcggtactggaggtggtctgatgttagggattttcaccagcctcctaagttcgcgatctttttcgattgtggaccaaaacacaaaccagctagttgctgcggatttgaggataagccgggtcaacacccggttttcttctgtagggcaacgccacatgctggaagatggcaagaccaagatggattccagaacgatccaccctatggaaatcatcgtcgaagtattttgcccttcaattgatgtcgtcgatcagatcaatcaattgctcctggatcgcgacactctgtacaaagtcatcactcgcggcatggtattcgaacggatgatgtgtaccagcgaagcgctcaatcagactccggatatgatatcggcgactcctgcgcggctgacattctcccaagttctcgtccagaatcccaagcctataatgttcagaaatgcaggggactcttctatgatcgaccgagggctggccctagctgaagacgtggttggctcggccggcgatctgttcgactacgcagtaaacggcgtccagaacgccgcagacttgttctgaggtgccaattgaactctttcctcaagtctattctcaacacgcctactctcaccatacgtgatgatgttaccaaacttcctgtctggaagagtcttcaagtcaagaaagtggaaatttactcgccggcttccgtagtgtcgaaacctctggcgacgaaagaccagacggaagctcaagtgtacaccgaagctctggacattgatgtgaagaatggaaagatcatccaaccggtgcgactccgcatcaatgctatctgtccggacctgtccaccgttgaaagtatcatgaacgctttcaatgataacacctcgactttcgctatcacttctaagtcgatattggccgataaaatggccatcatgacgctcgatgtagatcagtcgccagacatgttgaacgcggctgagatcaatatggaattcgagcaggttgagcctccagtattgaatgaattcgatcctgcgttccctcaagatagtccgacttatggggtacagattcaatctctttctgatgctaatttgctggatttgggcgccatcggcgattcgatatcttcggccgcaaaatcgctatataatcgcgtgaccagctacttctgaggatgtatcatgcttgaaatcaatcttcccgatggccgtcaaactcgcgtacaaatcgaggcgtggtcggcattggatggctgggaactccagcgccgtttcgtcgaattcgctgtcagccaagattccgacttccgccgctctttcaccatggaaatcctgggctatgcgaaagtgctgcttggcgacgatgacaccggcattccgctgaccaccgcggcagtcatcaacaaccacctcggccactggaagaacgtggaactggttttcaactctgttctcaagcacaatggcatcgacccggccacgcacgccgaccggccggactattgggaacaagtcggatcgcagatggccatcgcatttctggccgaggcgtccaagctcattggtccagcaatgaagatcgccgaaggactcgccaacaagccggagtgattcatgtctagtgatttggatgaattcatacttcggtatgaggccgatactgccagagccgagcgcaatctagagcacctccagaaccagatcaggcgcgtaaacagcgcatcgacgagtggccttcaggatttgcgccacttcgcagacggcgcggccaccgaactcggccgagtcgttcctcagattgattctgtgacgagcgcaattcgcggaatgaacgcgcaactggcaataggcgcaactggcgtggccctggtcgcggccggcgtcaaggcgttcatgaacaccagggaccagtacaatcagcagcgcatccaggcgatggacatcggcatcgccccggcacgcttggaagagtaccagagaaaattcgttcgccagtccggtggaaccatcagccgcgagcagggcgcggagatgaccaaaaatctggcagacactttccggcgtgcttatcgcgatatcgggcgagtcggcccggaagcgcgaattctgcgtatggcaggcgtcgatgtcgggagcttccaaaagggcatgcggccgctcaacgacatcattactgatctggccacgaaaatggccaagttgaagccggacgaaatttctgcctacgctgatgcccttggcgtctcgcgagactacctgagcaccctggcgaagatcggcccggccatgggaaaagtcactgagatgacgactgcggaactccagtccagggtccagggcgagtccaacatccagaaattcaacgatgccctggcgaatctcaaccagacgttcactaccctggaaaaccgagtcggcgaaaagctcgcgcctgcgttcaccaagctgatcgaaatcatcgacaagatagtccaggctattcccaatgaagtggaaagcttcgcgaaggacaccaaatcccgttgggaagatggagtgctcgggaaggcgaccgttggcagtgatatcctatccctcctcagccccggcgccctgctcggtcgcctggcagcgtgggggactcgtcgcggcatggaagaatcagggctcatcgacaaggacaaggttcccggcgctcaaaccagcgaagacctggccaagaaacaagaagaccaggacaaggctactaagtccatgaaagagctagagaagctggctgaccagaccacgaagtctaccaatgattttgcggtggcgatcaacatgttcagtggcgcggtatcgtcgttcgcgaatgccgttgacgagcgccaagcttgggcagcctgggcgggggaaattggtcgggcggtcggcatgggaagcaccgcgccgacttcgcgggccaccggcgtctatccgcacgcgatctatgatcagtcgaagagtggcgcggccggacaagtcttcggcgagccaatcggcgcccagtctcttcgcaatcgcatgttctcgccgcagcgcaaggccgagccggtcaccgttccatcgtacatcaacgacatcatcaaagatgcgtcgaagatgtacaacattcctgagctggacatcaagaaactcatatacaccgaaagccgattcaacgccagggctaccagcgaagccggagcgaaaggcctcatgcagctgatgccggaaatcgccaaggcgtatggtataactgacgtatatgaccctcgccagaacatcctcggcggaacgcgcctattgcgggaaaacctggatcgagccaatggcgacatgcggttggccttgacctactatcacggcggcctcgatccgaagaactggggaccaaggactcgcgcatatccgggtttggtgatgagcgctccaatcgagctgatggaagaggctcagcgcaagcagaaggctgcggccatgaccgtcgccaacgagacgttcgccccggaaggcggcgacatggacattcgtccctatgatggcgggcgactggaaaccccagaccagggcaagaaggaagatgagcgccgcgaagcccgtcgatatgacgacagggttgtgcgaccggaaattcgcatcatcgaccgcatgccagaccgcagcgacggcgaaatcctcaagatgtctaggcgtcaagaggccgaccgggcagattctggattccggaagttcccgaatcaagttcgcggcgagaccaagcagaacatccaggctcaactcactgcaggagccatcgcgcaagtgatcggcgttaaccccaaccagatcatgcgccgcgaaatcagccgttctgacttgctgttcggatacaaccaagccatcctgggcaagcaacaggagatcaaggccgccgcgaccgaagccaacaacgtattcctgtctccagccaagcttgccgaagccacggccaaggtgaacgccgcatcgcgagaaatggatattctcaggacgtacggcgagcaacttctgaagagcgctccagagcgcggccaggagctgaccatcggtcgaatcgatatgttggtaaacgttaccggcgcgaattctccggaagaggctcgcgagatattcagtaagcagactgcagaccagctgactacggcaatccaggacgctcaaaacgattccgcaactaagatactctactgatgaaaaagagaattctgcgagtaacattcaacatgccttatggacccgaagtcatccgcgaagatctggatgttcgggtccggattatgaaggctgcgttgcggattcagaaccgggcgacgatggaaattttcggcctcaccactcagctgcgcgagtctcttctgtcgcagttcaccgcgtggaagcaccggcaacgtcaagtgggcagggaagatgaattgatgatcaaggtgtcggtggaagccggctactctgaccaggggcgcgagcaagtttccagagtctttgtcggcgaagtcgccattgtcgatatcatttctccgccaccggacattggaatccgcatccagtgctataccaggcaaatcgacaggacgaagaccattcggaatatgccgccagccaacacgacgtttgtcaagttcgtcgagtggggcgcgaacgaaatgggattgaacttcatttgcgataccagttacaacgatcaagttctgaagaatccgggccggtctatcactgtcgcgtcggcaatcctggcgtcgattcaggatatgtacatgccggacgtggccgcgttcgtcgatgatgacattttgatcgtgaaggaccgcgacaaagtcattcgaccggatgaggtgaccaacgtcaactcgttcgttggaattccatcttggtctgaatggggcgttgaattccagtgtctgtttgagccatcgattcgcgtggctggaggcgtggcggtcgaatcgctcatgaacccaagcgtcaatggcaactatgtaatcactgctctggaatacgatttggccagtcgggatcggccgttctatatcaaagtcatggggagcccagcagcataatggccagggaaatcaaaccgttcaacatgttcggcgttcactatacttcgcggcaattctctgctgtcgatgggctcagcatgatgtcggaaattcagagtgtgccgccagaagaactgctcaagggaaccagtgtattggcgcatccggaagaccatccggaaggcatctggcttccattgactgctgcgaacatcaatctttatgtcgttgatcgagcgaaagtaatagctcccgtacaagttcttgcacttctgtccgaagtggtaatcgactggaactttggttttctcaaagactggaccggagtcaagattccatccagatttgtcgaagatatcaaaagcgtgaagacggcacattcaccttctgtagttgcgagcttggtcgcgaacggctcagcctctatgcgcgagttggaagagtattattcgactcaagatgcgtttaagatgatagacatcatgacggcgaagagcgtgaacgaggccttggcgtccgaagcatcgcacaacagaatcaaaaagggataattcctaaccgggcctgggaaggctatactagacctgccaaatcagaggctttcccatgtccaatatttctctaacatccgcaaaagctcccgacaggacgcgactgatcgccgctcttgacgctcggtcgcggcgggatgctctagatttcgaagtgatgataccggctcaggttgttcaatatgaccgggccgagaacatcgcgacgattcaacctctcatcacctgggttgacacggaacacaacgccgtccaaaggcatcagctggttgatattcctgtaatttccatgggggctggcggcttccacataagtttcccgattcagcaaggtgacataggctggatttatgcggccgaccgcgacacgtctcagttcctggagtcgttgtcaatgtcgaagccgaacaccggccgcatccataagttcgagcatggcctgttcatcccggacgtattccgtcgatacaccatcaattccgaagattcggccgctatggtcatacaatcgacttccggagcgaccagaatttcgattcgcggcgataacatcaagataactgcgccgtcgaacgttactgtggatactccgcaggcgaacttcaccggcaatgtgactatcgctaacaccctggtcgtaaacggcatcaacgtgaacaaccacggccacctcgaaaacaacccgcctgatgcccggacgaaaggcggcatgattgcttaaggagattttcatggcaagttttgatttttctgatttaacagcgggggggggttgtaatggctaactacaactacatcgtcgatactggtgtgatagtcgcagataccgccgacgttctgagcgacgttgaggccgagttccgcgccgccctcggtgccaatatcaacttggccgcgagcactccgcagggatcgcttgtcgcggccgaggccattgcccgttccagcgtcatgcggaatgaagcgcgaattgccaataccataaacccgaacgtttcattcggaacgttcctggacgcgatctgtgccttgatggggatcgagcgtggttctgacctgtcaaccttcggctatggagttcaagtcaccggccgcagccaaacccgcatttccacagggtctagggtccagactccggccggcgcgatcttcacagtgctgagcgatgtcacgatccctgctggtggtgtcgcgaccatcgatatcaaatcgcaggagtatggcaacattcctctgccggtcgggaatctcatcatcatcgacggcacaattggctggtccggagcgaaagtcatcgcctccactcgcgtcgatccgggcagccgccaaatgagcgatgcagaactgaagaatgcccgcgttaatcgattggccatccaaggccgcaactcgaccatggccatcaaggcgtatgtgagcgccgttccgaacgtcacgtcggtgaacgtaatcgagaacaacaccggcgccgttcaagtggtgaatggagtatcgtttacccttccgtatgctgtttgggtctgcgtcgccggaaacccggataaacaagcagtcgccgatgcgttgtgggccgcccataacggcggaactccatgggactatggtgcgacgaacaacggcgtcccggtggacggtccgaatggcgttcctgtgcgcgatccggcgtccggtcgaaagtatgtcgtgaagtggaccactccaattatgtacgatggatatgttaacgtaacagtccagcaaggttcctcctctgtagctccggaagccattcagaacgcagtggtcaattacgcccaggggaaagtggaaggggaagaggggctggtggtgggcgcgagcctgtcggcattcgaagtcgccggcgccatcgctcgcgaaattcccggcatctacatcaaactctgccaggtcgcgtgcgtcgcggctggctcgccggctccggcgccgggcgatttcacttcggaatacgtcatgagcgcattcggccaggctaccatttccgttggtaacgttcgggtgactttcgtatgactctgcctgcgtacaattcggacatccaacaagctctgaaatggctccataaccaggcgcctggaatcaccggcctgatccagagaaaggcgcaatggtatgacagattcagccgccaattctgggccaactgggagcgcgacgttttccacttgaaaactgccaacccgttcggccttatggtttggtgcatcatcctcggcacgccttcgaaagggttcggcctttatccaaaaaacagttcttgggcattcggtcggctacgccagaacttcatctatagcggtacacaagttccgccaccggcagacgcatcgcctggcggcaacttctacggtggcggcaatgccgaaattctcaacttggacgaaatcaggaaagtgcttcagctaagatatgtagcgctgatttctaacggctcgattgcatatatcaatcgcatgcttcgttacatattcaatgatgatgagccatgggacgaggcgaccggtctgtacttctatctcatggactcaaccggcgagaatggccctgtggagaacttggcgatatatcggaaagattgggaaggtatggtgctgttgtccagttcgcccagaacgaaccacgtgctgacatcgacccctgccagcgacgccgattggccgggagtcgatccggccgcgagcggtattccggtaacggtcgaaacggcgtccgctacggccccggacggctccgctacggtgtgcaagcttactaagccggccgggagtaccgcttacgtctccgcgccgatagatgggccgctggggtccggtagcactgtaacgttctcgttcttcgcgaaagccggctccacccgtttcattgcaattcagtcggctgccgatttccccagtcgagccgatgccgttttcgacctggattccgggaacgtaatcagcgatcagatgctggacagcagcgtggtaagcgcccgaatgattcgtctggaaaatggctggtggcgttgcgttctcacgaccaagaccgtcagctcttcgttccgcgctgcttacgtcgctccggcagaaaccaacttcagctggattgattcgaattccagcgcggcgattgacgtgcttatctggggcgctcagatcgaactgggtgatactccaactggatacttggaaactaccggggcgcccgtaaccatgaccgattatgttttgcagaacgcccagaccggaacagtcaagttcacacagccccttccgaccggagtagaagcgtattggactggagactggaaaggcgggactgcagcagaaccggccagattcgcagtcgggaatgggactcaggatacgtttactctgtcagaccccgcatacatcggcctacccaccagtggggcgttcaagctagaatacagggttggtccggcgcttaatctgtcgccgcaattgatcaacctcatgaatgaccgggcagttggtattatgccgacttgcgccggttgcgatgtcaaagtcattcaggagtaatgacgtgatcacacccgaactgatccccagtccgtttgccgctcagggcgataaagacccgattccacaaacctcctccactggcttcgcaaaccttcgcgacggctatacgccggactacgaaatcagcctggcgtcgaacaacccgcaggccaaagcggtcgagcggaaaattcaaaaccaactcttcttcatcgcgacccagaacgcacaggcgtggcagcgacaaatggcgccgccgtggtttcagggcatgcctggcggctacgaacagaatgcagaagtcgtgcgcgtcggaaatgacggcataatgcggcgttatcgttccatggtgaatgccaatgcgagcgaccctctcagcagcacgacttgggaagaacaacccgcatggtcggcgatgcgctccaacatcccgatgccggccggaggcccaggcctatcttctggcggagaagtcatcacgaccggccgcaacttcaacgacctgttaaatgggacgtgggagttcttctctgattcagtggttatcgcttctcagaatgcccccgtatatccggcgtccgctggtgccgctgctggcatgttggaggcgaaatcttggatatccgggtccaatacgttctgcgttcaacgctacactgaccgcgtcgggaacgtcgctgtgcgcgggcttaatgccggggcatggaccaactggatgtatgctgtaaacgttatggccctccaacaaggtcgagtgacctatggagtcgcggccggcccggcgaacgcttacacgttgacgctcgttccgcagctccaaggcggcctggtggatggcatgattcttcgggtcaagttcaacaccatgaacaccggcgcctccaccatcaacgtctccggactcggcgccaaagccatcgtcggcgcggccaacttccctctcaccggcggcgaacttggccaaggactcatcgctgagcttgtattcgacgcagcaggcgaccgctggagaatcctcgcaggcgcgccacgcatccaagttggcaacgccgatcaagattaccaggcccccagctggaaacaggtgaaggattacgtcgcgtcccaaaagctgactgaagtggactgggctgacgtcgtcaacaagccgaacgtcgctatccaagacactacgccgtggttcgccaatctggagttgtctgacgctcggcctttcatcgatttccacttcaacaacaaccgcgccaaagacttcgactatcgctttatctctgaagctgatgggtcgatggcgttctactctcgccaggggtcagctggtcctacccaggatatcctgttcagcaggtcgaatgttacattcctccagccgcgactggatgttgcgaaaaacctcgcgtacatcgcgaactctggtcccctttggcagaacaccactgccgatcagcccggttggaagttcacattcgcgcaaggcgtggacgcgaacaacaacgcggtgatcgcagtcaataccaccaatcctgacggctcctatcgctcacagataatgcgttgggactgggcgtccacgaatgtaatcttcaacaatcgtccgcttttcgccgggcaatatgttccttgggattctggtaacttcgacccttcaacaaagttgacagtcaatgccacgaaccagatcgccgggcccaccgggattcggaacaccaacggcaacaccggcaatatgaacacatggggttccggttccacgacggcatcctatggcaatgctgccatccagatcttcgggaaagggggcggtgagcctgccgcgatctattttgacaactcccagaccggatggtatctgggtatggacaaggatggacagctcaagcgggccggctggtcactcggcaacaactcttatgtcatcaccgatgaattgaacatcagaaaccacatcaacggtatggcagcaaggccggtttggggcggaaatgaattctgggggccgtggaacttcaatccgaacactaagcttacgttgggcgcattcaacgatagccaacacaccaggatggtaaacagcgccgcgaaggacgtagggatagccgccatgacaagttatggcgacgcggctatgtcgttcttcaactatgaggcttcgacgccgaccgggaatcgtgctgctgtaatttcgtttgttcgtaacggggcacgaggcgttctgttcggcctggacacggacaacaagctgaaatggggcggctattctctaggtgccgtcgcgttcgagattgccgactccaacaacctcatgagcctgtggtcatcccacgctgccgcgccgaactggaacgggcagaccatctggaggtcgggaaacttcaacccagacaccaaggcgactttggcagctcgcaatacgacgtcatcccctacaatattcagttatggggcgtccggaatcgcatcaaccggacaggtcggtgcgttggttgtggaaaacaacagcgtcaccaataccgcagccgccatcacgttccattcgccgcagaaatatcaggtcaacttcggcctggatgcggacaacgtggtaaagatcggtggcggcacaatgggcggcgtagcatatcccatcatccactccggcaactacaacaactacatcaaccaggcgctggttcaggtaggtcttggcggcgtcggttcctacgcgatccttgccgtatttgacacctccgcgccggcagcgtccattgcccccggaacgatcatggacagttccaagctgttctattcgtcctgcgattcgacctatcgcagcagcgccagtccgacgggcacctggcgctgcatggggtatgtgtataaccgagactccaccaacggcgactcggcatccctattccagcgggtaacgtaacatgaaatggacgcgaatcagaaaccctcgttggctggatgagacaaatattcacgccatggttactttcgaggggattggagaagttcctttcaccgccaatccgcacgacgtggaggcccacggaagggccattcacgctgcgatcctgtccggggcgcacggacctatcgccccagtagactcgacgcgggagcaggccttgcaggacgctatacgagcaagggaaaagcgggctatccttcgcgatacccgatggcccatagatcgtcacgacgagcagaggcggctgggtatcgaaaccacggacgggcctgggctgatagcagcccttgttcactggaggcagcagattcgcgattggaatagcggggatcggccgcgacttcccatggctctgaaagcaatattcaaaaatcaggagtattgatgaaaatcacgaaggatattctgatcatcggaaccgggtgcaccacggatcgggcgatcaagtggctggatgacgtccaggcggccatggacaagttccacatcgagtcgccgcgagccattgcggcctacctcgccaacatcggcgtcgagtccggtggcctggtaagtctggtggagaatctcaactacagcgctcaaggattggccaacacctggcctcgccggtacgcagtagacccgcgagtccgcccgtatgtcccgaacgctctggcgaaccgcctggcccgtaacccggtcgccatcgccaacaacgtgtacgcggatcgcatgggtaatggatgcgagcaggatggcgatggttggaagtatcgcgggcgcggcttgatccagctgaccggaaagtcgaactattccctgttcgccgaagactccggcctggacgctctggagcaaccggagctgctggagactccggccggcgcggcgatgtcttctgcctggttcttctggcgcaatcgctgtatccccatggcggagtccaacaacttctccctggtcgtgaaaaccatcaacggtgccgcgccgaacgatgcgaaccacggccagctccggatcaaccgctatatgaagaccatctccgcgatcaatcaaggctcctgatattcaaccccaaagaaaaggccgcttattcagcggcctttttgctttccggctttgcctcttcaaccatcttgacctcaaccggcgcggcggactcctcctgagtgatcgagtccacatagttccctagtgaactcagaacgccgattaacagcgctctcaccaccttgtccttgactgtctcgcctatgatcttggtcagaacggatattaactcttcccggagtctggggctgattcttggccgaaagcgcttgcgatgctctttgcgtttcatgtttagtcctctgtctgcggtcttctcctcaccccgataattgcttggggatgctttgtgttaatcggaagggtcgggcgctattataacccgtcgaaaatgctagcgcttaactgtttaacgatacgcaccgcgatattaaatcgccttctttctggccgaggaactctggcggccgggtccggtctaaggcctaatttgtcgacatcaaaacgagaaaacccggatcgcctgtagggtaaggcgtccgggtttatttcgatctagtgtccgctagaatcagtggcttccgccccatccgtccagccagcaatcgaagacggcgtgtctcggcttgtccttggcgccatgggagaagtgcttgaatcggatgacctggcccttgaggtattccctgtcattccagcggcgctgtttctcgtcgtgggtcaggctggaggccgacacgttgaaggtgacgccaggccacagacgttcgttgcggcagacgaacgcaccgaccattccggacggcgacaggttttctgcgtggctggagcgggccgtgtggccaagttcattgatgaaagcttcattgttgttgtgcatcaactcttccacgtcgatgatctcagcttcatcgtagtcgtatcgcttgactttcacacagtgcccttccttggcagtcgagcgaccgaacttgtacagtccatcagcgcgcttgcccatggaaccttcgaatcccagcattgtgtggcggcgctcgacttcgctgaactgttcgatggaagtcaccagttcctgctcgaccaggtgaatcctctcatagccgaggcagtgacgaaggaagttcacgcgctcggccgccctggctaggcgatcttcggtcggtgcgcgaggatcggtgaaatcatcgaacacatggaaagaccagtccggctcaccgctgtggcggcgaagatcgccggacgacttctggaaaactttcgggtcgctgatgtcgccgcagaccagctcgccgtccaggccgttgaacagcttatcgctgaggtattcgtagatcgattgattgttctgccgcttgagttgacgggtcagcgcctcgccttcgaatacgaagcagcgaaatccatcgatcttcggtgagaaatacatcggcagttggccttccagcagcttcgggtcaaaattcgatgcgagcatgggtttcatacagttctccagaaaagaagcccggcgaaccgggctaaatggcggtaagccggctcagatggtttcgttggcgtggttcagttcggccatgatcgacgcatagcgctcgtccgactccttgatgaacacgccgtcgtacatgacgcctttgcgatccttgatggtgtcgtaggccgcagcgtagcaggcgagcatggtagtgtcgtgctcttccgtcacatcgaacagagtcatgacggccaagaccaggctcttgatggctaatccatgatttccgcgtgccagcgcgccggccagatgtccgaggtgctgcaaatcgtcgccgtaggtgggatgaacttcgacagtctcgctgaagacagatagatgatcgaacagattttcaccgagttgcgcggccatgatcgtggcaaccaccattacgtcgccgatgccgtctttcacctcgactggtttgttataaacccaggcttcgcaaacttctgcgaactcttcgaccaacttcaggaattgatccttggccgaagagcctttgatcaggttccggtcggaaccccatttaacaaccaggtcgtgaagttcgcgactcatgatttgttcgatattcattctttcgattccttttggatttgggattttactgcgttgattatggacgccgtgctctggcgcgatccatccttggtggtgccgaagtagaaggccattaccgacttcagctcggcgaaccaatagccgatgatggtgccgatggcgacagaggatgtcgggtccatcagagcctcgcggccgaatgtgaagattgcgatgatgatgagaatggagcctgtcagaagagcgaatgtaatcgccgggcgaacgaaatcgttctgctgcgccgcaagcctcctcgcagaatccctgtcggccgcctctgcggcgaactggctaagctcggcctggagctggttctgctcagactgaaggcgattttgttcggcttgaatcgcaagctcctggagacgaacgcgctcggcgctctggagttcggcgagacgcgctagagcttccggattcgcgtctagagcgctagcgaccgaggctgggtcggccttcgaccccagcgccgtcgcgacgatagcgcccacggcggcgcctgcaggcccacccaggagcgaacccagagccggggcagccgcgccgatcttactacctatgtctttccagtccatttcgactcctcaaaagaaaggcgccattacagcgcctttctccggccggtgatttagaactcttcggcttcggtcgcatcgccgacgccaccggcgtcactgcgaggctgttcctgcttgctgtagtccaccttcacctcgccgccgacgaacgacttgtacaggtcggccgcagccttgaagtgatccgggttcttcaccaggccttccagctcgaactggacgccggaccagctacccttgtcgttcgacatgcctacggtggtcatgcggaccaggttggcgaaagtcggcggggtgcgcaggccctgcggggtctgaacctttttctgggacagcgcggtcatgagcttcttcgaggccttgatctgcgaagacgacagggagatcagagcctggccgaaatcgccggtgtccggatcgatgacgatgacgtaatgaccacgggtgtcggcgaagtagtcagacttcttgtcgctgaccgaaccgtcttcgttcggcgcgtacaggcgtccttcgacttccttcaccttggtcgggtctttcatcatttccttgaagtcttcgacgctgatggcgcccttgaaaccgccctcggcctcgcgaccggcccagcggatgaactcgcggcggtacgcggccggaatgatcagcaggccggtcttgccgtcgtaaatcttgccggtgacggtgttcaggaacatgccggccttcgcgccttcgatgtacttcgggtcatcttcatcgacctggggagacatcttctgcagaacctggatgaaggggatggcataggactcggcatcggcgccttcgaagcctgcgccgtcatacgatcccaaatccatgaagtcgggaacttcggtagttgcgacggcgccgccaccggtggcaactgctacggccttggtttcttcggttgcttcggaagtttcggttttcttaccagccatgttaggctccttgtttgtcgaatttcagttatcgctaactgtgggtttataataacggaagttgcaactaagtaaagcaaattacatattaagatttgctctttttcaccttcggtttcgtgattttggcctctttgtattcgtgcacgccgatgaaatctggcagctcttcgcccttctccaaatactcgcgaccgaacgcctggagggtctggtagtggacatcgcggttgatggtggcgtcatagccggcctcaatgatagcctcggccgccttcttcgcatcttccatttcgccgcgaccgaattcggccagaaccttggtcttgatgatgccgtcgttgtcggtttcttccagccacttccagaacttcgatttgttctcttctttgacggaaatgatggccttcggctcgactttgaccgtgcgaccgtcagccagagtagtggtcttttgaccaagctcctccagcagctccggaatggtgttgcgcttgagggttttcagctcctcttccttttcggccagcgccttttgaagatcgaggatttcgacgtccagctgcgaagccttgtccaccaggttcagcagtcgatggccgatgtcggtggcttcaaccgccatttcatccatgacgccaaaatagtcgatttcgcccggcgcgttctctttcaagtattccgggatttcaagctcttgctctttcatgtccgcctccaacttagtgatgttcccttacttgaaccaagtattgagtagatattatgccgcatcttccttgatacggctactgatttacatattaaatttcgtcgcgagtgctaacgtcagcctcaaacacgccatcaacgacataacttgccaggttgcgtttccactccaagctgacctggattttctcgtcgatggaatccagacagatcaggtcgaagtacagaaccgagttgacggtgccgattcgatgatttcggtcttcggactgcatccgcagctcgttgtcttcgtcggtcgtgtagtagatggccacgtctgcggccgtgagcgtgatcccgatccctgctgcggccgggttgcccaggaacacctggacgcgcttggcctggaaatcgtcgatcaatttttcccgctcggcctctttggtctcgccgtagtaggtgccaaacgaaatcccttgggcctccaaatacgccttgatctggtcgatttcctgaatgcgcatggcccagacgatgatggaacgctccgggtcttcctccagcagaccctccagaagatcagtaaacacggcgaatcgcgggttgtcttcgggcggcaggatcaccggctcaccatagacgttgatatagccggacgcaacttgcttgagcttcgaacgcgctgccgcagcatcgaaagatacatccagcatgaaatcttcgttctggagaacgaagtgatagtcttcttccacgcgctgataaacctttcgttgctccggcgacatttcgaagtatatgcgcttgtacaccttgtccggcaggaatggcaatgcttccttcttcgtgacccggaagctgtgcggctcgatcagggatcgcagcttgtccaggttccggaataccgggcgcccataatcgtctttttcgacgagttgcggcggcatggtttgcttcccttccagcttgcgcatgatagcgatcattcgaggatcgtcactgggcaccaagacggaaaattcggccacaaacgcccgataggatttagtccccagaattccattccgcaagaattggaactgcatgaacaaatcggtcggtgcccgcgtcagaggagttccggaaaggatgcgacgggccacggccttctcgcccagctttacgatctttttcgcacgcttggcttgtgggtttttgatcctcgttgactcgtccacaattgcgcaaactttgaatgtatcaaggaatcgctcgacctcatcatagccagcctggtggttgattgcgtcaacgttgatggcgaagacgcgaagaactttttcatctgcgaacgtctcggaatacagacggtccaagcgcgccctggcctttttggaagtcggtcggccgcgccaatccacgctcaaagtcttgatcgcgacgtgggtgggaatctcgcgcagaatccagttggtgtggacgcctttgggggcgacgatgagcagcgcgtccacgcgcccctgtaggaagaggcgaacggcatcggccaaagtcgtccaagtcttcccggtgccctgctccatcaggtatgcgaagttccgtttgttcagggacgctgccagggcattgaattggtgctgcatggcctcggtcttcatgcccttgacgggatatgttttggctttcatttgttctccaaatcggcgaggaactgaacaatgttatccagtccttctgcatagctcgcaacttccaccaagtcgcggctgttaagctcgaacaaatcgaacataggattcagcagcagccaatcggttccgatcttggccaggacgaagccccggccaccccagccgatccgctcccgaagaaaagggatttgcccaggttcgaaacatctggccattgggcaggtggaagcgcgtttcggccactcctccaaagccttgaactcgacccagaactggacacctcgacgattcaggcagatcgaatcggacatgccagaccgccgcgtctccagaaagtcgatcaggattcggccgagcgagcgctgcttaaacgcattcgccgctttcgtttcgcgatcattcatcaccttcgccctctttggaaactttctctgcttgcgatgccaactttgacttctcgcgctcggtcaatatccgcttgacggccttcacgatgaacatgtcgatgccgctgagcctccatcctttgatcaggaaccaagcgccggtcggcgtcccttcagcaatctgctttccgtattgcagatatttttcaggccgaattctgaaacgtatcggctgatcaaccgagtcatcaacgcacatgatgtcgagaaactgcgactggcccttgtacaccgggtttttcccttgatcggccctcttcttctggcgaatcggttcgttctcatcggacagaactttcttcaccatcttgacgatgactaggccatcgtctccatcgcggatatcccgaatgttctgaatggggtttccggaagtcactccaaccagctccggattgtcataagcatgaccccagagcgtgtgagcttcgttcaagtctgcgaattgcacttcagaattcgacaaactagctgcgactttctcccaatcctgaagcgtcttcaggtgggtgcctgccagctctttatattgagccttcagctccttaagatcggccttcaactccttcagatcggccttcaacagtttctccagttctttgtcttggctgattttcgccgaaagaatctgggcttccagagctgctacatcagcagccttgtcctcaacatcctgtgccgatatcgggcaattggccagggcgatcctcgcggccttgacttcctcgcgaagacgcaggaaccgctcggccttcgccgggccgaagcctttggcgttcatgatgccgccgatcaggcgcccgtccgccaccacccagttgagttcggaatgctccgggtccagggccgtatattctacgccttctttggccaattcgcgaaggatggacacagtttgctggtcgtctttcgccgcccgaagacacgcggccgcgtattccaggcgatgatatcgcttcatgtagcaggtccagtacgtcaccacagcgtagctgaccgagtgggagcggttgaatccccaggcgccgaacgttaccatttcctgccaaacacggtgagcatcgtccggggcgacgcctatggtcttggcgccctcgatgaacaattcccggcgcttgttgaaaaattcttcgccctttcgcgcagacatggctttccgaatcgccgacgtttgttcccagtcgaactgcccaatgtccttcacaatggacatgatctgttcttggtacaggaaaactccatatgttccagacagatactgctcgacctgcgggatggtataggtcacaggctcgcgaccggccacgcgctcgatgtatttggtggccatgcccgaagacaacgggcctggacgggcgagcgccgttatgtggtcgatgttttcgaacgcggtgatattgatcgcattggcgaccgagcggacggcctggccttcgaactggaagatgccggacatcttgtcttcgttgagaatgtccagaaccgccttgtcgttcaacggcaagtcgtacagctcttgcgccgtcacgcaattagcatcttggatgacgcccagagttcgaagcccgagcgcatcgatcttgagaagattcagatattctgaatcgggcttgtcgagctgcgcgacaccttcagaagttaccgtgcagaagtcgatcacttcatcgttgcagaccaggatgcctgccgcgtggacgccggagtgggatgggtggatttcgaggtcgcccatgcaggcggacgcaatctcatacttttcacggaagtcgcggccgggctgagttttttcgaaagtatcctccaatccttttccatatcgttcgtccgccgatgtatattcgatgatcgagtttttgatgttgtcggtgtcgtggaatggaatgccgaagcgttttccgacgtgagcgataaccgacgcggccttgagtgtgttgatgttcccaagctttaccacgttccaagtgccgtatttctgctggagatattcgaacactaaatagcgatgggtatcggcaaagtcgatatctatatcgggaagatcggaacgggaaatgtcgataaagcgctggaagagaaggcgatgcgggagcgggtcaacctcggtaatgcccaggaggtagcagaccaaagagccggctgaagagccgcgagccgggccgaccagcatatgcttcttggcgaacgcaaccagatcggcgaccaccagaaagtagctgtcgaagtctttcagctgaatctgcttgatctcttcttggaatcgatcctcatactcctgggtccattccttgatgtggccgcgactgagacggtaggcttgcccctcgcgagccagcgcgacgatatccccatccaggtggatcataggcgccttcgccagtttcacatccgccaattgttcgactaccgcacgagtattggcggcggcggcatcgaactcttcgcgagtcatgatgtggcgtaaacggctccacaactcctcttcggtggcgatgtggcgaaggccgaccgattcccgcaccttccaggccgacgcgaaatcagcatggtcgatggacggcatgtcgttgtaagaggtaattaccaccggctttccgaatgccctggccgtctccatagcgccgtgcgcggcgaccatcgacgcgggattgatgtcaatgtagtcgattccggccagatccagatgggcataggcctcgccagcgaatttgatgacgccgtcagcttcctggaattcttgcggagtcaatccttgattctggaccgacttggaagtcaagcggtagaacttctttgtgtccttggcgagcacccaggctttgagcttcagctctttctcgccatcgtcggcgcatttgatcgggatttccatgccgaatccgcgaggcagttctgccttggtagcggcttgttcccaacggacgtggccccatgttccatcatcgacgatggcgacgaatggggattcgatctctttggcgcgctcgatgatctccgggaatcgaccatatgcggcgccgtaggagtaaccagagcgaacgcggagctgagggaaagacatcatgcggcctccattgcttgatacgcccgatacactcccatgcgcttgcagacttcgtggagcagccgcacgtcgtcgagcgcccggtgtttctgtacatatgggccgcagtagtgctcataaagatgttgcagccgcatgcggtggccgaacaacggcgccgactcttccacagtacagatatcgagcgatgggaaattgacttcgtccaggccgaacttgccgcgagccagatcgcaggccagcatgaacttatcgaatggcaggttgtgggcaatattcgcgtcggctctggaaaagaagtcgcgaactttctggcgctgatcgaggaaagatgggtgcttgatcaggtcttcgttcttcaacccggtgatcttggtgatgatttcctcgataacgattccaggattgcagatgaactctacttcatccaaaatcttttcgccatcagttatcacgccggcgaattcgattattctcggctgctttctcagactcaccctttggtggaacgggagtcctgtggtctcagtatcccatacagcgaatatcatgtttgttccctcttatgtcgaaaggccggctgctttcgcgaccggcctgaggagtataccgcgacggctgaagatttacgccttctgtccgtctttcggcgtgatgcggccggagcgcatggtggcgtgaacaaacgccgaatagttgatcgagtccaaggccgaatcggcatccttgaacccgctattcgccaggcgagtgagtttacccaccatgtgcatcacgaacagggcgagtcgatgatcatcggcggtcttcgccaccaggccgttcgggaagaggatttccatgatctttccgtacatcagatcattgcgaccataggtgctctggcgggcgcggaagacttctgctgcggcgtacagattgttgagaacatcttccgcgaaatcatcgggatgggaatcatcttcgcccggccagacggattccatggcgaacggcgcggcgtcttcggtcgggtctttgggctgagccgtttcagcgagcggagacggggctttcgcaaacgcctcgtcgagggtaggggcggagttcggggcggccgggaacggctcgcctgccatgtcgttgggcgcgctatcggggtcgctatcggccgcgacggcgaagaacggcgcatcgcaaccttccaggttcaggatgtaggagtcgatccccaggctattgtaggcatcgatgatgtcctggcgatcatcgaacgccgcgacgatcttggtgacgccttcgattttcttcaggatgtcgagcgcgactgcccgcttgaactgaggcgccggctcggtgttaccatacggccgcatgatgagttcatactcgcgatgttcggcgatgccgagttcgcggtggagcttggccctggtctggaaaaagtggttgtcggttcggccggtgacgaagaaaatcatgaggtcggcgtcgatggcattcctgatgcgacctacagcgtgcgggttgagagtgtccttgtcgagacgagaatgatactcgtcccattgccgttccaaggcgaagctcttgcggtggctatcgtcgaatacgcagccgtccagatcgaagatgatgatgccattcttgggtttgcgttccatattcagatttccttgatggttgctttctgggtgacggttttatcgatgaacgtcccatcagaagtgaggcggaaaacttcgccattctggctgaaatcgaacgattgcacgttcatcgtgatgcgaatggattcgctgccgttggtcacttcgacttgtgcgatgtcgccaactttctcgacaatgatcttcatgttacatggacttcccattaacggccacagggctggcctcttgtttttccgatccccagaaatcgcggcgcagttcttcctgctcggccgagcgatccatccatggacgatagaacttgcactgatagatcggtttcaccggcaactcaaccacaggaatctggccgggtttcgtctccagagcggacatgaagcggtcataggattgctcatgaatctcatcttcattcagaaccttcgatccatagcgcgggaaggcacaggagccagtagcgacacagtgcggctggagcagactatcgaacatcggatagacttccagaaccagtcggcgcatttcgcggaaggcttcctgatactccccttgcgtacgaacacacaggcgaactttcgccatgtcgctcagagtgcgcaaattgaacttggccgcgatcttcgtttccatgttggaaggaatgatggcacgagcatcctggagcgatgcgccggcctccaagagcttctggtaactggtctgcgcgtcggcgatggcatcgtgccacaggcggttcaactcttcgcgggcgtgataggtcgggtccggctcgccattggccgtagcctgctcatcgaaatcccagcggaatgcttccggctgaacaacggcgctaacctccagggcgcgactggtttcctgctggtaagcaccggtccgcgtccggacgagttggtgggtaaaattcttgcttacgccctcgatctggaaaatgaagtccacgaattcgaacggcgagcgaatggtgtccagcatgtacttccagtggtcgagcttttcggcttcggtcatggtcgccgggtcttggccgcgcatgcgggtggatttcgtccccaggaggagttcccaggcgttctgggtgtaactgatcagagaaatcttcatcagaaatcttccggaattggcgtgaaggtgaatttttctgtgagagcaagtgccaggccttgggcttgctccttacgaagtccatactgctccatctcttccttaagcagttcgcaggcctccagacgagactcatactcttcagcctcatgaactgacgagaagacggttccatcagaggttctgtatacgagttcaatagccatgatcgcctcagtagcagcggatgatttcggcgcggatatctcgacggtcgaggtagtgctcacgaatcttatcgcgggcgcgctcggcctcttctcgactgccgaacgacaggttgaacgaagtgaaaggcttatcgtccaggcgcccatcgccaatcaggtacaggatgcctaccagcacgaaagacggcgctgtctgtcgcgtttgcggcgggtcgatttgcatttctaggaaagacatgggaacctcttcaggatggtctggtgagtacatcaatagcgctcctgctgagcagctacggtttccggctcgtagatgagcatgtcaacgatttccgggcactggcctttcacccagtcgatggccgcgaccagtgtggtggaagcggagaaagagaaagtgcggtaagactcatggatgtacggcgaccccatcgaatcgcgctcggtcgtgcgagaaatgactgctttgatattaacgatccggcccatcttcggcctccactttagcgattatatctgacaggctcagcttctcgccattcaggaaataactggcgcgaaacttcctgtcaccctctggcccgacgatccgggccgttatggtgagactcccgccgccaagggcatcggtgtccctgaagaaagccagcagcgcccgcttgagcgctgcctcgcgaggatcgacggccattaacctaccacgttccagccgtgctgagcgcaccaaaccgcaccggcccctgcaggaaggctattcagaaggaatacaggggtcaggcggccatcctcggtcatgtggatgaagtagcgtgcactttcaccgagccattcggccttggcgatggcgcgttcaagattggccttggtggcgtaggtcttggtggtgtttttgtcggtggagaaggttacttcgcgggccattttgtcgattccttttggttgaagggtttcgcgtttcgatgagggaatactactctcacctgactcagaagtaaagcacttcgtgtcgattatttcacgaacatcttcttggccttctgataggacgaagaagtcatcaggcgctcgatgacatccatgtccgaaaccaggtcatccagaaggacgttgcgccaggtagcgaaccggccgagcgagaagatgccggcttcatgggtgaggttccagatcatggactcgcgctcgtcgcggccgagcggaacgattttgcctttggtctggatggtcggctcgccgtcctcgatgagatgccttttcctgatgccgaaggccgcgcaaacgtaatccatatcccagtcgctgtcccattcgatggtttcgattttaccatctaaagtctccactatccccttagtgatggattcgacgatcagagtatcaccggtgatggacgctcgaaacgttcccactttaggaccagggaaatacacggtctggaagacatcacaagggatggaaagcttgtatcgactcacgatgatggaggttccttcaccgaatgacgggtcgattcccaggtccagccctgccgcagccaggttggcgcggaatggcgcggtgctgatgacgttcacatggtcatcttgccggcgaagatactggaagaaagaggcgtcgaaaggacggctccaagtgatacgattcgcaagcttagccaccagctgctcatagtagtcggccggtgcgatccaacgcttttcagtcgccagattccagatggaccggtccgacaggccgcccgttactttcctggagtacatgttgcagtggtcgatgcgcggctgggaaatgaactcgccgtcgatgtagatagctttgtgtacagtgacttcgcggaacgggatgccggtgagttggccaatcactggcgagcggaatcgcagaagtgcgttgtggcgctccttattctccggcgtcgccgcgtcgatgatttgggcttgaggaaagcgatgcgcggcgatcagtccagcgagtccggcacctacgatgattactttctgatcaggaatcatgatatgttccttatgagtgtacaaaacttgagaggataaaaaagggacccattttcatgagtcccttgaagagctagacgattcaggctcagaggagcggcggcttactcctcctcaccttcggaaccatcggcgccctgatcttcaccgtcgtgctcctggccttcgtcatcggccttctcgtcatcgccctggccagcttcgtcttccttcgaagcgatggcaaccagatcgacccagcccatgatttccagcttgctcagatagctgcgaaccgaggtgccgtacagcaggtgggccaccttctcgccgaaggattcgatttcgaccggctcaccaacggtgcagtgctcgttgatgtaagcaaacaccttgccgcgagtcgagaaggcctgcggggttccatggccgtcgccggtcgggatgaagtgagtggcgcgggggcgacgcgagccgttggacttcaggtcttcgcggcgggcttcggccttcgcgcggcgctcttcctgctcttccttgcggcgctgcttctcggcttcgcgctctgccttcttctgctcggccaggcgcttgcgctcttcttcgcgtgcggctttctgggcttcctgcgcggccttcttctcttcggccttcttggcgcgctcggcttccttctcggccttcttctgctcgcgctcggcttccttggccttcgccttctcggcctgctcggcttccttcgccttggccttttcagcgcgctcggcttccttggcggcggccttttccttcgccttctcggcgcgctcggcttctttcttctcgcgctcggctttgcgcttctcttcgcgctcggctttcttctgctcggcttccttggccttggcttcggccttctcggcgcgctcgcgctctttacgttggcgctcagcggccttctcggccttgcgcagggcagcggcttgttccttggtcagctcttcgccttgggtctgttcgttctggtccttctgttccatgttcttactccgggaatgtttaaagggatggcttattggcctgtgaggggattatctctaaactaattgaagaagggaatacccttagcctgaactttcctaaatattttctttcgggaaagtccaaactctagggaacttatttatgttcgagaagttcctagcttttacgcaagaacagtaagtattcgattgcgcgagttatcccagtatacatcaactgactataagggatggacggcaagttttcttctaacatggcaacccgtttccattctgaaccctgcgacttgtggaacgtcatcgcccagccgaagtcgaatccgccaatagccttctgcgcctccagccgcacgtcttcctcggccgaaaagctcaaaggattgaacttcacccagcgctcatagttcgtgccgataatgcgaactttggcgaacaacatttcgtccggctcgtcatcatcctcttggccttcggggaccggcttgagttcgagcaggatggcttgctcgccgttcataatgccatattcgtgctggttcccggtgcaaaccagcttctcgccgatttccggttgtccacccttgtagccgaggatgcggcgcgccctggcgttcaaacggcggcgagtattgttgtaggcgcaaaggatcacgccatcatcgtccaagaacgtccgcatttcgtcgtccgacatgtcgaatccggcccgtaccagaatgtcgtcatactcgcggcagggtaggcgcttgccctggcggacgaacatcgacgcccgaacgatattgccggcgttgcgctcgatttcggtcatgatggtgtcacagctgttctcatggaaaatctggacgccgcgcacaggaggaacttggccaaagtcgccaatctccagaaccggaattcggtgcgacagcaagcgctcttcatcccactcgccgatcatggacgactcgtcgagcacgaccaacttcggcttctcgtcgagcgagtctttgttggcaaacatgatttcgccgtcttcatcttcgccaatcggccgatagatgaagctgtggagggtccgggcattggtgcaacccttctcgcgaagccgcgctgctgctttcccggttggcgcgacgaagaccgtccagtccatcgagcagcaaagttcggcgatgatcttcgcgatggaggtcttaccagttccggcgaaaccagcgagtcgatagacctggcggcggtgcgctcgatcacaccaaccgcgataccagtccacaacggaattgatcgcgtcgatctgctgactgtttggtcgaaagccgaatcgctcttcgatctgatcgacggtgaagttagatgctgacatatttgcgttctccaacgctaggtttaattgaatcgaggctcagtttaagcacgccgtccacagaccagccagtatcacgacgatacttgcggccttgcggatcgacatagaagttcttcgtgcgccgcagcagaacataatgccaagcagctccaagcgcgtggacccttcctttatacgggaaagccttcgcctgctctgcggcctctttggccccagggagccagcggacggtagaaaggaccaggaccgcacccttaatagcctgggaagcggcgcggccgtcctgtgggctatagcgatgtctatcgaagtctacccagtggtggttgccgcgccggagcttgaccgttcgggatcgcccctcgaacaccaccgtgccttcgtgagtaaaaatatgttccgccatcgaatgttcctttataacgtacagttatgctttacctctgcgcaggaagagtatactatcagctgactcgccaaagcgagcgaatttaatccaactttacttcggcaggaaagtggccgatactagcgccgccgcctgtactgccctccaaaacagaggatacattaaatgcaagaatgcaagatttcccgcgaccaactcccggtcggtaatccgaatcccaatgtcgacaagacccgcgacccgaacctgaagcccggtttcctgcgtcgcagccgcgagctggaaccggcgctggcagttcgcattcgtcgcgagctgatccacgccgaagcgtccgacttggccaaggccggatgggtcaattcacagtccagcctctatggatcgaaagccttcccgcgccattccgtcgttcgcgttaccggagttccggaagatggagctttcatcggcatgctgatcggcttcatcgagcatcgcgagcatggcgaatgggcggtcatggaagccggaacgaaagaaggcggcgcagtcatcatcccggtcaatcacatcacgcgagcgtcattcgccgaagccgaagagttcgccgaaaagtgggagcggaacttgggctggcgcctcctgcgacagctccgcgagtgcggcgccctggccgggactgaagacgagttcctgcggcggatcatcaatcgatacgttcgtgatcgcacgatcctcgatcaccacaaagtcggcgcggacaaaatctatactgatgcagtactcaaaagcatcggcgaaacatggccgaagattccttcggggaaattcgtcggacaccgagtcgcgcagctcctgatcggccacaagctaggtcgagcggggaccattctgaatgacctggtggacttcctggagaagttcgcggccgggcgcgataaaattctcaacatcgccatctgtaattgaggtgaatgaaatggttgacttggaaaagctgagtccaaagctgagtcctcggcagcatgccgttctactggagatgtacaggcatcctgagcatccagttcacagatcgccaacgaatttaactcttaaggctttgagacgaagggggcttgtcgagctatcctggaaggattccgtggctggatatatgttcggtcgccaaccttgctggaaaataactgatgccggcataaggcgaatcctgggagtgctggggaataatatggaaaaagaacaaagcgaagatcgcccaagcatccctgagtttgagaagaccgacgccaacaaactctatgatgctctggagacgatttcgctgctggagaagaagttggacgaatccgaaaagcgcgggagcgagctggccgcgagctattgtgacggcgtagtcggcgatgaatacggccatccttattgccgttataaagtggaacgcgacgccgccttggccgaagtagagcgcctgcgagaatcaaaaggcgatccctctggcagcttcgacaggtgtatgaagatgatgtacgagcgcgacgagaatgcaaaacgactcgacgccgccttggccagggtcgcggagctggaagggaagttgacggactgggtgcacgaagggttccggctcaacgaggcgctagcggtcgccaaggctcaacccagcgtgccggaaatatctggcatcggtcgcgatgccgaacatcccagagctgtagtgctgtatctgcgtaacgaacccagcgatgaagatatgcgagcaattcagaactttttgcgcgccatggccgcccccgctcagcacagcgtgccgaaagcatggctcgacgttcaggcagagcgccgccggcaggtcgaggcccaggcgctaaggcaggaagtcgcagcactgcgcgcaagggcggatgttgtgccggaggtattcgggcttgagcggtaccgcgtagaaaaaactgggaagggtttctggccatactgcgtgcgtgcgggggatggaacgcgtgaactgttcgtcggccacttgaagcagtgtcagcgggtagcgaccgaattggctacggcgtttgaagatgggaagtttatcgccgcgcccggcagctcggctcagcacagcgtgccggaggggtggaagctcgtaccgatggacccgacatcgcagatgacctatgtcggtcagtccctgcgttatgacgcggtaaacagcatcggcgagatttaccggcaaatgctcgccgtagctccctcacccatcgatccggccgcgcatcctcagccgtgccagcaaccacaggcccatcctgcccgctgcgggtgcgagcggtaagtgccaagtaaggaattcatgtaatggaacagaagaaaccttcaccagtagatggagtcatcatgaccagcctcgacgttctccggaaagcacagcccgaagcccaggacgagtatgccgtgtccatgttcgcaacggcgatccgccagaaaatgcagcgctcccgcgataaaggccgaggcggctggatcgactgcgacgaagatattctgatcaacggattcgccgaacatgcgctgaagggaaatgagaacaacctcttggacctggcgacgttcctgatgttcatgtgggtgcgcggcatcgacgatgcgaagattcccccggcgctcgaaaaggcgcggcagcacaagatcatggaagcatggagtcgggtccacgaagatggactaaactccgccagaaaggcgagtgctgcgcgacagttcgtggaagtgcctcgacgcaaggggcgcccggagcgacttgcatgaagcctcacgaaataagactggcacaggccgaagagttcctgcgcgaactcggccgagggattccggacgacgaacgggtgatggtcggctacgctgaagaggccacagtccaaaccgacgagaacggtcgcaagctcaacgccggctggtggcctgtgccctggaaggaagggaaatacatcaactcccgatccaacgcctacgcctgtatatcgtcgtccatcaagacgcccaacccgaagaccggccagatgcgatactggcgcggcgaagcctctttcggccacggcctagcgttgatggttgatgacatcggctccggcaaagggtcaaagggcgacttcgaccgcgacgagttccgcgagcgacttgagccgaccgcgattgtggagacttcgccgaacaactaccagttctggtatttcttcaaagagccgatgtcccacatgctccagttcaaggcgctgctctattcgttcgtggaccaggtgctaaagaaaggcggcgacaacaccgtcaaggacgtcagccgttacggccggatgcccttcggcttcaacaacaagcgcgggaaagacggcaagttcaaatatgccgacgaaaacggcaagcccgaactcgtgcgactgttcagcgccgactattccaagcgctactcgccagaagagatcgcccaggcattcggcgtccgcatcatcatgccacagatgaagaaggtggagataaaccgcgacgattgggtgtatgaccaagtatggctgaagtatgccgagcacatctgcacgaaatacaagatgggcgaagcggcaggcggccaggtccagcagaatatgtccggcaaataccgcatccgctgcccgtggggagacgagcacaccaacggcgatccattcggcgcctactttcgcggaccgatccctggagccgagcacgaatatgtgttcggctgcggccacgatacttgccgcaaagagcatcgccggacgtgggcggccttcacggatgaagtcgtgctaccctatatcgtcgaacaattggaaagaatcaaccgccgtcatatcggtgaggagtagacaatatgcaaaacgatcctggaatcctgattaccgccatcggcttgctgttcctcggccttatcatcttcttcgaaggcctaaagggatggaaaatacaagtcgcaaacttcctcgcgtcgcttctgtgcttcttcttcggcctttctgctttgacgttctggttcgtcgttgcgtttgacgtattttaatcgacgaacggtacagaaattttcggatggggacggaacttattagctatgccggtttaggtaggagataatagccgtccctttcgcctcaatgtgtagaggcaatgttgaatccgatcatgtaaagcagaaggcggcaaacctaacatgattatcgacgaagataatatttttgatgatggcgaatcagggtccagtgagtttgatctcacgcagatagaagatgctggaatggaccctttgatgaccgccgcgagcaaggcggccgatgatgcgattgcgaggaacgaaacgcatcgcgcgcaaaaggcggcaagatacgccgaggcgtatgctgaaccagacttgaggaagcgagcgcggttgttgatgctcgaccaggcgttcgatcttccggtcagccgggtggtgaaagggccgttcgatgacttcatcacgaaatacagctcgacgtcagacagcaactacctcgcggtctatgatacgttgttctgtaagggcgacggaaccgtcccacacccgcacttcgacgagtttcgcggccggctggtggaccatcgcggcgtggcgttcaacaacaagaccctcgatccgattgacctgatgggcgccctcgcggctgcggccttggacgatccctcgattaagaagacgattgagacttgctgcgtgtgggctcgtcgatatcgccgcaactctctgatcgagacgttcgagaagaagataccggagtgggatggtgaagagcgaatcgacacgctgctgatcgacttgttcaaaccgttcgacaccgaactcaaccggatggtgagcaagtatttctggctgagcttgtactgccgcatcaactaccctggaatctcggcgccgatctcgttggcgttgattggtgggcaggatgcggggaaatcatatttcggcttgctgatctgtaaggaactgtccggtgggcgcgatctggctccagttcagctcgacctgagccgacacgaccagacgccgttcctgcgcaacatcaccggcaactcggttattgcgaacgtcggcgaaatgtccggcttcaaaaagggcgacatggaacgcatcaaagaattcctggtgcgatcttcggatacattcgatcagaagtttgagcctggcgaaacgatcaagcgacaatggatcaccatcatggacggcaacggatacgatggactccagcgggacgactccggcaaccgtcgattctatccgatgttcgtggcacaacttcccgacgaagatggaaagccgaactgggttaagccgggcgatggtaatgaaccgttcaaggtggacttcacagacttcggccgcaagttctggcaggctatggctgagtgccgcgcctggatcgaagagcatggcgtcgatggatacctgaatatggtgtcggaagctaaccgcgaagtgcagaacttctctatttcggaaatggagaatgcgcgtggcgtggttcgtgatgatacgattgacatgtatctgatcaacgttctgataagttgcgagttcgaagagatcaagccgggcaagaattccaagaatcctgggtggagggctgacaccgtcaccattctgaaatggttcgatattctcgccaggaagaagccgatttctcgccacttaactccgcacctgaaggcgctggggttcgtcccgaacaagaacggcctggctggttggtgcctgcccgtcgataaggttgcgcctggatggacgaatagtatgcaaaccacgctgccgccgttcaatgatgcgcttgtgtacttgctgaggaagggcgacccggatatcactgatgaggctgcaatggcaaagattcgggcagtccgggccgagcgagccaagattttgggcgaggatttctgatgtagtggtggagtgtacttggattaggccgccttcgggcggtctttttctttggtgcggcgtacattagattccggcgttgggcgggattggtagaagtgaatacagtaatttggaccagtttcgagcgcgaataatggaaagtcgatagattttcggtatcggtttagcgtgtatggtggatggattttgcgtgaaatgttgagaaattgcgtgtttgaggtggacttttcgtgggaaatagccgcaaattactgtatagcgattctgagcggtaatttgggaagcctactgccgcgtgggttagcgggccaatttcctaatttccggtttttcgagcatgggttaaaactattctacagcgaaaat

SEQ ID NO: 32 - DNA, 67480 bp, synthetic construct
  source 1..67480: mol_type = other DNA
cgattgcacaatcctaatagaaaaaatctatcacggacgttacctatctttaaaattaataaaattaatagtaatttggtaatttggtaaactttagtatttgaaagcctcgcggcactaagcttgtacatatcccgtcaagtttccgattccagctagctcgcggcagggtcgccggaaacttccggacttccaatccatgggtcgcggcgacaccacggcggactaagcggcaaggaccaaaactcgacgaacggaaccggaaatttgggagcgcgatagaatcgctcagctggacatatttctaacattcgatttaacactcaatccaaacactcaccaccagcgtctcccgccaaccgccgattcgatcctcacccaccagcggatcgcccgtataacatcctataacaccacctaacactcattcatcatcaaacccacccagacctacagcccacccacaagcagcccatagacgcgatccctggccccatagtacaatcgcgccatactcagtgtcgcggcagagcaccaggggccatccgccaaccaagccaccacgacgactccagaatcgaactccagggacgcagcaccaaatgaccaaacactacagccccgacgatctagtcacgccacaggaattcgcagacccgcatttcgcggcgatcaaccaaaagcgattcgacctgtacatcgacctgcgcgtccaaggttacagctcctggcgggtcttccgggccatctggggcgaggagcatatggacggtcccgcgcaggcccgcatcttcgcgatggagtccaacccgtactatcgcaagcagttcaaggccaagttgaacgcgaccaaaacgtccgacttgtggaacccaaagacggcgctccacgaactcctccaaatggttcgtgaccccaccgtcaaggactccagccgtctgtcggccatcaaggaattgaacgttctggctgaaatcacgttcgtggacgagtcgggcaagacccggatcggtcgcggtttggccgatttctacgcatcagaagccgaggctcagaccgcgaccgtcgctgctgcggccgaagccaatggctatgtgccggaaggtgaagagggagatttcccgtctccgtctccggaaccgaccgaggaagaccgcgccaaccccatttagacataaaataacggctaaggatttaaggtaaggaggtttatttatgagcattcaattttcgaaaattttgcttcttacggtgctcgcaacagccacgatctccaacgcccaggataaaaagtctaaaagtaagactgccaagattgattggtctcactggacagtgacggtccctgaggagaacccggacaagccaggtaagccgtattcactgggttatccggagattctcaattatgcagaggacaaaatcgcgtcaaaatacatgtacgacgatccaaaggacaaaagtgtcgtgttctacgcattcccgtccggcgtgactaccgctaacacccattacagccggtcagagttacgggaaactatggagaccgggtcaaacaaagttaactggaccttcgctaagggtggcaaaatgcgtggtacttacgctatcgacgacatcagcaaagagccggatggtaagtattcccgcgtaattatcgcccaaatccacggcgtactgaccgacgagcaacgtgatcttattgggcaaaaggacaataatgcccctccgattctcaaggtgtactgggataaaggtaaaattcgggtaaaaacgaaagttttaaaggacctgaacgccccttacaaagagatgcttctggaacacgcttggggtgatgacgaaggccggaactttaaagagaagattgacttaaatacacggttcacattggaggttaaagtgagcgatgggcggatggaagtcattcttaacgacaccgaaagtttggtctatgacgacattcacatgaaaaaatggggcattttcgaaaactactttaaagcagggaactacttccagtctaaaactccgggcacttttgcaaaagttaaaatttattcacttcaggttacccacctcgagcaccaccaccaccaccactgaagaagcgacaaagccccggactctagttcagaatccggggctttcttttgggtttcttattctccagcttcgatgatttcgaagttgtatttgacgccttcgtgctcgaaagtcatcttgccagccgccttcagctgcatgcggaagcggatgtgtttcgaagaaggcaggccgaactcgatgaatgctgcgttggtggaccggaactcgccgcgcttgccttttacagtcacagccacgccatggcgctgggtgcgtttcttggaaacttctgggtctttccaggagttggcgatggctgccgacaaatccttggcctctttggctttctccggcgcgttcttggcctcttcgcgcatcttccggatttcttccagcgcttcctcttcggtgacttcttcttccggcttcagattctcttcctcggccttctcttcttccttcttcttggaagtgcgggtcttgtaaaccttggccggggcttcctcttcctggaaggcctcttcctcggccggcagagcattcaggatggcgaggcagcgacgctcagcagtcttgcggtcagagaagcgcttgacagtcgcatcagcgttgtgagcgttgtagaaagcgaccagttctttcatttctgcgttctggatgtcgccgaaggttttgatggagttggtcatcttgcgatcctctgttttggaagatttcttttgggcttcggtttgtcgcccccgttgaaagagattatgcctaggtcgatgctgcgtgtctacatctatttcatcagattgatcacaaagccgacgaacggttgtcggatgtgaaaacaccgcagagcaggctgcggtgtttgttggtgagggcgatggtcagaaagtcgggatcgtgatcggctcgatgggcggatcgccgggcctgtcgttgtccgatgcgggcgccgggttggacgggattgcgccggaccgaagctccagagattccgactgcctgctcacctgcggagctggaggcgcctttggcgcaggaggagcaggcgggaccggcaggcctggaggcgccatctgcgtcatgggcggttccggaagatcgggaaggcttggcgctatgctgccaaaggaccgctgcgactgctgtgccggattttcgccgaacatttcggcggatcggttgtccttgatgacttgacctatggccgtcttgtcggcgcccggttctgccggatcgaagccagtgaatggagtggttgtgcagcgcatgttcggatgggtcggcagattgttcagggcgatggagtccgcccagacgtacgggtttttatgcttgccagggctgtggctgatgatctcggcaggaatgtgaccgttcctgttcagccatctcgccatctcctgccgattcagagggctggccacgatctggccagtggaatcttcgacgatagcgaacagatcaccgagtttgaatccgatgattgtgtagttggacctggactcgccgacgaaagccagggtttcgatgttgtggtagatatcttggtcttcccagatgtacagcatggttcactcctcaataaggctgcttgttgtgttcgaccagagacataccggccggaactttgaagcggatgtattcgatcatcatcgcggttcggcgtttgttggcgccggattcgtcgttgacgaagagttcgcattggtgcggaatgactcgcgtcaccaggtcttcgcctttcgaaccgtagaacttgatgtaggctgcgacgcctcgcgtcatgctcagatggatcgtttcgcagagtcgctgcgcggccgacgcgctggacagatcggtcggactgaccgtcgcccagtaatggccactttgttctttatcgggcataagctaccctccaatgagaaagcctctgccgaggctggttgttagtcgagccagtcagtcgtacttcctgccgtgaaatgcgtgtccgcagccgaagattgatctgtatgcgttgattgaattcctgttcctttcagattcgatttgaatactgagcatctccagctcgtatcgggccagtccgccccattcgcgctcaatgcgtgaatactcggcctccagttgcctcaatcgttcgctcatataacctccaacaatcgtcattaatcgatcaacccctgccgaaccgcagaggctggttgttaatcgcgcttcagcaaaaccactttctcgtttgcgcgatgattcctgtgccagtcttcccaatagtctccgcactgacgggccaactccagagtgacatagccgtcgtcgctgctacattcgacagaaaggacaatcgcgttgcctctggactcgctgccagacccgaatccgatcagaacttcgtcgccagttttcagctcatctgccctgattactttggccatggcgttctcctattgggtagcgccgcgagggcggatcgggtcgatgtcatgtaagcagatggtgggatagtccctggccagcttgagcttgaagtccacccagtcagcaccgatgagcgccgcgacttcgatgcttactttgcggtgcggcgcagctccagatcgcaggactatagcccgacgccgaacgggatcgttgacgtcaacatgcgtgagtatttcgtcgccgacgagcaactcgcaagccatcaatattttggccataatacactcctatgaggaggcgcgcccaggacgatcccagccgcgccgatggattaacgtttgtgaaggatggacactgcgtccacgtcgaggatgctgatggtacggcgacggcgcggattgctgcgttcatggatgcgaatcaggtcagcggatggcgcttcgtgcaccacccatacatcctccggcttctgcgtccggagcaggaccgtcacttctgtgttctgggcgaggccgttgcagatgaacgtgaacttggacgagggagttctgtacatttcgagattcctttttggacttcgggtccggctcctcagccggtgaagagattatgcctgatcatcgcagtcgagtaaagcacttgtgtaccaattctccagttaaatggaaccaaagcgcggtatcgctgattgctacgctcccacgccatggcccttcttgctcacagacttcgaaccacaagctgatttccattctggccaggactcggccgaaggattcgagccggcaccggctggacagaatgtcgacattcacccgtcgattgatttcgtaccggcgaccgttgatgacgaataccaagcgtagagtttgtccgtccagacattcccagtatctggtttcataccgaagccaatagcgcttgctagcagggcctaccatagtcatttaatcgatgctcctggccgcgccacgcggtccggtcggcgggacgggatcgaaccgacccaggatgtagtcgggccggcgcgcttcctgaggacacacggcgagaaggcgccatcctgcgtccagggcatgctggagttcgtccgtgcagcagtcttccttgagcagcagacgattgatgctctggagatttggaccagggatagcagagccggtgaccgagttccagccttcgataccgtgcaccatctgcggctggttgatgtagccttctgacctgccagccaaccggctcgcggccagctccaggcgctccagcattggccgcagagcggcttccgggtcaacatcgtcccagagcaggaccaggttgatgatggtgtacggatagtccttgtccagatcccaggccgaagcggtcagacggcccaggccgatttcattacacatcacgggaacgtcgttgctccaggtggacggctcccagttccgctcgccaggattcccgattgttacgccttccaggttccccaggagaacgtggagcttgctgacatattccgcctccaaggctttccgctcttcgtcggtctggttgtggcgatagaaggatggagggctgacttttgcatggtagagtttcataactgttcctcggttttggaaggcttgaacgttagagaattgtgtcgcagtatttctcgaaaggactctggcgcttcttctcgcagatcgcacaggtgatttccaggtcgggcagctcgctgtaagtcttgccgaggtacagccagcgcttgcacaggctgcgaccgtccgacgtgaagaaatggactttgcgagcgtcgccgggttgcgcccagccgccctgatagttttcgcgcttgctcatggcgatatttccttttggatcgtggatccatggtgtacgttcagtcacccaaactccatctacatagatcaggactgacagagcagtcgcgccaaacccgaagcctacatagaatgaacctggatcgatttccatggtggcgctattagtggcgctattgcaatcgacttcaaagtcgaatagcgaatgaccaatcataccatcaccatgtcgatttcattgacgaagaaatggacatcgacaccatcggcgctgccggtgtaacgcagccgagtcgtcccatcaatgtgggcctcctcgacgccgacgacttccaggatggtgtcgttgcagtacagtttgacgaacatcttgatgccagagccaatcgcctcgaaggcgatctgcttgtacaggtcttgcttgatcatgctttacgctcctgtttgcggatgtattctgccctggcttcggcttcgagcttcgcccaaagcgcgttgtcgactggaccccagggacctgtctgagttccgtccaccggtgcgaacttgccaccggcgcgacgatacttggacagagttctcagaccgatgattttctcttcttgggaatcgagttggacgatcacttaacatacttcccgaagtagcaggtgtggaggatttccaggcccttggaaatggccttcagcttgataccgaaattcttgatcgcccagtccagatcgtggtgatagaactcgatgatgttgacgatttgaccggcgctgtagtggatgacgcgaaccttgccattccagcggaaatcttcgcggctgtttacggcctcgacttcgatagtgtcatttctgccgatggtccatttggagctagtcatgtcgcaatcctctttttggagcgtttcgcgtttcgatgaggtaactatacttcagtcacctcatcgagtaaagcccttttgaacagattgcctaaaatttctggaagacaaaatcaatcggtcgcgtcatcgatagcgaacgccgagcgcgccaggtcgatgatctctggccaggtcaaagtgaaggttttgccgtcatcgagaatgatgatgggagtccgcagcggctcgccaaccagcagttcgtaggaatgtttctcgctggatgcggagccgatgcgggtgtggagggtgagttaggccggggaaatctcggccgccgtaaaggccgcaatgcgaccgctattcagcctgacgaacaccgggaatgcgccgccctcgcgaatctcgctgatcacgccgtggccgccgccttgcgcatagacattctgtccaacagacaattttttgaggatgtcgctaaaaactacggttttcatcgtcttgccctcggtgatgcccggcgaaccgggcggggtttgctacagcatgcctgctttgcgttcggccttgatggtgtataccgcctcatcgaccagccactcttcagcttccaggtaggctttggcgacttctacggttacgttggcgaatttggctacgttctggattttggcttgcttggtcatttcgatttccttttgtctgaagggtttcgcgtttcgatgaggtaactatacctcagtcacctcatcgagtaaagcattttcttcagattatctgaaaccttttgaagccaggaattgccgccagagccagtcgatgtgttcgttgcagtaacgctcgccatcggacgacatagctaaggcgccatcattgatgccgaagtgggccgcagcgagacattcgaactcgaactggagcgttcctgggcgagggatatgggacatggcgtatttctgcacggtcagtgatcctcagaaggtttcgcgtttgcgatagccgctactttctgcataccgaggcgatagaattcggcctcttccctggccttggccagattatccctggcttcgcacgccagcttgtactgattgttggcattctggatgcttccgtccagactcctgtccagttcttcccgaagagccttctgcgacgctagctcggcctccaaatcctggattctgatctgaagctggcgattcctttcagacatctcgttttcgcgggcgatggagttctgaaggcattcgtcaaggcgagtattttcgcgcaccagctgatgcttttcgactttcgcctttctgcacgtctctcgcattgctgaaagctcactcgcatgcagatcgtcatccgggtctttacgctcttccttcgactccatccgcatatagtactggccggctgcgaaggcgagcactgcctggtcggcatacgctgcggcatcggtcatgtatctggatttgtagcgaggcagaaacttgcactcctctggatcccagaggagactatcggcaataggccagaatttgcggaagccatcaggatcgacttctacattgaccatttgcagctggccggcctccacttcgacttccagaggaacctgaatggtgccggtgatgtactggaagtacactatgctagacataacacaatcctcataagaagttgcggccaggaccatcccagccgcatcgtaatcactcttcgccttcgtccgcgctcagccactcttcgaaggcgaaatttaccttcgactcgacccaatcctgcagctcatcggcgaactcgtcactgtcgatgtccatggtgattcccataacttccatgttccatagcgcggcattcagttcgaactgtaccatctgctcgccatcgacttccaacaggatgcggtctgcgacttcatagtcgtctacatcgaacagatggccgcccgccaggaggtgctggacgaaagcttcatcgaggttggtgacttcgatctggacttgtttggtcattttcgtatccttacttagcggctttgaattgggctttgaggttggcaagttcagctttcagatcgatcatcgcctgaccgcgcaggccttccatttcagcctcgctgattgcgatcttggctgcgcggattttgtcgttgatttgatctttagtcatttcggcttccttttgtttgaagggtttcgcgtttcgatgaggagattatgccgatagtcagaatggaagtaaagtgtctgagtgaagaaatttctgtacaccgacgaacggtcgcgctcgactgtctgctgcggtgtcgatatactcggcctattgcgaacgatggactgattaaatgttcaagctcaatcctgcactgcgagcggtctggcgaactcgtgcccgttacaaagtcatctatggcggccgggcgtcttcgaagtcgcacgacgctggcggtatagccgttttcctcgcggccaactacaagctcaaattcctctgtgctcgccagttccagaaccgcatcagcgaatctgtctacacattgatcaaagacaagatcgaaaactcagagtataatggcgaattcatcttcaccaagaactccatcaagcacaagattaccggctcagagttcctgttttatgggatcgcccgtaacctgtcggaaatcaagtccaccgaaggcatcgacattctctggcttgaggaagctcactacctgacccaggagcaatgggaagttatcgagcctaccatccggaaagaaaactctgaaatctggatcatcttcaaccctaacgaagtcaccgatttcgtgtatcagaacttcgtggtcaaacccccgaaagactcctgcgtcaagatgatcaactggaacgaaaatccgttcctcagtgagacgatgctcaaagtgattcacgaagcctatgagcgcgaccgggagcaggccgagcacatttatggcgggattccgaagacgggaggcgacaaatccgtcatcaacctcaagttcattctcgcggccatcgacgctcacaagaaactcggctgggagccggccggatcgaagcgcatcggcttcgacgttgcggacgacggcgaggatgcgaacgcaactacgctcatgcacggcaacgtcatcatggaagtggacgaatgggacggcctggaagatgaactgctcaagtcgtccagccgcgtttacaacctggcgaagatgaaaggcgcctcggtcacttatgactccatcggcgtcggtgctcacgtcggttcgaagttcgccgaattgaacgatgccagcccagacttcaaactgatctatgatccattcaacgcgggcggcgctgtcgataagcctgatgacgtctacatgaagctgccgcacacgacgatcaagaacaaagaccacttcagcaacattaaggcgcagaagtgggaagaagtcgcgacccgattccggaagacttatgaagcggttgagcatggaaaggttcatccattcgacgaattgatttcgatcaactctgaaacgattcacccggacaaactgaatcagctgtgcatcgaactttcgtcgccgcgcaaagacctggacatgaacggccggttcaaagtcgagtccaagaaggatatgcgcgagaagcgcaagatcaagtcgccgaacatcgctgactcggtgattatgtcggccattctgccgatccggaagcccaaaggcttcttcgacttctaaacatagaaaagcccggagcgatccgggcttcgggtcttactcggtgtggttcctggcgctgagtgtcgacgaaacggcctcgccgacgcccagagcttcctgaccggccgcgagcgcttcggcttccgactcgacgttgaagtcatcaccttggccattgcctggcggaacctcgaccagcacggcttcttcgccttcgaaacgcaggtcataggtcttgtcgacggacagaccgtaacgagcgttgagcgcgtcccagagctgggcctcataggtacgcaggtcttgcagagctttctggtggctgagcatggccatgtcaacggcccgttgcagggtttcgtccaggacgttgaaccgaatgcgaagagcacgaatccgctcgacggtttccgcatccactacatgtctttcgatcattgcttttcacctttgctgaatgttacgttgtagccgttgtcggccaggtaggtcagggcgccttcgaaggaagttccgacgaggtgcttgagcttcatttcgcgttgcgcggccaaccagaatgcagttccggaaaactctgcgcggccttcggacaaaaccctgccatcaggcccggcgatccgtacatggacggaagatagcttgatcggcatcagtgaatacctccactggcttgcgacggcatgctttcggcgcgagcggcttcgcagtccgggcagggacaggcttggcggacgcgctccaactcgtcggcatccatgacatagagcttcccatcggcagtgtcatgtgccatagcgatgttcgggaagtcggttgcgctcaggccggcgacagtgcggatttcgtcccagagcaccagatgctcggcattcagtcgggcggcgagcgcttcgtgctctttagcgacgcgcgccatgaactcgtccatccggaatgcgaattccgcatcgatggcacgggccgaggccatggagctgagtcgaatcggttctttcttcatgatgattctcttttggttggtggttgttagctgctcaggcctattacagcctgagcagcatgatgaagatgaacgcaaggaacgcgaacggcacaagtatgccggacatcagctttgacaggcgctgcatctcagcgtatttctcggtagacattccgtgctgcgccgcctcggccgcgaagcgggctttcgcctcgataacttccgggcgcagcgacaggacatattctaaggcctcttcccgcgctttttcggcctcgaccgacctagggtcgcgggccgagacttcgctgtgccctggcctcgcgggatgggcttgcagcgatggagggagttcagcggccacgactccataatcggcacaggcccaagcgatcccaatgaggatcgcgaggatggactggacgattcgcagcatcactttgtcgctagggaagctcatgatcaatcctccaccgaccgaacgatttccatgttgcggccggcattggtcccggcattgaaggcgcgccgaccgtcgctatcgtccagacgcatgagcttagtaacattagacttcttgtagccaggatcaccgaaatgttcgtgaaccgcagcttccttcgccaccaccagagacgttccggcagaagataccagctccatgcgcttcctggtgatggattgaaggcgatagctgatttcctgggtcgcggccagcttgaattgcgcggcaacctttacgttgaaacgttcgtacccttgagacttctgatactcccggcacagacgatcaacggcctcgaccaaggagttgaacatgttcactgccagctcaacgtccgacttgtagcctttaaagcgtacggcatgaccccagcgcttggtagtgcttccgtcgcgggcactcctggacgccttagccgatgctctgtggttgttgacgccaccggcgaaatccatgatgcaatcattgtacgtcgccacggccaccgagaagaacttcatccagttcgggattgcggaatagtaacgagtggcaatttgctcatcgaactcttcgcgaatctcgccggtcgcttcgaagtcgtgaaggtcatatttgtccttcaatttcttcacgcgctcggctgcgatagcagcttcgtgcggactggaggagtcggccgccatggcggtcagtttgcggatgcggtctttcgccttctcgatggcttccggagtgaattcgttctggtcggtcatggtcggttccttttgtctgaagggtttcgcgtttcaatggagctattctgccttcattcagaatggaagtaaagcactttcttccactatttcggcatcgactggaagaaattccagatccaatcacctgctaccagcaagaggatgagggcgacaaagaacaggacggcggccgcgagctgtgcgcccggcttcagcttgggatggctgagcttgggctctgcgggaacggatggagcgttggcgctgcgaccgtcttctcccaggccgtagccgatgccgcgctcgcgcgcatggagcgacaccagaagtttcagatactcggtctgcttttgcgactcttcgtagatgccggcgacggcgaaccagagggcgaacacgacggacatacacacaacccaggcgccggtcagcaggagggccagcgggccgatgacgaagacggtggcagccaggacgattgcgccgccccagataatgaagccggccagaccattggtgatgtcgatacagaactttttcatttgcggattccttcggttacaggattgaggggatttggaactctgcgccaccgagcacatcggtgacgacttcccagagcgtcggcactgaccactggtagcggtcgaagtcggtttcaggatcgacgcccagcgtcacataggaagtggcaggccatttatgaacgctacctttccgcatgagagtcgccacgcggccgtcaccgagcgggttcgtcttgtgcggaacgtacgcagacatcgaatattgctgcccagcatcaacgatgaatctttgtctctggcgcagacatacagagccaacaggattccaaccgcgaccgccgcaggcctggcgagccgaagaatgctcatacccttcatgagtcatttcgccgaggcaagccgagcgatcttcgtaataattgatgttctccatcgatccaaccagcaccagagactcgaaatcgaatcggtgatcgtgaatggacgagtgatggacgcaacgccggcgcggcaactccgggtgccaaacatggaggcgccctgccgggagctggacctggatgaaccccaggccgtgcaaagtgatcttgtccttcagcggatcatggactgtactcatggataatcctcaatagcagaagtgtatggtgagagttacgatggccaagccggtcgcccatagaagggcgaaccaggccatagcttttatggttatgtagatcatccgaagaattttccggcacagatcgggccgattcccatttcgatggacgcgtggttggtcaactcgcgaccgcagcaggagcattgaccagtcttccggccgtaggcgactgccgattccatcggcttttcgaacatcttcagaacgtcgtcgtgctcggtatcggtgcagtcgcgactcttgatgaatttgccattggtgatacggccgaggtagatgtcgcccaggacgtacaagctaccggcgttccggctgtgagcgctagcctctttcaccacaacgatgagcggctcctcgccttcgccagccaggcgaattttcgggcgcttgattccagattctttcgccttctcaaacgccttctcgatgccggaaatgtccagagtcggcgcagcagcttcctgcgcggccactttctcgcgatacttggcgaagttttcgatggcgcgcttcgcagcagcgatctgattttctgtcaaggagccgtatttatacaacgactcctgaaggctctgagcgaagctgaaggaatttccagtccaccactcgacgatgtccgggtgcgcggcttcgaaggccttaattttgaggtcgcgctcttgcgcagcgctacagattttctcgatgcgcttttctgccgccttagcacggctcttggcgcgctgctccgggctggttttgtactctttgtatccgacaccgccgcaggcgaaacaggcgcgaccataagatgaagggccacggtacaggccggtgcctgcgcattttgtgcacttgtcgcgatacagcttcacttccttccgggagttcgggcgggcgcccatggacacgtcttccagcgtcttcggcgcttcgtcagtgatcgctacggtagcgaagtcatcgcccaggtcttcgaagccggtgaacagattctctgctgcgttcatatcgattctcctgtttggaaagttcgtttcgatgagttgactatacgccagaaatggaaaaacggtagcgatttctcactaccgttcgtcgggtcgaagataatcaatagatgtcgctattgatcttgaacccatgctcagcgccgtcgttgtagtcatactcagcatagctgtcgcagtagtcgttcaaatgctgaatgatgcctagaacgtcgttagcggccttgtgccgtttcgcggcgatggtcttggcgatgctatcgccgacttccagggtttcggccgtccggcgatggatcagtagacgactccaaagatagagccggacgcgacgaattatgtcgcgatggcgctccagtcgtccgtgcagctcttcaatttcttgctcgcgagatttcaccactcgtcgaagctgttgaacttccaattccaaatcggccttagtagccatgttcacctcagaaaggaaaatcgtctgggactccaggaagctcgacgattattgttgagcctgatcggtccagaatgcatccgaccgagccggccctgtggggatagggtctacacgaactataacaggtgacttccaggactatccgccaggtcgatcctccacaccatctacagactggtgggcgcttcgacttcagttttcgttcgtccaagacggcgcgtctgtcgcaggaaaggcagcgcgccttaaccgacgtaaccatgggtatagtcgatcattcggatgagatcatcatcctctgattccctcgacttcagaccgcccaaagagtcagactggccgttgcatttcgcatcgatatccatcgaagacaagaatcctgccgatactacggtgatatcaactttgtcgccggccttcttgaagccttcgcactcagcatcgagggccacaaccgcactcgcagccatgttcacatgacttatgaggtcggggaagatcacgggaacttcacgcgacatgccacggaccgtcatcttcaggactacatacttcatactcactatcccttttgtatgtgaggaaagaatttactgttttccggatggtggaagcgctcggccgcaggcggtcttccttccggacattgaatcgtcgaaggcgggaaaaccgcgcaggcgataatcgccgcgaggagtgcagcggatgtcgacatccagagggcggtttccaggctcacccgaacttccggacggcgcggcttcattcgctccaccctcttcccggttcataggatggtagactgccgccgcgaacccagttgtcccacatgcggttcagaccagtcggtggctggggcggcggactgtagaatccgggagtctcagtgctgctcaggaaataaggcgtgcaaacggcctggacggccagttggtgccgctcccacatcttatcaatcgctcttagcatgacgtcttcgcactgagccttactgtcgaaccgtctgctagtgtggtccggtatctggatgcatccgtctccagtgcaaaggaaagcagtagcaatccacacggtgatactcgccatttcgtcaccctctttagttgatgagcagagtctattccatctgctcgccaggagtaaagcgcttttcgtcgggataaatgccgatgatgtctgcgtcgagcatccaaatgtccacggacggatcgtcgctgctgatttgatataggttgtacagctcccgtccgccgacagcacgctcacctcgcggctcaaccgccagcaccttgccgtgtccttctccgtgctcgtccaggtatatgacgtgatcaccgacttcatagctttcttttgtgacgaggcgtgaacgcgagctgttctgcgattctactacccaggaatccagcacgccgcctttcacgtcgcgaaacaatcttgccgatttgtcgcaatcgaatacgcccagaacttcgccgtctttcaacacgatatgtacgattggcaaaagagtattcatgtttaatctccattggttgataattagagtctaatctgccgaaaagttcccgtaaagaattattttctcataactgattagttgcaactgttaatctgatgtatatgtttgaatctcttttgaacgtttgatgtttcccctataataagcgcacacagccaacaaccacgtggaactacaatgtttaaactttcctggatattcgggcgcaaaaaggataatgctgcctgttctgaatcggcgccggagaaagtcgcacaaatccctcaacacgatccgctcgaccccatgatcaagctgggaaggattcgcggctggaacgtcgagccggagaaagccccggtaattcgtagtgtgaaagatttcctggagccgggcctatctgtagcaatggatagtgcgtatggtgatggaccaactccggccgcgaaggctgctgcgggcggccagaatccctatgtcgtcccgactatgttgcaggactggtacaattcccaagggttcatcggataccaagcttgcgcaatcatttcccaacactggttggtggacaaagcttgttccatgtctggggaagacgcagcacggaacggatgggaactcaaatcggacggcaggaagctatccgatgaacaaagcgcgctgatcgcccggcgcgacatggagtttcgcgtcaaagacaacctcgtcgaactcaacagattcaagaacgttttcggcgttcgcatcgcgctgttcgttgtggagtctgacgatccggactactacgaaaaaccgttcaatccggatggaatcacgcccggctcctacaagggaatctcccagatcgatccatactgggcgatgccgcagctcactgccggctcgacggccgatccgtcttccgaacatttctatgagccggatttctggattatcagcgggaagaaatatcatcgcagccatctagtagtcgttcgcggaccgcagccgccagatatcctgaagcctacatacatcttcggcggtatcccgctcacccagagaatctatgagcgcgtgtatgcggcggaacggacggcgaacgaagccccgctgcttgccatgtcgaagcgaaccagcaccattcacgttgacgtggaaaaggccatcgcgaatgaagacgctttcaacgctcgcctggcgttctggattgccaatcgcgataaccacggcgtgaaagtcttgggtactgatgaaagcatggagcagttcgacacgaaccttgccgacttcgacagcatcatcatgaaccaatatcagctggtcgctgccatcgccaagactccagccacgaagctcctcggcacttctccaaaaggattcaatgccactggtgagcacgaaacgatttcttatcacgaagaactggagtccattcaagagcacatattcgacccacttcttgaacgccactatttgcttctggcgaagtcggaagaaatcgatgtgcagctggaaatcgtctggaaccctgtggactccacgtccagccagcaacaagccgaattgaacaataagaaagccgcgaccgatgaaatctacatcaactctggcgttgtgtcgccggatgaagttcgcgagcgtctgcgcgacgatccgcgttccggctacaaccggctcaccgacgatcaggcagaaaccgaaccgggcatgtctccggaaaacctggccgaattcgagaaggccggtgcacagtcggccaaggcgaaaggcgaagccgagcgagccgaagcccaggcgggcgccgtagagggcgcaggcgacccggttcccgccgctccacgcgggactaagcctctcgcgaaagcggccgaggaaggggccagcgaggccgctgaaccgccgtcgcggccggaccccaaggccgaactgcggaacttgttggtcgatcttttgtcgaagctccaagacctggacgacattaaggcgccggacggcgtagacatagagcacaatgatgcgcctggcgtaaagcgcacgtccaaacctggcgtgtctggcatggagccttcggtgttttcgtccaaccgcatcgtcgggcctcgtgatcattcggaactccagagaatcaaggtgaatggaataaccaccttgatcgaaaatccgcgcggaagcattcggcaaggaaaggatgggagttggcgagttcagatgaaacaccactacgggttcatcaagggaacgaaaggcgctgatggggatgaagtcgattgcttcgtcggtccgaatctgggatccaaacgggtcttcgtcgtcaaccaggtgaacaaggaaggtcagtttgacgagcacaagtgcatgctcggcttcaacaacatcaacgatgcgaagtctggatatctgtcctgcttccgcccaggttgggatggtctcggctccatccatgaagttgacctacccgctttccgtcgctggctggcgaacggcgacacaaccaaaccgtttggaggcgagtgatggcattcaaggcctccaaaaagcgcgaacgccgggcacctcttccggtcggaagagggaagcccataattccatcgtcaggaatcgaggcctggtatcgaaagcagatgaaggatatttccaagctcatgatcgccgactatcgaagcgagattgagaaggcgctgtcccagcctgcggccgaacggttcttcgccagcgacgaatccgttaacgtcctgttcaagatgacccttcgaagcctacagcagcgatggaaccgcatttttgaaggcttcgcggccaagatcgccccggagtttgtcaaccggaccgaagaagcggccaccgccgcgaccctgcacagcttgtctgtggccggcgtcgatcagccaagagctgcgtacaatgagagcgtcaggaataccctggaggcagcaactacttacaaccatactctcatcaccaggattcaagaggaagtccacgagaagatttatacatcagtaatgttgtctctgacttccccaaatccggaagagcaaggaacttccggcataacgaacgcacttcgcaaagtcgggaagttctctgaagatcgaatcgaactcatcgcaagagatcaaaccagcaagctttacagttctctgagcgatgagagaatggcggaaaatggagtcgaggaattcgagtggatgcactcttctgccggcaagactcctcgccatacccacctggagaaagatgggaaaaggttcaagctgaatgaccccagactttgggagggtccgaaggccgaccaggggccgccaggatgggcgattaactgtaggtgcagaaagataccaatcatttgatatcgataggagcgctatatgccgttagttcatggcacttccaatgaggctcgttctgaaaacatcaagcgggagatcgaagccggtaaagacccaaagcaggctgcggccatcgcttactccatccagcgcagtgagaaagggaagacggcgaaagattgttcgcctgagctcgttgccgatcttcgcgccctggtggacgctctgtcgaggctcgtgaaatgaaccgcaagacatgccggcgccgactcgtggtcgatgtaatcagggccaatattcacggcggattcttcagcctgaagtttgccgccatcgatttggcaatcatcggcgtcgccatcttgatgacttttggccgataatgctgagaaaatctggattctgactaaaattctagtccggatagccgcaagttaccgtttacggaaaatagcagtaatttggaaagcctactgccgcgaggctttaacagagctagttcctaatttccgatttagccgcgtgcttcaaaagtatatagcctgggaaattagaagtaacgtcccaatagaattcatctataagtaacgttataatataacgtcaatctatatgctctagacgtattgaaatttaatttttaatcggtaaattggtaatttgaattagtttatgagttgaaagcctcgcggcagtaggcttagacaaatcccgtcaagttccctagaccaaattaccggattttcgcggctgaggaaactggtaattagatcataatacaaattatagtgtaagttaacagtcgcgactacatctaattattgttccgcttatttacccttagatgtactgcgtatataatacagccatagtccacgactcttcgaattaacgatggcaaagtcgaaaagaaaaattgacgaaaatggatatatgaccatcgagggttgcccgatcagctcttatggcgttttccaatattctgctggtcaactcggtcttccgggcgatccgatgcggattgtcaacgtatatcgcccggagtctgccgtcagcgatcctgagtacatcgaatctctgaagaatctcccgttgatcgacgagcatgagatgctgtcgggattcgacgacgatgacgacagtgtggcccccgaagacaaaggggtggagggcatcatcacctccaacgcttactacgaagccccatgggcgcgcggcgatatccgcatctattcccgcaacatgcagaatcagctggaaaggggcaaagaagacctgtccctaggctatagttgccgctacactgagcaacccggcatctggaacggaacgccttatgaagtcgtccaggacaagatgcgcggcaaccacatcgccctggtaaaagaggggcgtgtgccgggggccagagtattggatggtctgtgttttgaccatctcagttttgatttcagaccatccgatgagggtaatgaaatgagtctcaagaaagccaagcagaagccccctgtccagcgcgtagggcaagctgctgactcggcggtcgaagagttgcgcgccctgtggccgaagctctctgcgtctgtccagaagttcctgggcgaagaggcgcaggagccggagcatcaggaaggcgcggccgctccggccgaaccgaccgacagcgagcacatgaccgagcatccgactctggaaggcgctcagaaggacaacgaagagcatgaagaggcgccttccgttgtcgatccggctgtggccgccgccgagtcggagcgtcaagaaagtgccgcatccgaaatgtccggtgaaggcgaagtcgccgaactgatctcccaggtcaaggccattctggctcgactggagggcacggcggccgaaggggcggacgaagagcatggcgaaggcaaagatgtcgtcgagggtttggaggagcagagcagcctcagcggctcgcaaaccgccagcgacgatggtggtgagggcaaggataacagcgaggaacttcctgaaatggcacagaagaacgcgcaagatgctgcaattcgcggtctctatcgcgacattgctgctaaagatcgcctctacaagcgtcttagctccgtggttggcgcgttcgatcaccgagctatggactcggctgaagtcgctgtttacggcgtgaagaagctgaacatcaactgcgcgaagggccaggaagctctggcactcgacatgtacctgaaaggcgtcgaggcctcacgtggcgcggccagccgtcaatcgaaagcccaggattcggccggctctgctccgcagtgcgccgagctggacagctacctgaagggggagtaactcatgttccagaaacaagtttaccgccagtacactcctggttttccgggcgatctgatcgaggacggcccgaagcgggcgcggccgggtcgaatcatgtctctgtctgccgtaaatccggctgccaccgccaccggccccaaccgcatcagtcgcgctttcggttacgccggtgacgtcagcgccctcggcgaaggtcagccgaagaccatcgcggctcgtgcttctgaagtcgtgatcggcggcgccaacttctttggtgtcctcggtcatccgaagcactatgccctgttcggttcggccggagactccctggctcccagctatgatctgcccgatggcgccgaaggcgagttcttcgacatggccaccggcctggtcgtcgaaattttcaacggcgccgcaaccgccctggacctggactatggtgacctggtcgcctatgtacccaacaacctgcctaccgccgacaacgcgcttggcctgccggcaggcgccctggtgggcttcaaggctggctccatgccgaccggtttggtccagattcccaacgcacgcatcgttaacgccatcagtctgccggcccagtcggcggggaatttggttgctggcgttaccatcgtccagctcacgcagtaaggaggcgtcatgagccagatcagcaagacccattcgcgcctcgcaggccgcaatgcgaaacctttcgacctgaaaaacatcaccaatgacgccgtggcgtctctgagtcgcatcggcctggtattcgaccacgccgtcgtccaggaccagatcaaggccttggcgaaggccggcgcattccgctccggctcggccatggacagcaacttcaccgccccggtgaccacgccgtccatcccgactcccatccagttcctgcagacctggttgccgggcttcgtgaaggtcatgaccgctgcacggaagatcgacgaaatcatcggcatcgataccgttggctcctgggaagatcaagaaatcgtccagggcatcgtggagccggccggcactgcggtggaatacggcgaccacaccaacatcccgctgaccagctggaacgccaacttcgaacgtcgcaccatcgttcgtggcgagctgggtatgatggtgggaaccctggaagagggtcgcgcctcggccatccggctgaacagcgccgaaaccaagcgccaacaggcggccatcggtctggaaatcttccgcaacgccatcggcttctatggctggcagagcggcctgggcaaccgcacctatggtttcctgaacgatcccaacctgccggcgttccagaccccgccgagccagggctggtccactgccgactgggcaggcatcatcggcgatatccgcgaggccgttcgccagctgcgtattcagagccaagatcagatcgatccgaaggcggaaaaaatcaccctggccctggccaccagcaaggtggactacctgtcggtcaccacgccatacggcatttcggtttctgactggatcgaacagacctatccgaaaatgcggatcgtgtctgctccggaactgtcaggcgtccagatgaaagcccaagagccggaagatgctctggtgctcttcgtcgaagacgtgaacgcggccgtcgatggaagcaccgatggcggcagcgtgttcagccagctggtacagagcaagttcatcaccctgggtgtcgaaaagcgggcgaagtcgtatgtggaagacttctccaacggcaccgccggtgcgctgtgtaagcgtccgtgggccgtggtgcgctacctcggcatctaaccgatgcctattcaccaaaggccggaaacccggcctttgttcactctgactctgactcggttgtaggggccggttagggcataattactaggactacgccaatgactgtttacatcgtttccgccatgactcaatccgtgtcttacaatgcgtatgacacctctgatccgtccaatcctcgcctccagcgaaagattctgattcgtggccgcgccggcatcgcatccgaaacttccggcttcggcgacatgatttccgacgcggccgggcgtccgatctggaccccgcagggcgattgcactgccgtgagcgattcggatttcgagctgcttcaggccaataagattttcatgcgtcacatggacaagggttatctgcgagtcgtgaagacagacatcaccagtgaccaccagcggatttccaaagagactcgcaccatggagcgcgatggattccagcctctggacgctgatcgtctgcagcagaaaatcaaggtgaccaccgccagcgcttcccaggaacaagagttccggatttaaccgagggtttcggtatggtgattttcgacgaacataagtttcgcacgctgtttccggagtttgctgatccagccgcttatccggacgtgcgcctgcagatgtatttcgacattgcgtgcgaattcatttctgatcgcgattcgccataccgtattctcaatggtaaagccctggaagcctgtctgtatcttctgaccgcccacctcctgtcgctgtccacgatgcaagttcagggcgcggctggaggtggcgtcactgccggtgggacccaaggcggtttcatcaccagcgctacggtcggcgaggtcagcgtggccaagctcgcgcccccggccaagaatggttggcagtggtggctttccgggacgccttatggccaagagctgtgggcgctcctcagcgtcaaagcggtgggcggattctacatcggcggtcttccagagcgccgaggcttccggaaggttggagggacgttctggtgatccctggtgcgaatcttctgcgaatggccttcggggtcatcggcactcaaattgtgaaatatcgcaagtttgagcagcgagtgaagaatgatcaagctcagtacgtttccatgttcgaggagcctttcgacctggcagcgtctgtccagcgagtccgacgcgatcagtatgtccagtttaatctggagttccaacggaattatgttatgatcttcgccaactttgagatggttgacttggatcgcgatgtggccggtgaccagttcctctggaccggaagagtttttcagctggagtctcaaggctcctggttttatcaggacggctggggagtttgcctggccgtggatatcggtgcggccaagctaactgatgacgggaaaccgactttctaggtgatgtatgtttgacggcgaactgatagcgaaaatggttgtcgagctgaatgcggcgatgacatctgctcaagaggctttgcagttcccggattttgaagtcgtccagaaagctcagccgacccaacagggaacgtcaaccaggccgaccatctttttccagaaactgtttgacattcctcgcggctggcctgccaccgattggcacctggacaacacgacccgcaaatatgtagaaataactcgacagcatgtagagacgactttccagatcagttcccttcattggcagaatcctgaaataactcacgtggttacggcttctgatatcgccaactatgtgagggcttatttccaagctcgatccacgattgagcgcgtaaaggaactggacttcctcattcttcgcgtttctcaaatttccaacgaggcattcgagaacgacaatcaccagttcgaattccatccaagttttgacatggttgtaacttacaaccaatatattcgcctgtacgaaaacgcagcatattcggccgatggggtattaataggcgtatgagtctgaggcgcgattcagagctaatcgccgcgcacctccagatgttaagagccatgcgcggcaggtccgtttcagccggatggtattccacggctcgatatcctgacaaggcaggcggatcggtcggaatacaagtagcgagaatcgcacgtctcaatgagtacggcggaactatcgaccatccgggcgggaccaggtatattagggacgccattgttcggggccggtttgttggcgttcggttcgtcagaaacgactttccgggagaaaccgaggtaactaagcctcacagaattaccatcccggctagaccgtttatgcgatatgcttggaacttgttttccgcagatcgcgccgcaatccagaaccggatagccatgaggctggccagaggacagatcactccagatcaagctcttgcccagatcggcctggcgttggaaggatacatagccagaagcatcaggaccgggccatgggtggctaactcagcatctacggtcaggagaaagggattcaacagaccgctggtcgatacggctcatatgcttcaatcgattagcagcagagtaacataaccaggagatcatccagtgatcagtcagagccgttatatccggatcatttcgggcgtaggcgcaggcgctccggtcgcaggccgaaagctgattctgcgcgtcatgactaccaacaacgtcattccgcccggaatcgtcatcgagttcgacaactccaacgcagtcatgtcttacttcggcgcgcagtcggaagaataccagcgcgctgccgcatatttcaagttcatcagtaaaagtgtgaattcgccgtccagcatcagcttcgctcgctgggttaacaccgccatcgcgccgatggtagttggtgacaatctgccgaagaccattgccgatttcgccggcttctccgcaggcgttctaaccatcatggtcggcgcggccgaaaagaacatcaccgccatcgatacgtccgccgcgacttccatggacaatgtggcgtcgatcatccagaccgaaatccgcaagaacaccgacccgcagctggcccaggctaccgtgacctggaatcagaacaccaaccagttcaccttggtcggcgccaccatcggtaccggcgtcctggccgtggcgaaatctgccgacccccaggacatgtccaccgccctcggctggtccacctccaacgtcgtcaacgtcgccggccaggctgccgatcttcccgacgcggccgttgccaagagcaccaatgtcagcaacaacttcggttcgttcctgttcgccggtgcgccgctcgacaatgaccagatcaaggccgtgtcggcctggaacgctgctcagaacaaccagttcatctacacggtcgccacttccctggcgaacctcggcactcttttcgacttggtgaagggcaacgccgggaccggcctgcatgtgctgtcggcgactgccgccaacgacttcgtggagcagtgccccagcgagatttttgccgccaccaactacgatgagccgggcgcttcgcaaaactacatgtactaccaattccctggccgcaacatcaccgtttccgacgataccgttgcgaacaccgtcgacaagagccggggcaactacatcggcgtcacccaggccaatggccagcagctcgctttctaccagcgcggcattctgtgcggcggtccgaccgatgcggtggacatgaacgtctatgccaacgaaatctggctgaagtcggctatcgctcaagcgcttctggacctgttcctgaacgtcaatgcggttccggcgagcagtactggtgaggcgatggtcctggcggtgctgcagccggttctggacaaggcgaccgccaacggcacgttcacctacggcaaggaaatcagcgccgtccagcagcagtacattacccaagtcaccggtgatcgccgtgcctggcgccaagtccaaaccctgggctactggatcaatatcaccttctccagctataccaacaacaacaccggcttgatcgagtggaaggccaactacacgctgatctattcgaagggcgatgccatccgcttcgtcgaagggtcggatgtgatgatctaatggtttgcggcggactcgatccgccgcaaccttccataaatggagtgaggagtaagcaatgatcaacatttctgcgttcggctcgatctgccagttcacggcaagcagaactttcccgaacggattcaccgtcaccgagttcgccgacgatgccgatcccatcgacagcccgccgttcaccgctgccgataccggcgtcggtctcaacggtgacatggtagtttggaaccgggcgaacatcctggaagtagtcgtcaacgtcattccgaataccgagggcgagcgcaacctggcagtcctgctggatgccaaccgcaccggaaaggacaagtcgggcgctcgtgatgtcgtcggcctggtcgtggcgatgccggacggcagcaaaatcacctgcaccaacggcaccccaatcgacggcgttctgatcaacgcggtggcaagcgtcggccgtctgaagaccaagccgtatcggttccgatttgaaaaagtgatcaaagccggtactagctgatgaagaaaattccgctgacagcagtccccaatcaagcgatctcatttaacgccggtagcagctattggaagattcgcctgtaccagaacatggacatgatgaatgccgatatcagccgcgacggcgtgatcgtttgccatggggtccgctgcttcggcgggattcctcttctccagtacagccgtcagtaccgacctgactatggcaatttcgtcttcgaccgcgacgccgattggacattgttcggcgacggcatcaacctgttctatctggacggcgccgaattcgccgagtatcaggcgcttgccacgaggaaagaatgagcacatcaacgatcagaaccgggacgaacaacgatatccttttggacgacaatggaaacatggttatcctcagggatgtcgaagcgtgcgcccaggacgttcgggcggcgatgctcatgcgcaccggcgaaaacattttcgatgtgaactccggtgtgggatatttcgaatacatcttctcgccgcagaaaagctatgatgacgctcgcaaatccatcgcggatgcaattttgtcctcgccggatgtgaccggcatcgagcagctggacatcgacatcaccggggaagtcttcggcgtcgatgctaaagtcatcaccatccacgggcctgttaccacaggagtttgaaatgagcacaatccgcatccaatacgccaacggcacccagctgttcctggacggcaaaaatccgccgctcctggaccctctaccctcgttcaacccgtctgtagaagatctggaaggcctggaccgcgaaaagaacaccggcaagggcgactcctcgccggccggtcttcccgttcccccggtaaacgtcgattccaatgtcgacaacggcggaaccatcccggctccggtatcgaccgacgctcctgcggccgaatcggccccggaaggcgcccaggaagctcctgcagcgggacaaggcgacgagaaaggcgccgaggaagccccgactaccgccccagtagaaaaggccgaggaaacggcctcgccggccgctgaagaggaagccccggctcccgccaaggccacctctcgcaaaaccaccagcaagtaaggactcgacatgatcaacgtcagcggcttcggcacaggaattgtaatagtttccgcctcatcgttcccgatggggttttccttgtcgaagttcgctgatgatgagagtccgatatcctccaaagagctggagccgttcggatatgagatgctttatgacggcggcctattcgcctttgacaaggctgctcctctggaagtatctgtatccgtcatcgcagggagcgaggatgatattaaccttcgcatccttctcaattccaaaaagggatcattccgatttcttccgggaatcatcccggatatgacgactctcgtggccactcttcctgatggcggccgcaccgttctgtccaatgggactatcatcaagggtccggccatcgacaccatacagaacaccggacgacgcaaaggcaacacgtacacttttgttttcggtagctatcttggcgcccagactgcgcgtcaagccatttctaacgttatccaatcggtactggaggtggtctgatgttagggattttcaccagcctcctaagttcgcgatctttttcgattgtggaccaaaacacaaaccagctagttgctgcggatttgaggataagccgggtcaacacccggttttcttctgtagggcaacgccacatgctggaagatggcaagaccaagatggattccagaacgatccaccctatggaaatcatcgtcgaagtattttgcccttcaattgatgtcgtcgatcagatcaatcaattgctcctggatcgcgacactctgtacaaagtcatcactcgcggcatggtattcgaacggatgatgtgtaccagcgaagcgctcaatcagactccggatatgatatcggcgactcctgcgcggctgacattctcccaagttctcgtccagaatcccaagcctataatgttcagaaatgcaggggactcttctatgatcgaccgagggctggccctagctgaagacgtggttggctcggccggcgatctgttcgactacgcagtaaacggcgtccagaacgccgcagacttgttctgaggtgccaattgaactctttcctcaagtctattctcaacacgcctactctcaccatacgtgatgatgttaccaaacttcctgtctggaagagtcttcaagtcaagaaagtggaaatttactcgccggcttccgtagtgtcgaaacctctggcgacgaaagaccagacggaagctcaagtgtacaccgaagctctggacattgatgtgaagaatggaaagatcatccaaccggtgcgactccgcatcaatgctatctgtccggacctgtccaccgttgaaagtatcatgaacgctttcaatgataacacctcgactttcgctatcacttctaagtcgatattggccgataaaatggccatcatgacgctcgatgtagatcagtcgccagacatgttgaacgcggctgagatcaatatggaattcgagcaggttgagcctccagtattgaatgaattcgatcctgcgttccctcaagatagtccgacttatggggtacagattcaatctctttctgatgctaatttgctggatttgggcgccatcggcgattcgatatcttcggccgcaaaatcgctatataatcgcgtgaccagctacttctgaggatgtatcatgcttgaaatcaatcttcccgatggccgtcaaactcgcgtacaaatcgaggcgtggtcggcattggatggctgggaactccagcgccgtttcgtcgaattcgctgtcagccaagattccgacttccgccgctctttcaccatggaaatcctgggctatgcgaaagtgctgcttggcgacgatgacaccggcattccgctgaccaccgcggcagtcatcaacaaccacctcggccactggaagaacgtggaactggttttcaactctgttctcaagcacaatggcatcgacccggccacgcacgccgaccggccggactattgggaacaagtcggatcgcagatggccatcgcatttctggccgaggcgtccaagctcattggtccagcaatgaagatcgccgaaggactcgccaacaagccggagtgattcatgtctagtgatttggatgaattcatacttcggtatgaggccgatactgccagagccgagcgcaatctagagcacctccagaaccagatcaggcgcgtaaacagcgcatcgacgagtggccttcaggatttgcgccacttcgcagacggcgcggccaccgaactcggccgagtcgttcctcagattgattctgtgacgagcgcaattcgcggaatgaacgcgcaactggcaataggcgcaactggcgtggccctggtcgcggccggcgtcaaggcgttcatgaacaccagggaccagtacaatcagcagcgcatccaggcgatggacatcggcatcgccccggcacgcttggaagagtaccagagaaaattcgttcgccagtccggtggaaccatcagccgcgagcagggcgcggagatgaccaaaaatctggcagacactttccggcgtgcttatcgcgatatcgggcgagtcggcccggaagcgcgaattctgcgtatggcaggcgtcgatgtcgggagcttccaaaagggcatgcggccgctcaacgacatcattactgatctggccacgaaaatggccaagttgaagccggacgaaatttctgcctacgctgatgcccttggcgtctcgcgagactacctgagcaccctggcgaagatcggcccggccatgggaaaagtcactgagatgacgactgcggaactccagtccagggtccagggcgagtccaacatccagaaattcaacgatgccctggcgaatctcaaccagacgttcactaccctggaaaaccgagtcggcgaaaagctcgcgcctgcgttcaccaagctgatcgaaatcatcgacaagatagtccaggctattcccaatgaagtggaaagcttcgcgaaggacaccaaatcccgttgggaagatggagtgctcgggaaggcgaccgttggcagtgatatcctatccctcctcagccccggcgccctgctcggtcgcctggcagcgtgggggactcgtcgcggcatggaagaatcagggctcatcgacaaggacaaggttcccggcgctcaaaccagcgaagacctggccaagaaacaagaagaccaggacaaggctactaagtccatgaaagagctagagaagctggctgaccagaccacgaagtctaccaatgattttgcggtggcgatcaacatgttcagtggcgcggtatcgtcgttcgcgaatgccgttgacgagcgccaagcttgggcagcctgggcgggggaaattggtcgggcggtcggcatgggaagcaccgcgccgacttcgcgggccaccggcgtctatccgcacgcgatctatgatcagtcgaagagtggcgcggccggacaagtcttcggcgagccaatcggcgcccagtctcttcgcaatcgcatgttctcgccgcagcgcaaggccgagccggtcaccgttccatcgtacatcaacgacatcatcaaagatgcgtcgaagatgtacaacattcctgagctggacatcaagaaactcatatacaccgaaagccgattcaacgccagggctaccagcgaagccggagcgaaaggcctcatgcagctgatgccggaaatcgccaaggcgtatggtataactgacgtatatgaccctcgccagaacatcctcggcggaacgcgcctattgcgggaaaacctggatcgagccaatggcgacatgcggttggccttgacctactatcacggcggcctcgatccgaagaactggggaccaaggactcgcgcatatccgggtttggtgatgagcgctccaatcgagctgatggaagaggctcagcgcaagcagaaggctgcggccatgaccgtcgccaacgagacgttcgccccggaaggcggcgacatggacattcgtccctatgatggcgggcgactggaaaccccagaccagggcaagaaggaagatgagcgccgcgaagcccgtcgatatgacgacagggttgtgcgaccggaaattcgcatcatcgaccgcatgccagaccgcagcgacggcgaaatcctcaagatgtctaggcgtcaagaggccgaccgggcagattctggattccggaagttcccgaatcaagttcgcggcgagaccaagcagaacatccaggctcaactcactgcaggagccatcgcgcaagtgatcggcgttaaccccaaccagatcatgcgccgcgaaatcagccgttctgacttgctgttcggatacaaccaagccatcctgggcaagcaacaggagatcaaggccgccgcgaccgaagccaacaacgtattcctgtctccagccaagcttgccgaagccacggccaaggtgaacgccgcatcgcgagaaatggatattctcaggacgtacggcgagcaacttctgaagagcgctccagagcgcggccaggagctgaccatcggtcgaatcgatatgttggtaaacgttaccggcgcgaattctccggaagaggctcgcgagatattcagtaagcagactgcagaccagctgactacggcaatccaggacgctcaaaacgattccgcaactaagatactctactgatgaaaaagagaattctgcgagtaacattcaacatgccttatggacccgaagtcatccgcgaagatctggatgttcgggtccggattatgaaggctgcgttgcggattcagaaccgggcgacgatggaaattttcggcctcaccactcagctgcgcgagtctcttctgtcgcagttcaccgcgtggaagcaccggcaacgtcaagtgggcagggaagatgaattgatgatcaaggtgtcggtggaagccggctactctgaccaggggcgcgagcaagtttccagagtctttgtcggcgaagtcgccattgtcgatatcatttctccgccaccggacattggaatccgcatccagtgctataccaggcaaatcgacaggacgaagaccattcggaatatgccgccagccaacacgacgtttgtcaagttcgtcgagtggggcgcgaacgaaatgggattgaacttcatttgcgataccagttacaacgatcaagttctgaagaatccgggccggtctatcactgtcgcgtcggcaatcctggcgtcgattcaggatatgtacatgccggacgtggccgcgttcgtcgatgatgacattttgatcgtgaaggaccgcgacaaagtcattcgaccggatgaggtgaccaacgtcaactcgttcgttggaattccatcttggtctgaatggggcgttgaattccagtgtctgtttgagccatcgattcgcgtggctggaggcgtggcggtcgaatcgctcatgaacccaagcgtcaatggcaactatgtaatcactgctctggaatacgatttggccagtcgggatcggccgttctatatcaaagtcatggggagcccagcagcataatggccagggaaatcaaaccgttcaacatgttcggcgttcactatacttcgcggcaattctctgctgtcgatgggctcagcatgatgtcggaaattcagagtgtgccgccagaagaactgctcaagggaaccagtgtattggcgcatccggaagaccatccggaaggcatctggcttccattgactgctgcgaacatcaatctttatgtcgttgatcgagcgaaagtaatagctcccgtacaagttcttgcacttctgtccgaagtggtaatcgactggaactttggttttctcaaagactggaccggagtcaagattccatccagatttgtcgaagatatcaaaagcgtgaagacggcacattcaccttctgtagttgcgagcttggtcgcgaacggctcagcctctatgcgcgagttggaagagtattattcgactcaagatgcgtttaagatgatagacatcatgacggcgaagagcgtgaacgaggccttggcgtccgaagcatcgcacaacagaatcaaaaagggataattcctaaccgggcctgggaaggctatactagacctgccaaatcagaggctttcccatgtccaatatttctctaacatccgcaaaagctcccgacaggacgcgactgatcgccgctcttgacgctcggtcgcggcgggatgctctagatttcgaagtgatgataccggctcaggttgttcaatatgaccgggccgagaacatcgcgacgattcaacctctcatcacctgggttgacacggaacacaacgccgtccaaaggcatcagctggttgatattcctgtaatttccatgggggctggcggcttccacataagtttcccgattcagcaaggtgacataggctggatttatgcggccgaccgcgacacgtctcagttcctggagtcgttgtcaatgtcgaagccgaacaccggccgcatccataagttcgagcatggcctgttcatcccggacgtattccgtcgatacaccatcaattccgaagattcggccgctatggtcatacaatcgacttccggagcgaccagaatttcgattcgcggcgataacatcaagataactgcgccgtcgaacgttactgtggatactccgcaggcgaacttcaccggcaatgtgactatcgctaacaccctggtcgtaaacggcatcaacgtgaacaaccacggccacctcgaaaacaacccgcctgatgcccggacgaaaggcggcatgattgcttaaggagattttcatggcaagttttgatttttctgatttaacagcgggggggggttgtaatggctaactacaactacatcgtcgatactggtgtgatagtcgcagataccgccgacgttctgagcgacgttgaggccgagttccgcgccgccctcggtgccaatatcaacttggccgcgagcactccgcagggatcgcttgtcgcggccgaggccattgcccgttccagcgtcatgcggaatgaagcgcgaattgccaataccataaacccgaacgtttcattcggaacgttcctggacgcgatctgtgccttgatggggatcgagcgtggttctgacctgtcaaccttcggctatggagttcaagtcaccggccgcagccaaacccgcatttccacagggtctagggtccagactccggccggcgcgatcttcacagtgctgagcgatgtcacgatccctgctggtggtgtcgcgaccatcgatatcaaatcgcaggagtatggcaacattcctctgccggtcgggaatctcatcatcatcgacggcacaattggctggtccggagcgaaagtcatcgcctccactcgcgtcgatccgggcagccgccaaatgagcgatgcagaactgaagaatgcccgcgttaatcgattggccatccaaggccgcaactcgaccatggccatcaaggcgtatgtgagcgccgttccgaacgtcacgtcggtgaacgtaatcgagaacaacaccggcgccgttcaagtggtgaatggagtatcgtttacccttccgtatgctgtttgggtctgcgtcgccggaaacccggataaacaagcagtcgccgatgcgttgtgggccgcccataacggcggaactccatgggactatggtgcgacgaacaacggcgtcccggtggacggtccgaatggcgttcctgtgcgcgatccggcgtccggtcgaaagtatgtcgtgaagtggaccactccaattatgtacgatggatatgttaacgtaacagtccagcaaggttcctcctctgtagctccggaagccattcagaacgcagtggtcaattacgcccaggggaaagtggaaggggaagaggggctggtggtgggcgcgagcctgtcggcattcgaagtcgccggcgccatcgctcgcgaaattcccggcatctacatcaaactctgccaggtcgcgtgcgtcgcggctggctcgccggctccggcgccgggcgatttcacttcggaatacgtcatgagcgcattcggccaggctaccatttccgttggtaacgttcgggtgactttcgtatgactctgcctgcgtacaattcggacatccaacaagctctgaaatggctccataaccaggcgcctggaatcaccggcctgatccagagaaaggcgcaatggtatgacagattcagccgccaattctgggccaactgggagcgcgacgttttccacttgaaaactgccaacccgttcggccttatggtttggtgcatcatcctcggcacgccttcgaaagggttcggcctttatccaaaaaacagttcttgggcattcggtcggctacgccagaacttcatctatagcggtacacaagttccgccaccggcagacgcatcgcctggcggcaacttctacggtggcggcaatgccgaaattctcaacttggacgaaatcaggaaagtgcttcagctaagatatgtagcgctgatttctaacggctcgattgcatatatcaatcgcatgcttcgttacatattcaatgatgatgagccatgggacgaggcgaccggtctgtacttctatctcatggactcaaccggcgagaatggccctgtggagaacttggcgatatatcggaaagattgggaaggtatggtgctgttgtccagttcgcccagaacgaaccacgtgctgacatcgacccctgccagcgacgccgattggccgggagtcgatccggccgcgagcggtattccggtaacggtcgaaacggcgtccgctacggccccggacggctccgctacggtgtgcaagcttactaagccggccgggagtaccgcttacgtctccgcgccgatagatgggccgctggggtccggtagcactgtaacgttctcgttcttcgcgaaagccggctccacccgtttcattgcaattcagtcggctgccgatttccccagtcgagccgatgccgttttcgacctggattccgggaacgtaatcagcgatcagatgctggacagcagcgtggtaagcgcccgaatgattcgtctggaaaatggctggtggcgttgcgttctcacgaccaagaccgtcagctcttcgttccgcgctgcttacgtcgctccggcagaaaccaacttcagctggattgattcgaattccagcgcggcgattgacgtgcttatctggggcgctcagatcgaactgggtgatactccaactggatacttggaaactaccggggcgcccgtaaccatgaccgattatgttttgcagaacgcccagaccggaacagtcaagttcacacagccccttccgaccggagtagaagcgtattggactggagactggaaaggcgggactgcagcagaaccggccagattcgcagtcgggaatgggactcaggatacgtttactctgtcagaccccgcatacatcggcctacccaccagtggggcgttcaagctagaatacagggttggtccggcgcttaatctgtcgccgcaattgatcaacctcatgaatgaccgggcagttggtattatgccgacttgcgccggttgcgatgtcaaagtcattcaggagtaatgacgtgatcacacccgaactgatccccagtccgtttgccgctcagggcgataaagacccgattccacaaacctcctccactggcttcgcaaaccttcgcgacggctatacgccggactacgaaatcagcctggcgtcgaacaacccgcaggccaaagcggtcgagcggaaaattcaaaaccaactcttcttcatcgcgacccagaacgcacaggcgtggcagcgacaaatggcgccgccgtggtttcagggcatgcctggcggctacgaacagaatgcagaagtcgtgcgcgtcggaaatgacggcataatgcggcgttatcgttccatggtgaatgccaatgcgagcgaccctctcagcagcacgacttgggaagaacaacccgcatggtcggcgatgcgctccaacatcccgatgccggccggaggcccaggcctatcttctggcggagaagtcatcacgaccggccgcaacttcaacgacctgttaaatgggacgtgggagttcttctctgattcagtggttatcgcttctcagaatgcccccgtatatccggcgtccgctggtgccgctgctggcatgttggaggcgaaatcttggatatccgggtccaatacgttctgcgttcaacgctacactgaccgcgtcgggaacgtcgctgtgcgcgggcttaatgccggggcatggaccaactggatgtatgctgtaaacgttatggccctccaacaaggtcgagtgacctatggagtcgcggccggcccggcgaacgcttacacgttgacgctcgttccgcagctccaaggcggcctggtggatggcatgattcttcgggtcaagttcaacaccatgaacaccggcgcctccaccatcaacgtctccggactcggcgccaaagccatcgtcggcgcggccaacttccctctcaccggcggcgaacttggccaaggactcatcgctgagcttgtattcgacgcagcaggcgaccgctggagaatcctcgcaggcgcgccacgcatccaagttggcaacgccgatcaagattaccaggcccccagctggaaacaggtgaaggattacgtcgcgtcccaaaagctgactgaagtggactgggctgacgtcgtcaacaagccgaacgtcgctatccaagacactacgccgtggttcgccaatctggagttgtctgacgctcggcctttcatcgatttccacttcaacaacaaccgcgccaaagacttcgactatcgctttatctctgaagctgatgggtcgatggcgttctactctcgccaggggtcagctggtcctacccaggatatcctgttcagcaggtcgaatgttacattcctccagccgcgactggatgttgcgaaaaacctcgcgtacatcgcgaactctggtcccctttggcagaacaccactgccgatcagcccggttggaagttcacattcgcgcaaggcgtggacgcgaacaacaacgcggtgatcgcagtcaataccaccaatcctgacggctcctatcgctcacagataatgcgttgggactgggcgtccacgaatgtaatcttcaacaatcgtccgcttttcgccgggcaatatgttccttgggattctggtaacttcgacccttcaacaaagttgacagtcaatgccacgaaccagatcgccgggcccaccgggattcggaacaccaacggcaacaccggcaatatgaacacatggggttccggttccacgacggcatcctatggcaatgctgccatccagatcttcgggaaagggggcggtgagcctgccgcgatctattttgacaactcccagaccggatggtatctgggtatggacaaggatggacagctcaagcgggccggctggtcactcggcaacaactcttatgtcatcaccgatgaattgaacatcagaaaccacatcaacggtatggcagcaaggccggtttggggcggaaatgaattctgggggccgtggaacttcaatccgaacactaagcttacgttgggcgcattcaacgatagccaacacaccaggatggtaaacagcgccgcgaaggacgtagggatagccgccatgacaagttatggcgacgcggctatgtcgttcttcaactatgaggcttcgacgccgaccgggaatcgtgctgctgtaatttcgtttgttcgtaacggggcacgaggcgttctgttcggcctggacacggacaacaagctgaaatggggcggctattctctaggtgccgtcgcgttcgagattgccgactccaacaacctcatgagcctgtggtcatcccacgctgccgcgccgaactggaacgggcagaccatctggaggtcgggaaacttcaacccagacaccaaggcgactttggcagctcgcaatacgacgtcatcccctacaatattcagttatggggcgtccggaatcgcatcaaccggacaggtcggtgcgttggttgtggaaaacaacagcgtcaccaataccgcagccgccatcacgttccattcgccgcagaaatatcaggtcaacttcggcctggatgcggacaacgtggtaaagatcggtggcggcacaatgggcggcgtagcatatcccatcatccactccggcaactacaacaactacatcaaccaggcgctggttcaggtaggtcttggcggcgtcggttcctacgcgatccttgccgtatttgacacctccgcgccggcagcgtccattgcccccggaacgatcatggacagttccaagctgttctattcgtcctgcgattcgacctatcgcagcagcgccagtccgacgggcacctggcgctgcatggggtatgtgtataaccgagactccaccaacggcgactcggcatccctattccagcgggtaacgtaacatgaaatggacgcgaatcagaaaccctcgttggctggatgagacaaatattcacgccatggttactttcgaggggattggagaagttcctttcaccgccaatccgcacgacgtggaggcccacggaagggccattcacgctgcgatcctgtccggggcgcacggacctatcgccccagtagactcgacgcgggagcaggccttgcaggacgctatacgagcaagggaaaagcgggctatccttcgcgatacccgatggcccatagatcgtcacgacgagcagaggcggctgggtatcgaaaccacggacgggcctgggctgatagcagcccttgttcactggaggcagcagattcgcgattggaatagcggggatcggccgcgacttcccatggctctgaaagcaatattcaaaaatcaggagtattgatgaaaatcacgaaggatattctgatcatcggaaccgggtgcaccacggatcgggcgatcaagtggctggatgacgtccaggcggccatggacaagttccacatcgagtcgccgcgagccattgcggcctacctcgccaacatcggcgtcgagtccggtggcctggtaagtctggtggagaatctcaactacagcgctcaaggattggccaacacctggcctcgccggtacgcagtagacccgcgagtccgcccgtatgtcccgaacgctctggcgaaccgcctggcccgtaacccggtcgccatcgccaacaacgtgtacgcggatcgcatgggtaatggatgcgagcaggatggcgatggttggaagtatcgcgggcgcggcttgatccagctgaccggaaagtcgaactattccctgttcgccgaagactccggcctggacgctctggagcaaccggagctgctggagactccggccggcgcggcgatgtcttctgcctggttcttctggcgcaatcgctgtatccccatggcggagtccaacaacttctccctggtcgtgaaaaccatcaacggtgccgcgccgaacgatgcgaaccacggccagctccggatcaaccgctatatgaagaccatctccgcgatcaatcaaggctcctgatattcaaccccaaagaaaaggccgcttattcagcggcctttttgctttccggctttgcctcttcaaccatcttgacctcaaccggcgcggcggactcctcctgagtgatcgagtccacatagttccctagtgaactcagaacgccgattaacagcgctctcaccaccttgtccttgactgtctcgcctatgatcttggtcagaacggatattaactcttcccggagtctggggctgattcttggccgaaagcgcttgcgatgctctttgcgtttcatgtttagtcctctgtctgcggtcttctcctcaccccgataattgcttggggatgctttgtgttaatcggaagggtcgggcgctattataacccgtcgaaaatgctagcgcttaactgtttaacgatacgcaccgcgatattaaatcgccttctttctggccgaggaactctggcggccgggtccggtctaaggcctaatttgtcgacatcaaaacgagaaaacccggatcgcctgtagggtaaggcgtccgggtttatttcgatctagtgtccgctagaatcagtggcttccgccccatccgtccagccagcaatcgaagacggcgtgtctcggcttgtccttggcgccatgggagaagtgcttgaatcggatgacctggcccttgaggtattccctgtcattccagcggcgctgtttctcgtcgtgggtcaggctggaggccgacacgttgaaggtgacgccaggccacagacgttcgttgcggcagacgaacgcaccgaccattccggacggcgacaggttttctgcgtggctggagcgggccgtgtggccaagttcattgatgaaagcttcattgttgttgtgcatcaactcttccacgtcgatgatctcagcttcatcgtagtcgtatcgcttgactttcacacagtgcccttccttggcagtcgagcgaccgaacttgtacagtccatcagcgcgcttgcccatggaaccttcgaatcccagcattgtgtggcggcgctcgacttcgctgaactgttcgatggaagtcaccagttcctgctcgaccaggtgaatcctctcatagccgaggcagtgacgaaggaagttcacgcgctcggccgccctggctaggcgatcttcggtcggtgcgcgaggatcggtgaaatcatcgaacacatggaaagaccagtccggctcaccgctgtggcggcgaagatcgccggacgacttctggaaaactttcgggtcgctgatgtcgccgcagaccagctcgccgtccaggccgttgaacagcttatcgctgaggtattcgtagatcgattgattgttctgccgcttgagttgacgggtcagcgcctcgccttcgaatacgaagcagcgaaatccatcgatcttcggtgagaaatacatcggcagttggccttccagcagcttcgggtcaaaattcgatgcgagcatgggtttcatacagttctccagaaaagaagcccggcgaaccgggctaaatggcggtaagccggctcagatggtttcgttggcgtggttcagttcggccatgatcgacgcatagcgctcgtccgactccttgatgaacacgccgtcgtacatgacgcctttgcgatccttgatggtgtcgtaggccgcagcgtagcaggcgagcatggtagtgtcgtgctcttccgtcacatcgaacagagtcatgacggccaagaccaggctcttgatggctaatccatgatttccgcgtgccagcgcgccggccagatgtccgaggtgctgcaaatcgtcgccgtaggtgggatgaacttcgacagtctcgctgaagacagatagatgatcgaacagattttcaccgagttgcgcggccatgatcgtggcaaccaccattacgtcgccgatgccgtctttcacctcgactggtttgttataaacccaggcttcgcaaacttctgcgaactcttcgaccaacttcaggaattgatccttggccgaagagcctttgatcaggttccggtcggaaccccatttaacaaccaggtcgtgaagttcgcgactcatgatttgttcgatattcattctttcgattccttttggatttgggattttactgcgttgattatggacgccgtgctctggcgcgatccatccttggtggtgccgaagtagaaggccattaccgacttcagctcggcgaaccaatagccgatgatggtgccgatggcgacagaggatgtcgggtccatcagagcctcgcggccgaatgtgaagattgcgatgatgatgagaatggagcctgtcagaagagcgaatgtaatcgccgggcgaacgaaatcgttctgctgcgccgcaagcctcctcgcagaatccctgtcggccgcctctgcggcgaactggctaagctcggcctggagctggttctgctcagactgaaggcgattttgttcggcttgaatcgcaagctcctggagacgaacgcgctcggcgctctggagttcggcgagacgcgctagagcttccggattcgcgtctagagcgctagcgaccgaggctgggtcggccttcgaccccagcgccgtcgcgacgatagcgcccacggcggcgcctgcaggcccacccaggagcgaacccagagccggggcagccgcgccgatcttactacctatgtctttccagtccatttcgactcctcaaaagaaaggcgccattacagcgcctttctccggccggtgatttagaactcttcggcttcggtcgcatcgccgacgccaccggcgtcactgcgaggctgttcctgcttgctgtagtccaccttcacctcgccgccgacgaacgacttgtacaggtcggccgcagccttgaagtgatccgggttcttcaccaggccttccagctcgaactggacgccggaccagctacccttgtcgttcgacatgcctacggtggtcatgcggaccaggttggcgaaagtcggcggggtgcgcaggccctgcggggtctgaacctttttctgggacagcgcggtcatgagcttcttcgaggccttgatctgcgaagacgacagggagatcagagcctggccgaaatcgccggtgtccggatcgatgacgatgacgtaatgaccacgggtgtcggcgaagtagtcagacttcttgtcgctgaccgaaccgtcttcgttcggcgcgtacaggcgtccttcgacttccttcaccttggtcgggtctttcatcatttccttgaagtcttcgacgctgatggcgcccttgaaaccgccctcggcctcgcgaccggcccagcggatgaactcgcggcggtacgcggccggaatgatcagcaggccggtcttgccgtcgtaaatcttgccggtgacggtgttcaggaacatgccggccttcgcgccttcgatgtacttcgggtcatcttcatcgacctggggagacatcttctgcagaacctggatgaaggggatggcataggactcggcatcggcgccttcgaagcctgcgccgtcatacgatcccaaatccatgaagtcgggaacttcggtagttgcgacggcgccgccaccggtggcaactgctacggccttggtttcttcggttgcttcggaagtttcggttttcttaccagccatgttaggctccttgtttgtcgaatttcagttatcgctaactgtgggtttataataacggaagttgcaactaagtaaagcaaattacatattaagatttgctctttttcaccttcggtttcgtgattttggcctctttgtattcgtgcacgccgatgaaatctggcagctcttcgcccttctccaaatactcgcgaccgaacgcctggagggtctggtagtggacatcgcggttgatggtggcgtcatagccggcctcaatgatagcctcggccgccttcttcgcatcttccatttcgccgcgaccgaattcggccagaaccttggtcttgatgatgccgtcgttgtcggtttcttccagccacttccagaacttcgatttgttctcttctttgacggaaatgatggccttcggctcgactttgaccgtgcgaccgtcagccagagtagtggtcttttgaccaagctcctccagcagctccggaatggtgttgcgcttgagggttttcagctcctcttccttttcggccagcgccttttgaagatcgaggatttcgacgtccagctgcgaagccttgtccaccaggttcagcagtcgatggccgatgtcggtggcttcaaccgccatttcatccatgacgccaaaatagtcgatttcgcccggcgcgttctctttcaagtattccgggatttcaagctcttgctctttcatgtccgcctccaacttagtgatgttcccttacttgaaccaagtattgagtagatattatgccgcatcttccttgatacggctactgatttacatattaaatttcgtcgcgagtgctaacgtcagcctcaaacacgccatcaacgacataacttgccaggttgcgtttccactccaagctgacctggattttctcgtcgatggaatccagacagatcaggtcgaagtacagaaccgagttgacggtgccgattcgatgatttcggtcttcggactgcatccgcagctcgttgtcttcgtcggtcgtgtagtagatggccacgtctgcggccgtgagcgtgatcccgatccctgctgcggccgggttgcccaggaacacctggacgcgcttggcctggaaatcgtcgatcaatttttcccgctcggcctctttggtctcgccgtagtaggtgccaaacgaaatcccttgggcctccaaatacgccttgatctggtcgatttcctgaatgcgcatggcccagacgatgatggaacgctccgggtcttcctccagcagaccctccagaagatcagtaaacacggcgaatcgcgggttgtcttcgggcggcaggatcaccggctcaccatagacgttgatatagccggacgcaacttgcttgagcttcgaacgcgctgccgcagcatcgaaagatacatccagcatgaaatcttcgttctggagaacgaagtgatagtcttcttccacgcgctgataaacctttcgttgctccggcgacatttcgaagtatatgcgcttgtacaccttgtccggcaggaatggcaatgcttccttcttcgtgacccggaagctgtgcggctcgatcagggatcgcagcttgtccaggttccggaataccgggcgcccataatcgtctttttcgacgagttgcggcggcatggtttgcttcccttccagcttgcgcatgatagcgatcattcgaggatcgtcactgggcaccaagacggaaaattcggccacaaacgcccgataggatttagtccccagaattccattccgcaagaattggaactgcatgaacaaatcggtcggtgcccgcgtcagaggagttccggaaaggatgcgacgggccacggccttctcgcccagctttacgatctttttcgcacgcttggcttgtgggtttttgatcctcgttgactcgtccacaattgcgcaaactttgaatgtatcaaggaatcgctcgacctcatcatagccagcctggtggttgattgcgtcaacgttgatggcgaagacgcgaagaactttttcatctgcgaacgtctcggaatacagacggtccaagcgcgccctggcctttttggaagtcggtcggccgcgccaatccacgctcaaagtcttgatcgcgacgtgggtgggaatctcgcgcagaatccagttggtgtggacgcctttgggggcgacgatgagcagcgcgtccacgcgcccctgtaggaagaggcgaacggcatcggccaaagtcgtccaagtcttcccggtgccctgctccatcaggtatgcgaagttccgtttgttcagggacgctgccagggcattgaattggtgctgcatggcctcggtcttcatgcccttgacgggatatgttttggctttcatttgttctccaaatcggcgaggaactgaacaatgttatccagtccttctgcatagctcgcaacttccaccaagtcgcggctgttaagctcgaacaaatcgaacataggattcagcagcagccaatcggttccgatcttggccaggacgaagccccggccaccccagccgatccgctcccgaagaaaagggatttgcccaggttcgaaacatctggccattgggcaggtggaagcgcgtttcggccactcctccaaagccttgaactcgacccagaactggacacctcgacgattcaggcagatcgaatcggacatgccagaccgccgcgtctccagaaagtcgatcaggattcggccgagcgagcgctgcttaaacgcattcgccgctttcgtttcgcgatcattcatcaccttcgccctctttggaaactttctctgcttgcgatgccaactttgacttctcgcgctcggtcaatatccgcttgacggccttcacgatgaacatgtcgatgccgctgagcctccatcctttgatcaggaaccaagcgccggtcggcgtcccttcagcaatctgctttccgtattgcagatatttttcaggccgaattctgaaacgtatcggctgatcaaccgagtcatcaacgcacatgatgtcgagaaactgcgactggcccttgtacaccgggtttttcccttgatcggccctcttcttctggcgaatcggttcgttctcatcggacagaactttcttcaccatcttgacgatgactaggccatcgtctccatcgcggatatcccgaatgttctgaatggggtttccggaagtcactccaaccagctccggattgtcataagcatgaccccagagcgtgtgagcttcgttcaagtctgcgaattgcacttcagaattcgacaaactagctgcgactttctcccaatcctgaagcgtcttcaggtgggtgcctgccagctctttatattgagccttcagctccttaagatcggccttcaactccttcagatcggccttcaacagtttctccagttctttgtcttggctgattttcgccgaaagaatctgggcttccagagctgctacatcagcagccttgtcctcaacatcctgtgccgatatcgggcaattggccagggcgatcctcgcggccttgacttcctcgcgaagacgcaggaaccgctcggccttcgccgggccgaagcctttggcgttcatgatgccgccgatcaggcgcccgtccgccaccacccagttgagttcggaatgctccgggtccagggccgtatattctacgccttctttggccaattcgcgaaggatggacacagtttgctggtcgtctttcgccgcccgaagacacgcggccgcgtattccaggcgatgatatcgcttcatgtagcaggtccagtacgtcaccacagcgtagctgaccgagtgggagcggttgaatccccaggcgccgaacgttaccatttcctgccaaacacggtgagcatcgtccggggcgacgcctatggtcttggcgccctcgatgaacaattcccggcgcttgttgaaaaattcttcgccctttcgcgcagacatggctttccgaatcgccgacgtttgttcccagtcgaactgcccaatgtccttcacaatggacatgatctgttcttggtacaggaaaactccatatgttccagacagatactgctcgacctgcgggatggtataggtcacaggctcgcgaccggccacgcgctcgatgtatttggtggccatgcccgaagacaacgggcctggacgggcgagcgccgttatgtggtcgatgttttcgaacgcggtgatattgatcgcattggcgaccgagcggacggcctggccttcgaactggaagatgccggacatcttgtcttcgttgagaatgtccagaaccgccttgtcgttcaacggcaagtcgtacagctcttgcgccgtcacgcaattagcatcttggatgacgcccagagttcgaagcccgagcgcatcgatcttgagaagattcagatattctgaatcgggcttgtcgagctgcgcgacaccttcagaagttaccgtgcagaagtcgatcacttcatcgttgcagaccaggatgcctgccgcgtggacgccggagtgggatgggtggatttcgaggtcgcccatgcaggcggacgcaatctcatacttttcacggaagtcgcggccgggctgagttttttcgaaagtatcctccaatccttttccatatcgttcgtccgccgatgtatattcgatgatcgagtttttgatgttgtcggtgtcgtggaatggaatgccgaagcgttttccgacgtgagcgataaccgacgcggccttgagtgtgttgatgttcccaagctttaccacgttccaagtgccgtatttctgctggagatattcgaacactaaatagcgatgggtatcggcaaagtcgatatctatatcgggaagatcggaacgggaaatgtcgataaagcgctggaagagaaggcgatgcgggagcgggtcaacctcggtaatgcccaggaggtagcagaccaaagagccggctgaagagccgcgagccgggccgaccagcatatgcttcttggcgaacgcaaccagatcggcgaccaccagaaagtagctgtcgaagtctttcagctgaatctgcttgatctcttcttggaatcgatcctcatactcctgggtccattccttgatgtggccgcgactgagacggtaggcttgcccctcgcgagccagcgcgacgatatccccatccaggtggatcataggcgccttcgccagtttcacatccgccaattgttcgactaccgcacgagtattggcggcggcggcatcgaactcttcgcgagtcatgatgtggcgtaaacggctccacaactcctcttcggtggcgatgtggcgaaggccgaccgattcccgcaccttccaggccgacgcgaaatcagcatggtcgatggacggcatgtcgttgtaagaggtaattaccaccggctttccgaatgccctggccgtctccatagcgccgtgcgcggcgaccatcgacgcgggattgatgtcaatgtagtcgattccggccagatccagatgggcataggcctcgccagcgaatttgatgacgccgtcagcttcctggaattcttgcggagtcaatccttgattctggaccgacttggaagtcaagcggtagaacttctttgtgtccttggcgagcacccaggctttgagcttcagctctttctcgccatcgtcggcgcatttgatcgggatttccatgccgaatccgcgaggcagttctgccttggtagcggcttgttcccaacggacgtggccccatgttccatcatcgacgatggcgacgaatggggattcgatctctttggcgcgctcgatgatctccgggaatcgaccatatgcggcgccgtaggagtaaccagagcgaacgcggagctgagggaaagacatcatgcggcctccattgcttgatacgcccgatacactcccatgcgcttgcagacttcgtggagcagccgcacgtcgtcgagcgcccggtgtttctgtacatatgggccgcagtagtgctcataaagatgttgcagccgcatgcggtggccgaacaacggcgccgactcttccacagtacagatatcgagcgatgggaaattgacttcgtccaggccgaacttgccgcgagccagatcgcaggccagcatgaacttatcgaatggcaggttgtgggcaatattcgcgtcggctctggaaaagaagtcgcgaactttctggcgctgatcgaggaaagatgggtgcttgatcaggtcttcgttcttcaacccggtgatcttggtgatgatttcctcgataacgattccaggattgcagatgaactctacttcatccaaaatcttttcgccatcagttatcacgccggcgaattcgattattctcggctgctttctcagactcaccctttggtggaacgggagtcctgtggtctcagtatcccatacagcgaatatcatgtttgttccctcttatgtcgaaaggccggctgctttcgcgaccggcctgaggagtataccgcgacggctgaagatttacgccttctgtccgtctttcggcgtgatgcggccggagcgcatggtggcgtgaacaaacgccgaatagttgatcgagtccaaggccgaatcggcatccttgaacccgctattcgccaggcgagtgagtttacccaccatgtgcatcacgaacagggcgagtcgatgatcatcggcggtcttcgccaccaggccgttcgggaagaggatttccatgatctttccgtacatcagatcattgcgaccataggtgctctggcgggcgcggaagacttctgctgcggcgtacagattgttgagaacatcttccgcgaaatcatcgggatgggaatcatcttcgcccggccagacggattccatggcgaacggcgcggcgtcttcggtcgggtctttgggctgagccgtttcagcgagcggagacggggctttcgcaaacgcctcgtcgagggtaggggcggagttcggggcggccgggaacggctcgcctgccatgtcgttgggcgcgctatcggggtcgctatcggccgcgacggcgaagaacggcgcatcgcaaccttccaggttcaggatgtaggagtcgatccccaggctattgtaggcatcgatgatgtcctggcgatcatcgaacgccgcgacgatcttggtgacgccttcgattttcttcaggatgtcgagcgcgactgcccgcttgaactgaggcgccggctcggtgttaccatacggccgcatgatgagttcatactcgcgatgttcggcgatgccgagttcgcggtggagcttggccctggtctggaaaaagtggttgtcggttcggccggtgacgaagaaaatcatgaggtcggcgtcgatggcattcctgatgcgacctacagcgtgcgggttgagagtgtccttgtcgagacgagaatgatactcgtcccattgccgttccaaggcgaagctcttgcggtggctatcgtcgaatacgcagccgtccagatcgaagatgatgatgccattcttgggtttgcgttccatattcagatttccttgatggttgctttctgggtgacggttttatcgatgaacgtcccatcagaagtgaggcggaaaacttcgccattctggctgaaatcgaacgattgcacgttcatcgtgatgcgaatggattcgctgccgttggtcacttcgacttgtgcgatgtcgccaactttctcgacaatgatcttcatgttacatggacttcccattaacggccacagggctggcctcttgtttttccgatccccagaaatcgcggcgcagttcttcctgctcggccgagcgatccatccatggacgatagaacttgcactgatagatcggtttcaccggcaactcaaccacaggaatctggccgggtttcgtctccagagcggacatgaagcggtcataggattgctcatgaatctcatcttcattcagaaccttcgatccatagcgcgggaaggcacaggagccagtagcgacacagtgcggctggagcagactatcgaacatcggatagacttccagaaccagtcggcgcatttcgcggaaggcttcctgatactccccttgcgtacgaacacacaggcgaactttcgccatgtcgctcagagtgcgcaaattgaacttggccgcgatcttcgtttccatgttggaaggaatgatggcacgagcatcctggagcgatgcgccggcctccaagagcttctggtaactggtctgcgcgtcggcgatggcatcgtgccacaggcggttcaactcttcgcgggcgtgataggtcgggtccggctcgccattggccgtagcctgctcatcgaaatcccagcggaatgcttccggctgaacaacggcgctaacctccagggcgcgactggtttcctgctggtaagcaccggtccgcgtccggacgagttggtgggtaaaattcttgcttacgccctcgatctggaaaatgaagtccacgaattcgaacggcgagcgaatggtgtccagcatgtacttccagtggtcgagcttttcggcttcggtcatggtcgccgggtcttggccgcgcatgcgggtggatttcgtccccaggaggagttcccaggcgttctgggtgtaactgatcagagaaatcttcatcagaaatcttccggaattggcgtgaaggtgaatttttctgtgagagcaagtgccaggccttgggcttgctccttacgaagtccatactgctccatctcttccttaagcagttcgcaggcctccagacgagactcatactcttcagcctcatgaactgacgagaagacggttccatcagaggttctgtatacgagttcaatagccatgatcgcctcagtagcagcggatgatttcggcgcggatatctcgacggtcgaggtagtgctcacgaatcttatcgcgggcgcgctcggcctcttctcgactgccgaacgacaggttgaacgaagtgaaaggcttatcgtccaggcgcccatcgccaatcaggtacaggatgcctaccagcacgaaagacggcgctgtctgtcgcgtttgcggcgggtcgatttgcatttctaggaaagacatgggaacctcttcaggatggtctggtgagtacatcaatagcgctcctgctgagcagctacggtttccggctcgtagatgagcatgtcaacgatttccgggcactggcctttcacccagtcgatggccgcgaccagtgtggtggaagcggagaaagagaaagtgcggtaagactcatggatgtacggcgaccccatcgaatcgcgctcggtcgtgcgagaaatgactgctttgatattaacgatccggcccatcttcggcctccactttagcgattatatctgacaggctcagcttctcgccattcaggaaataactggcgcgaaacttcctgtcaccctctggcccgacgatccgggccgttatggtgagactcccgccgccaagggcatcggtgtccctgaagaaagccagcagcgcccgcttgagcgctgcctcgcgaggatcgacggccattaacctaccacgttccagccgtgctgagcgcaccaaaccgcaccggcccctgcaggaaggctattcagaaggaatacaggggtcaggcggccatcctcggtcatgtggatgaagtagcgtgcactttcaccgagccattcggccttggcgatggcgcgttcaagattggccttggtggcgtaggtcttggtggtgtttttgtcggtggagaaggttacttcgcgggccattttgtcgattccttttggttgaagggtttcgcgtttcgatgagggaatactactctcacctgactcagaagtaaagcacttcgtgtcgattatttcacgaacatcttcttggccttctgataggacgaagaagtcatcaggcgctcgatgacatccatgtccgaaaccaggtcatccagaaggacgttgcgccaggtagcgaaccggccgagcgagaagatgccggcttcatgggtgaggttccagatcatggactcgcgctcgtcgcggccgagcggaacgattttgcctttggtctggatggtcggctcgccgtcctcgatgagatgccttttcctgatgccgaaggccgcgcaaacgtaatccatatcccagtcgctgtcccattcgatggtttcgattttaccatctaaagtctccactatccccttagtgatggattcgacgatcagagtatcaccggtgatggacgctcgaaacgttcccactttaggaccagggaaatacacggtctggaagacatcacaagggatggaaagcttgtatcgactcacgatgatggaggttccttcaccgaatgacgggtcgattcccaggtccagccctgccgcagccaggttggcgcggaatggcgcggtgctgatgacgttcacatggtcatcttgccggcgaagatactggaagaaagaggcgtcgaaaggacggctccaagtgatacgattcgcaagcttagccaccagctgctcatagtagtcggccggtgcgatccaacgcttttcagtcgccagattccagatggaccggtccgacaggccgcccgttactttcctggagtacatgttgcagtggtcgatgcgcggctgggaaatgaactcgccgtcgatgtagatagctttgtgtacagtgacttcgcggaacgggatgccggtgagttggccaatcactggcgagcggaatcgcagaagtgcgttgtggcgctccttattctccggcgtcgccgcgtcgatgatttgggcttgaggaaagcgatgcgcggcgatcagtccagcgagtccggcacctacgatgattactttctgatcaggaatcatgatatgttccttatgagtgtacaaaacttgagaggataaaaaagggacccattttcatgagtcccttgaagagctagacgattcaggctcagaggagcggcggcttactcctcctcaccttcggaaccatcggcgccctgatcttcaccgtcgtgctcctggccttcgtcatcggccttctcgtcatcgccctggccagcttcgtcttccttcgaagcgatggcaaccagatcgacccagcccatgatttccagcttgctcagatagctgcgaaccgaggtgccgtacagcaggtgggccaccttctcgccgaaggattcgatttcgaccggctcaccaacggtgcagtgctcgttgatgtaagcaaacaccttgccgcgagtcgagaaggcctgcggggttccatggccgtcgccggtcgggatgaagtgagtggcgcgggggcgacgcgagccgttggacttcaggtcttcgcggcgggcttcggccttcgcgcggcgctcttcctgctcttccttgcggcgctgcttctcggcttcgcgctctgccttcttctgctcggccaggcgcttgcgctcttcttcgcgtgcggctttctgggcttcctgcgcggccttcttctcttcggccttcttggcgcgctcggcttccttctcggccttcttctgctcgcgctcggcttccttggccttcgccttctcggcctgctcggcttccttcgccttggccttttcagcgcgctcggcttccttggcggcggccttttccttcgccttctcggcgcgctcggcttctttcttctcgcgctcggctttgcgcttctcttcgcgctcggctttcttctgctcggcttccttggccttggcttcggccttctcggcgcgctcgcgctctttacgttggcgctcagcggccttctcggccttgcgcagggcagcggcttgttccttggtcagctcttcgccttgggtctgttcgttctggtccttctgttccatgttcttactccgggaatgtttaaagggatggcttattggcctgtgaggggattatctctaaactaattgaagaagggaatacccttagcctgaactttcctaaatattttctttcgggaaagtccaaactctagggaacttatttatgttcgagaagttcctagcttttacgcaagaacagtaagtattcgattgcgcgagttatcccagtatacatcaactgactataagggatggacggcaagttttcttctaacatggcaacccgtttccattctgaaccctgcgacttgtggaacgtcatcgcccagccgaagtcgaatccgccaatagccttctgcgcctccagccgcacgtcttcctcggccgaaaagctcaaaggattgaacttcacccagcgctcatagttcgtgccgataatgcgaactttggcgaacaacatttcgtccggctcgtcatcatcctcttggccttcggggaccggcttgagttcgagcaggatggcttgctcgccgttcataatgccatattcgtgctggttcccggtgcaaaccagcttctcgccgatttccggttgtccacccttgtagccgaggatgcggcgcgccctggcgttcaaacggcggcgagtattgttgtaggcgcaaaggatcacgccatcatcgtccaagaacgtccgcatttcgtcgtccgacatgtcgaatccggcccgtaccagaatgtcgtcatactcgcggcagggtaggcgcttgccctggcggacgaacatcgacgcccgaacgatattgccggcgttgcgctcgatttcggtcatgatggtgtcacagctgttctcatggaaaatctggacgccgcgcacaggaggaacttggccaaagtcgccaatctccagaaccggaattcggtgcgacagcaagcgctcttcatcccactcgccgatcatggacgactcgtcgagcacgaccaacttcggcttctcgtcgagcgagtctttgttggcaaacatgatttcgccgtcttcatcttcgccaatcggccgatagatgaagctgtggagggtccgggcattggtgcaacccttctcgcgaagccgcgctgctgctttcccggttggcgcgacgaagaccgtccagtccatcgagcagcaaagttcggcgatgatcttcgcgatggaggtcttaccagttccggcgaaaccagcgagtcgatagacctggcggcggtgcgctcgatcacaccaaccgcgataccagtccacaacggaattgatcgcgtcgatctgctgactgtttggtcgaaagccgaatcgctcttcgatctgatcgacggtgaagttagatgctgacatatttgcgttctccaacgctaggtttaattgaatcgaggctcagtttaagcacgccgtccacagaccagccagtatcacgacgatacttgcggccttgcggatcgacatagaagttcttcgtgcgccgcagcagaacataatgccaagcagctccaagcgcgtggacccttcctttatacgggaaagccttcgcctgctctgcggcctctttggccccagggagccagcggacggtagaaaggaccaggaccgcacccttaatagcctgggaagcggcgcggccgtcctgtgggctatagcgatgtctatcgaagtctacccagtggtggttgccgcgccggagcttgaccgttcgggatcgcccctcgaacaccaccgtgccttcgtgagtaaaaatatgttccgccatcgaatgttcctttataacgtacagttatgctttacctctgcgcaggaagagtatactatcagctgactcgccaaagcgagcgaatttaatccaactttacttcggcaggaaagtggccgatactagcgccgccgcctgtactgccctccaaaacagaggatacattaaatgcaagaatgcaagatttcccgcgaccaactcccggtcggtaatccgaatcccaatgtcgacaagacccgcgacccgaacctgaagcccggtttcctgcgtcgcagccgcgagctggaaccggcgctggcagttcgcattcgtcgcgagctgatccacgccgaagcgtccgacttggccaaggccggatgggtcaattcacagtccagcctctatggatcgaaagccttcccgcgccattccgtcgttcgcgttaccggagttccggaagatggagctttcatcggcatgctgatcggcttcatcgagcatcgcgagcatggcgaatgggcggtcatggaagccggaacgaaagaaggcggcgcagtcatcatcccggtcaatcacatcacgcgagcgtcattcgccgaagccgaagagttcgccgaaaagtgggagcggaacttgggctggcgcctcctgcgacagctccgcgagtgcggcgccctggccgggactgaagacgagttcctgcggcggatcatcaatcgatacgttcgtgatcgcacgatcctcgatcaccacaaagtcggcgcggacaaaatctatactgatgcagtactcaaaagcatcggcgaaacatggccgaagattccttcggggaaattcgtcggacaccgagtcgcgcagctcctgatcggccacaagctaggtcgagcggggaccattctgaatgacctggtggacttcctggagaagttcgcggccgggcgcgataaaattctcaacatcgccatctgtaattgaggtgaatgaaatggttgacttggaaaagctgagtccaaagctgagtcctcggcagcatgccgttctactggagatgtacaggcatcctgagcatccagttcacagatcgccaacgaatttaactcttaaggctttgagacgaagggggcttgtcgagctatcctggaaggattccgtggctggatatatgttcggtcgccaaccttgctggaaaataactgatgccggcataaggcgaatcctgggagtgctggggaataatatggaaaaagaacaaagcgaagatcgcccaagcatccctgagtttgagaagaccgacgccaacaaactctatgatgctctggagacgatttcgctgctggagaagaagttggacgaatccgaaaagcgcgggagcgagctggccgcgagctattgtgacggcgtagtcggcgatgaatacggccatccttattgccgttataaagtggaacgcgacgccgccttggccgaagtagagcgcctgcgagaatcaaaaggcgatccctctggcagcttcgacaggtgtatgaagatgatgtacgagcgcgacgagaatgcaaaacgactcgacgccgccttggccagggtcgcggagctggaagggaagttgacggactgggtgcacgaagggttccggctcaacgaggcgctagcggtcgccaaggctcaacccagcgtgccggaaatatctggcatcggtcgcgatgccgaacatcccagagctgtagtgctgtatctgcgtaacgaacccagcgatgaagatatgcgagcaattcagaactttttgcgcgccatggccgcccccgctcagcacagcgtgccgaaagcatggctcgacgttcaggcagagcgccgccggcaggtcgaggcccaggcgctaaggcaggaagtcgcagcactgcgcgcaagggcggatgttgtgccggaggtattcgggcttgagcggtaccgcgtagaaaaaactgggaagggtttctggccatactgcgtgcgtgcgggggatggaacgcgtgaactgttcgtcggccacttgaagcagtgtcagcgggtagcgaccgaattggctacggcgtttgaagatgggaagtttatcgccgcgcccggcagctcggctcagcacagcgtgccggaggggtggaagctcgtaccgatggacccgacatcgcagatgacctatgtcggtcagtccctgcgttatgacgcggtaaacagcatcggcgagatttaccggcaaatgctcgccgtagctccctcacccatcgatccggccgcgcatcctcagccgtgccagcaaccacaggcccatcctgcccgctgcgggtgcgagcggtaagtgccaagtaaggaattcatgtaatggaacagaagaaaccttcaccagtagatggagtcatcatgaccagcctcgacgttctccggaaagcacagcccgaagcccaggacgagtatgccgtgtccatgttcgcaacggcgatccgccagaaaatgcagcgctcccgcgataaaggccgaggcggctggatcgactgcgacgaagatattctgatcaacggattcgccgaacatgcgctgaagggaaatgagaacaacctcttggacctggcgacgttcctgatgttcatgtgggtgcgcggcatcgacgatgcgaagattcccccggcgctcgaaaaggcgcggcagcacaagatcatggaagcatggagtcgggtccacgaagatggactaaactccgccagaaaggcgagtgctgcgcgacagttcgtggaagtgcctcgacgcaaggggcgcccggagcgacttgcatgaagcctcacgaaataagactggcacaggccgaagagttcctgcgcgaactcggccgagggattccggacgacgaacgggtgatggtcggctacgctgaagaggccacagtccaaaccgacgagaacggtcgcaagctcaacgccggctggtggcctgtgccctggaaggaagggaaatacatcaactcccgatccaacgcctacgcctgtatatcgtcgtccatcaagacgcccaacccgaagaccggccagatgcgatactggcgcggcgaagcctctttcggccacggcctagcgttgatggttgatgacatcggctccggcaaagggtcaaagggcgacttcgaccgcgacgagttccgcgagcgacttgagccgaccgcgattgtggagacttcgccgaacaactaccagttctggtatttcttcaaagagccgatgtcccacatgctccagttcaaggcgctgctctattcgttcgtggaccaggtgctaaagaaaggcggcgacaacaccgtcaaggacgtcagccgttacggccggatgcccttcggcttcaacaacaagcgcgggaaagacggcaagttcaaatatgccgacgaaaacggcaagcccgaactcgtgcgactgttcagcgccgactattccaagcgctactcgccagaagagatcgcccaggcattcggcgtccgcatcatcatgccacagatgaagaaggtggagataaaccgcgacgattgggtgtatgaccaagtatggctgaagtatgccgagcacatctgcacgaaatacaagatgggcgaagcggcaggcggccaggtccagcagaatatgtccggcaaataccgcatccgctgcccgtggggagacgagcacaccaacggcgatccattcggcgcctactttcgcggaccgatccctggagccgagcacgaatatgtgttcggctgcggccacgatacttgccgcaaagagcatcgccggacgtgggcggccttcacggatgaagtcgtgctaccctatatcgtcgaacaattggaaagaatcaaccgccgtcatatcggtgaggagtagacaatatgcaaaacgatcctggaatcctgattaccgccatcggcttgctgttcctcggccttatcatcttcttcgaaggcctaaagggatggaaaatacaagtcgcaaacttcctcgcgtcgcttctgtgcttcttcttcggcctttctgctttgacgttctggttcgtcgttgcgtttgacgtattttaatcgacgaacggtacagaaattttcggatggggacggaacttattagctatgccggtttaggtaggagataatagccgtccctttcgcctcaatgtgtagaggcaatgttgaatccgatcatgtaaagcagaaggcggcaaacctaacatgattatcgacgaagataatatttttgatgatggcgaatcagggtccagtgagtttgatctcacgcagatagaagatgctggaatggaccctttgatgaccgccgcgagcaaggcggccgatgatgcgattgcgaggaacgaaacgcatcgcgcgcaaaaggcggcaagatacgccgaggcgtatgctgaaccagacttgaggaagcgagcgcggttgttgatgctcgaccaggcgttcgatcttccggtcagccgggtggtgaaagggccgttcgatgacttcatcacgaaatacagctcgacgtcagacagcaactacctcgcggtctatgatacgttgttctgtaagggcgacggaaccgtcccacacccgcacttcgacgagtttcgcggccggctggtggaccatcgcggcgtggcgttcaacaacaagaccctcgatccgattgacctgatgggcgccctcgcggctgcggccttggacgatccctcgattaagaagacgattgagacttgctgcgtgtgggctcgtcgatatcgccgcaactctctgatcgagacgttcgagaagaagataccggagtgggatggtgaagagcgaatcgacacgctgctgatcgacttgttcaaaccgttcgacaccgaactcaaccggatggtgagcaagtatttctggctgagcttgtactgccgcatcaactaccctggaatctcggcgccgatctcgttggcgttgattggtgggcaggatgcggggaaatcatatttcggcttgctgatctgtaaggaactgtccggtgggcgcgatctggctccagttcagctcgacctgagccgacacgaccagacgccgttcctgcgcaacatcaccggcaactcggttattgcgaacgtcggcgaaatgtccggcttcaaaaagggcgacatggaacgcatcaaagaattcctggtgcgatcttcggatacattcgatcagaagtttgagcctggcgaaacgatcaagcgacaatggatcaccatcatggacggcaacggatacgatggactccagcgggacgactccggcaaccgtcgattctatccgatgttcgtggcacaacttcccgacgaagatggaaagccgaactgggttaagccgggcgatggtaatgaaccgttcaaggtggacttcacagacttcggccgcaagttctggcaggctatggctgagtgccgcgcctggatcgaagagcatggcgtcgatggatacctgaatatggtgtcggaagctaaccgcgaagtgcagaacttctctatttcggaaatggagaatgcgcgtggcgtggttcgtgatgatacgattgacatgtatctgatcaacgttctgataagttgcgagttcgaagagatcaagccgggcaagaattccaagaatcctgggtggagggctgacaccgtcaccattctgaaatggttcgatattctcgccaggaagaagccgatttctcgccacttaactccgcacctgaaggcgctggggttcgtcccgaacaagaacggcctggctggttggtgcctgcccgtcgataaggttgcgcctggatggacgaatagtatgcaaaccacgctgccgccgttcaatgatgcgcttgtgtacttgctgaggaagggcgacccggatatcactgatgaggctgcaatggcaaagattcgggcagtccgggccgagcgagccaagattttgggcgaggatttctgatgtagtggtggagtgtacttggattaggccgccttcgggcggtctttttctttggtgcggcgtacattagattccggcgttgggcgggattggtagaagtgaatacagtaatttggaccagtttcgagcgcgaataatggaaagtcgatagattttcggtatcggtttagcgtgtatggtggatggattttgcgtgaaatgttgagaaattgcgtgtttgaggtggacttttcgtgggaaatagccgcaaattactgtatagcgattctgagcggtaatttgggaagcctactgccgcgtgggttagcgggccaatttcctaatttccggtttttcgagcatgggttaaaactattctacagcgaaaat

SEQ ID NO: 33 - DNA, 67672 bp, synthetic construct
  source 1..67672: mol_type = other DNA
cgattgcacaatcctaatagaaaaaatctatcacggacgttacctatctttaaaattaataaaattaatagtaatttggtaatttggtaaactttagtatttgaaagcctcgcggcactaagcttgtacatatcccgtcaagtttccgattccagctagctcgcggcagggtcgccggaaacttccggacttccaatccatgggtcgcggcgacaccacggcggactaagcggcaaggaccaaaactcgacgaacggaaccggaaatttgggagcgcgatagaatcgctcagctggacatatttctaacattcgatttaacactcaatccaaacactcaccaccagcgtctcccgccaaccgccgattcgatcctcacccaccagcggatcgcccgtataacatcctataacaccacctaacactcattcatcatcaaacccacccagacctacagcccacccacaagcagcccatagacgcgatccctggccccatagtacaatcgcgccatactcagtgtcgcggcagagcaccaggggccatccgccaaccaagccaccacgacgactccagaatcgaactccagggacgcagcaccaaatgaccaaacactacagccccgacgatctagtcacgccacaggaattcgcagacccgcatttcgcggcgatcaaccaaaagcgattcgacctgtacatcgacctgcgcgtccaaggttacagctcctggcgggtcttccgggccatctggggcgaggagcatatggacggtcccgcgcaggcccgcatcttcgcgatggagtccaacccgtactatcgcaagcagttcaaggccaagttgaacgcgaccaaaacgtccgacttgtggaacccaaagacggcgctccacgaactcctccaaatggttcgtgaccccaccgtcaaggactccagccgtctgtcggccatcaaggagttgaacgttctggctgaaatcacgttcgtggacgagtctggcaagaccaggatcggtcgcggtttggccgacttctacgcatcagaagccgaggctcagaccgcgaccgtcgctgctgcggccgaagccaatggctatgtgccggaaggcgaagagggcgatttcccgtccccgacgccggaaccgaccgaggaagaccgcgccaaccccatttagacataaaataacggctaaggatttaaggtaaggaggtttatttatgcaccccttcgatcaagcggtcgtgaaggatccgaccgcgtcctacgtggacgtcaaggcgcggcggacgttcctgcagagcggccaactggacgatcgcctcaaggcggcgctgccgaaagaatatgactgcaccaccgaagcgacccccaatccgcagcaaggggaaatggtcatcccgcggcgctatctgtcggggaaccatggcccggtcaatccggattacgagccggtggtgaccctctaccgcgacttcgagaagatcagcgcgacgctgggcaacctctacgtggcgaccggcaaacccgtctatgccacctgcctgctgaatatgctcgacaaatgggccaaagcggatgccctgctcaattatgatccgaaaagccaaagctggtatcaggtcgagtggtcggcggcgaccgcggcgttcgccctgagcacgatgatggcggaacccaacgtcgacaccgcccaacgcgaacgggtcgtgaagtggctcaaccgggtcgcgcggcaccaaacgtcgttcccgggcggggacacgtcgtgctgcaacaatcacagctattggcgggggcaagaggcgacgatcatcggcgtgatctccaaagacgatgaactgttccgctgggggctcggccggtatgtccaagccatggggctgatcaacgaggatggcagcttcgtccatgaaatgacgcgccacgagcagtcgctccattatcaaaactatgccatgctccccctcacgatgatcgccgagaccgcgtcgcgccagggcatcgacctctatgcgtacaaggaaaacgggcgggacatccatagcgcccgcaaattcgtcttcgccgccgtgaaaaatccggacctgatcaaaaaatacgcctccgaaccgcaggatacgcgggcgttcaagcccgggcggggcgacctcaattggatcgaatatcaacgggcccgcttcgggttcgcggatgagctgggcttcatgaccgtgcccatcttcgatccgcggaccggcgggtcgggcacgctgctggcgtataaaccccaaggagcggcagcccaggcccccgtcagctgaagaagcgacaaagccccggactctagttcagaatccggggctttcttttgggtttcttactcgccagcttcgatgatttcgaagttgtatttgacgccttcgtgctcgaaagtcatcttgccagccgccttcagctgcatgcggaagcggatgtgtttcgaagaaggcaggccgaactcgatgaatgctgcgttggtggaccggaactcgccgcgcttgccttttacagtcacagccacgccatggcgctgggtgcgtttcttggaaacttctgggtctttccaggagttggcgatggctgccgacaaatccttggcctctttggctttctccggcgcgttcttggcctcttcgcgcatcttccggatttcttccagcgcttcctcttcggtgacttcttcttccggcttcagattctcttcctcggccttctcttcttccttcttcttggaagtgcgggtcttgtaaaccttggccggggcttcctcttcctggaaggcctcttcctcggccggcagagcattcaggatggcgaggcagcgacgctcagcagtcttgcggtcagagaagcgcttgacagtcgcatcagcgttgtgagcgttgtagaaagcgaccagttctttcatttctgcgttctggatgtcgccgaaggttttgatggagttggtcatcttgcgatcctctgttttggaagatttcttttgggcttcggtttgtcgcccccgttgaaagagattatgcctaggtcgatgctgcgtgtctacatctatttcatcagattgatcacaaagccgacgaacggttgtcggatgtgaaaacaccgcagagcaggctgcggtgtttgttggtgagggcgatggtcagaaagtcgggatcgtgatcggctcgatgggcggatcgccgggcctgtcgttgtccgatgcgggcgccgggttggacgggattgcgccggaccgaagctccagagattccgactgcctgctcacctgcggagctggaggcgcctttggcgcaggaggagcaggcgggaccggcaggcctggaggcgccatctgcgtcatgggcggttccggaagatcgggaaggcttggcgctatgctgccaaaggaccgctgcgactgctgtgccggattttcgccgaacatttcggcggatcggttgtccttgatgacttgacctatggccgtcttgtcggcgcccggttctgccggatcgaagccagtgaatggagtggttgtgcagcgcatgttcggatgggtcggcagattgttcagggcgatggagtccgcccagacgtacgggtttttatgcttgccagggctgtggctgatgatctcggcaggaatgtgaccgttcctgttcagccatctcgccatctcctgccgattcagagggctggccacgatctggccagtggaatcttcgacgatagcgaacagatcaccgagtttgaatccgatgattgtgtagttggacctggactcgccgacgaaagccagggtttcgatgttgtggtagatatcttggtcttcccagatgtacagcatggttcactcctcaataaggctgcttgttgtgttcgaccagagacataccggccggaactttgaagcggatgtattcgatcatcatcgcggttcggcgtttgttggcgccggattcgtcgttgacgaagagttcgcattggtgcggaatgactcgcgtcaccaggtcttcgcctttcgaaccgtagaacttgatgtaggctgcgacgcctcgcgtcatgctcagatggatcgtttcgcagagtcgctgcgcggccgacgcgctggacagatcggtcggactgaccgtcgcccagtaatggccactttgttctttatcgggcataagctaccctccaatgagaaagcctctgccgaggctggttgttagtcgagccagtcagtcgtacttcctgccgtgaaatgcgtgtccgcagccgaagattgatctgtatgcgttgattgaattcctgttcctttcagattcgatttgaatactgagcatctccagctcgtatcgggccagtccgccccattcgcgctcaatgcgtgaatactcggcctccagttgcctcaatcgttcgctcatataacctccaacaatcgtcattaatcgatcaacccctgccgaaccgcagaggctggttgttaatcgcgcttcagcaaaaccactttctcgtttgcgcgatgattcctgtgccagtcttcccaatagtctccgcactgacgggccaactccagagtgacatagccgtcgtcgctgctacattcgacagaaaggacaatcgcgttgcctctggactcgctgccagacccgaatccgatcagaacttcgtcgccagttttcagctcatctgccctgattactttggccatggcgttctcctattgggtagcgccgcgagggcggatcgggtcgatgtcatgtaagcagatggtgggatagtccctggccagcttgagcttgaagtccacccagtcagcaccgatgagcgccgcgacttcgatgcttactttgcggtgcggcgcagctccagatcgcaggactatagcccgacgccgaacgggatcgttgacgtcaacatgcgtgagtatttcgtcgccgacgagcaactcgcaagccatcaatattttggccataatacactcctatgaggaggcgcgcccaggacgatcccagccgcgccgatggattaacgtttgtgaaggatggacactgcgtccacgtcgaggatgctgatggtacggcgacggcgcggattgctgcgttcatggatgcgaatcaggtcagcggatggcgcttcgtgcaccacccatacatcctccggcttctgcgtccggagcaggaccgtcacttctgtgttctgggcgaggccgttgcagatgaacgtgaacttggacgagggagttctgtacatttcgagattcctttttggacttcgggtccggctcctcagccggtgaagagattatgcctgatcatcgcagtcgagtaaagcacttgtgtaccaattctccagttaaatggaaccaaagcgcggtatcgctgattgctacgctcccacgccatggcccttcttgctcacagacttcgaaccacaagctgatttccattctggccaggactcggccgaaggattcgagccggcaccggctggacagaatgtcgacattcacccgtcgattgatttcgtaccggcgaccgttgatgacgaataccaagcgtagagtttgtccgtccagacattcccagtatctggtttcataccgaagccaatagcgcttgctagcagggcctaccatagtcatttaatcgatgctcctggccgcgccacgcggtccggtcggcgggacgggatcgaaccgacccaggatgtagtcgggccggcgcgcttcctgaggacacacggcgagaaggcgccatcctgcgtccagggcatgctggagttcgtccgtgcagcagtcttccttgagcagcagacgattgatgctctggagatttggaccagggatagcagagccggtgaccgagttccagccttcgataccgtgcaccatctgcggctggttgatgtagccttctgacctgccagccaaccggctcgcggccagctccaggcgctccagcattggccgcagagcggcttccgggtcaacatcgtcccagagcaggaccaggttgatgatggtgtacggatagtccttgtccagatcccaggccgaagcggtcagacggcccaggccgatttcattacacatcacgggaacgtcgttgctccaggtggacggctcccagttccgctcgccaggattcccgattgttacgccttccaggttccccaggagaacgtggagcttgctgacatattccgcctccaaggctttccgctcttcgtcggtctggttgtggcgatagaaggatggagggctgacttttgcatggtagagtttcataactgttcctcggttttggaaggcttgaacgttagagaattgtgtcgcagtatttctcgaaaggactctggcgcttcttctcgcagatcgcacaggtgatttccaggtcgggcagctcgctgtaagtcttgccgaggtacagccagcgcttgcacaggctgcgaccgtccgacgtgaagaaatggactttgcgagcgtcgccgggttgcgcccagccgccctgatagttttcgcgcttgctcatggcgatatttccttttggatcgtggatccatggtgtacgttcagtcacccaaactccatctacatagatcaggactgacagagcagtcgcgccaaacccgaagcctacatagaatgaacctggatcgatttccatggtggcgctattagtggcgctattgcaatcgacttcaaagtcgaatagcgaatgaccaatcataccatcaccatgtcgatttcattgacgaagaaatggacatcgacaccatcggcgctgccggtgtaacgcagccgagtcgtcccatcaatgtgggcctcctcgacgccgacgacttccaggatggtgtcgttgcagtacagtttgacgaacatcttgatgccagagccaatcgcctcgaaggcgatctgcttgtacaggtcttgcttgatcatgctttacgctcctgtttgcggatgtattctgccctggcttcggcttcgagcttcgcccaaagcgcgttgtcgactggaccccagggacctgtctgagttccgtccaccggtgcgaacttgccaccggcgcgacgatacttggacagagttctcagaccgatgattttctcttcttgggaatcgagttggacgatcacttaacatacttcccgaagtagcaggtgtggaggatttccaggcccttggaaatggccttcagcttgataccgaaattcttgatcgcccagtccagatcgtggtgatagaactcgatgatgttgacgatttgaccggcgctgtagtggatgacgcgaaccttgccattccagcggaaatcttcgcggctgtttacggcctcgacttcgatagtgtcatttctgccgatggtccatttggagctagtcatgtcgcaatcctctttttggagcgtttcgcgtttcgatgaggtaactatacttcagtcacctcatcgagtaaagcccttttgaacagattgcctaaaatttctggaagacaaaatcaatcggtcgcgtcatcgatagcgaacgccgagcgcgccaggtcgatgatctctggccaggtcaaagtgaaggttttgccgtcatcgagaatgatgatgggagtccgcagcggctcgccaaccagcagttcgtaggaatgtttctcgctggatgcggagccgatgcgggtgtggagggtgagttaggccggggaaatctcggccgccgtaaaggccgcaatgcgaccgctattcagcctgacgaacaccgggaatgcgccgccctcgcgaatctcgctgatcacgccgtggccgccgccttgcgcatagacattctgtccaacagacaattttttgaggatgtcgctaaaaactacggttttcatcgtcttgccctcggtgatgcccggcgaaccgggcggggtttgctacagcatgcctgctttgcgttcggccttgatggtgtataccgcctcatcgaccagccactcttcagcttccaggtaggctttggcgacttctacggttacgttggcgaatttggctacgttctggattttggcttgcttggtcatttcgatttccttttgtctgaagggtttcgcgtttcgatgaggtaactatacctcagtcacctcatcgagtaaagcattttcttcagattatctgaaaccttttgaagccaggaattgccgccagagccagtcgatgtgttcgttgcagtaacgctcgccatcggacgacatagctaaggcgccatcattgatgccgaagtgggccgcagcgagacattcgaactcgaactggagcgttcctgggcgagggatatgggacatggcgtatttctgcacggtcagtgatcctcagaaggtttcgcgtttgcgatagccgctactttctgcataccgaggcgatagaattcggcctcttccctggccttggccagattatccctggcttcgcacgccagcttgtactgattgttggcattctggatgcttccgtccagactcctgtccagttcttcccgaagagccttctgcgacgctagctcggcctccaaatcctggattctgatctgaagctggcgattcctttcagacatctcgttttcgcgggcgatggagttctgaaggcattcgtcaaggcgagtattttcgcgcaccagctgatgcttttcgactttcgcctttctgcacgtctctcgcattgctgaaagctcactcgcatgcagatcgtcatccgggtctttacgctcttccttcgactccatccgcatatagtactggccggctgcgaaggcgagcactgcctggtcggcatacgctgcggcatcggtcatgtatctggatttgtagcgaggcagaaacttgcactcctctggatcccagaggagactatcggcaataggccagaatttgcggaagccatcaggatcgacttctacattgaccatttgcagctggccggcctccacttcgacttccagaggaacctgaatggtgccggtgatgtactggaagtacactatgctagacataacacaatcctcataagaagttgcggccaggaccatcccagccgcatcgtaatcactcttcgccttcgtccgcgctcagccactcttcgaaggcgaaatttaccttcgactcgacccaatcctgcagctcatcggcgaactcgtcactgtcgatgtccatggtgattcccataacttccatgttccatagcgcggcattcagttcgaactgtaccatctgctcgccatcgacttccaacaggatgcggtctgcgacttcatagtcgtctacatcgaacagatggccgcccgccaggaggtgctggacgaaagcttcatcgaggttggtgacttcgatctggacttgtttggtcattttcgtatccttacttagcggctttgaattgggctttgaggttggcaagttcagctttcagatcgatcatcgcctgaccgcgcaggccttccatttcagcctcgctgattgcgatcttggctgcgcggattttgtcgttgatttgatctttagtcatttcggcttccttttgtttgaagggtttcgcgtttcgatgaggagattatgccgatagtcagaatggaagtaaagtgtctgagtgaagaaatttctgtacaccgacgaacggtcgcgctcgactgtctgctgcggtgtcgatatactcggcctattgcgaacgatggactgattaaatgttcaagctcaatcctgcactgcgagcggtctggcgaactcgtgcccgttacaaagtcatctatggcggccgggcgtcttcgaagtcgcacgacgctggcggtatagccgttttcctcgcggccaactacaagctcaaattcctctgtgctcgccagttccagaaccgcatcagcgaatctgtctacacattgatcaaagacaagatcgaaaactcagagtataatggcgaattcatcttcaccaagaactccatcaagcacaagattaccggctcagagttcctgttttatgggatcgcccgtaacctgtcggaaatcaagtccaccgaaggcatcgacattctctggcttgaggaagctcactacctgacccaggagcaatgggaagttatcgagcctaccatccggaaagaaaactctgaaatctggatcatcttcaaccctaacgaagtcaccgatttcgtgtatcagaacttcgtggtcaaacccccgaaagactcctgcgtcaagatgatcaactggaacgaaaatccgttcctcagtgagacgatgctcaaagtgattcacgaagcctatgagcgcgaccgggagcaggccgagcacatttatggcgggattccgaagacgggaggcgacaaatccgtcatcaacctcaagttcattctcgcggccatcgacgctcacaagaaactcggctgggagccggccggatcgaagcgcatcggcttcgacgttgcggacgacggcgaggatgcgaacgcaactacgctcatgcacggcaacgtcatcatggaagtggacgaatgggacggcctggaagatgaactgctcaagtcgtccagccgcgtttacaacctggcgaagatgaaaggcgcctcggtcacttatgactccatcggcgtcggtgctcacgtcggttcgaagttcgccgaattgaacgatgccagcccagacttcaaactgatctatgatccattcaacgcgggcggcgctgtcgataagcctgatgacgtctacatgaagctgccgcacacgacgatcaagaacaaagaccacttcagcaacattaaggcgcagaagtgggaagaagtcgcgacccgattccggaagacttatgaagcggttgagcatggaaaggttcatccattcgacgaattgatttcgatcaactctgaaacgattcacccggacaaactgaatcagctgtgcatcgaactttcgtcgccgcgcaaagacctggacatgaacggccggttcaaagtcgagtccaagaaggatatgcgcgagaagcgcaagatcaagtcgccgaacatcgctgactcggtgattatgtcggccattctgccgatccggaagcccaaaggcttcttcgacttctaaacatagaaaagcccggagcgatccgggcttcgggtcttactcggtgtggttcctggcgctgagtgtcgacgaaacggcctcgccgacgcccagagcttcctgaccggccgcgagcgcttcggcttccgactcgacgttgaagtcatcaccttggccattgcctggcggaacctcgaccagcacggcttcttcgccttcgaaacgcaggtcataggtcttgtcgacggacagaccgtaacgagcgttgagcgcgtcccagagctgggcctcataggtacgcaggtcttgcagagctttctggtggctgagcatggccatgtcaacggcccgttgcagggtttcgtccaggacgttgaaccgaatgcgaagagcacgaatccgctcgacggtttccgcatccactacatgtctttcgatcattgcttttcacctttgctgaatgttacgttgtagccgttgtcggccaggtaggtcagggcgccttcgaaggaagttccgacgaggtgcttgagcttcatttcgcgttgcgcggccaaccagaatgcagttccggaaaactctgcgcggccttcggacaaaaccctgccatcaggcccggcgatccgtacatggacggaagatagcttgatcggcatcagtgaatacctccactggcttgcgacggcatgctttcggcgcgagcggcttcgcagtccgggcagggacaggcttggcggacgcgctccaactcgtcggcatccatgacatagagcttcccatcggcagtgtcatgtgccatagcgatgttcgggaagtcggttgcgctcaggccggcgacagtgcggatttcgtcccagagcaccagatgctcggcattcagtcgggcggcgagcgcttcgtgctctttagcgacgcgcgccatgaactcgtccatccggaatgcgaattccgcatcgatggcacgggccgaggccatggagctgagtcgaatcggttctttcttcatgatgattctcttttggttggtggttgttagctgctcaggcctattacagcctgagcagcatgatgaagatgaacgcaaggaacgcgaacggcacaagtatgccggacatcagctttgacaggcgctgcatctcagcgtatttctcggtagacattccgtgctgcgccgcctcggccgcgaagcgggctttcgcctcgataacttccgggcgcagcgacaggacatattctaaggcctcttcccgcgctttttcggcctcgaccgacctagggtcgcgggccgagacttcgctgtgccctggcctcgcgggatgggcttgcagcgatggagggagttcagcggccacgactccataatcggcacaggcccaagcgatcccaatgaggatcgcgaggatggactggacgattcgcagcatcactttgtcgctagggaagctcatgatcaatcctccaccgaccgaacgatttccatgttgcggccggcattggtcccggcattgaaggcgcgccgaccgtcgctatcgtccagacgcatgagcttagtaacattagacttcttgtagccaggatcaccgaaatgttcgtgaaccgcagcttccttcgccaccaccagagacgttccggcagaagataccagctccatgcgcttcctggtgatggattgaaggcgatagctgatttcctgggtcgcggccagcttgaattgcgcggcaacctttacgttgaaacgttcgtacccttgagacttctgatactcccggcacagacgatcaacggcctcgaccaaggagttgaacatgttcactgccagctcaacgtccgacttgtagcctttaaagcgtacggcatgaccccagcgcttggtagtgcttccgtcgcgggcactcctggacgccttagccgatgctctgtggttgttgacgccaccggcgaaatccatgatgcaatcattgtacgtcgccacggccaccgagaagaacttcatccagttcgggattgcggaatagtaacgagtggcaatttgctcatcgaactcttcgcgaatctcgccggtcgcttcgaagtcgtgaaggtcatatttgtccttcaatttcttcacgcgctcggctgcgatagcagcttcgtgcggactggaggagtcggccgccatggcggtcagtttgcggatgcggtctttcgccttctcgatggcttccggagtgaattcgttctggtcggtcatggtcggttccttttgtctgaagggtttcgcgtttcaatggagctattctgccttcattcagaatggaagtaaagcactttcttccactatttcggcatcgactggaagaaattccagatccaatcacctgctaccagcaagaggatgagggcgacaaagaacaggacggcggccgcgagctgtgcgcccggcttcagcttgggatggctgagcttgggctctgcgggaacggatggagcgttggcgctgcgaccgtcttctcccaggccgtagccgatgccgcgctcgcgcgcatggagcgacaccagaagtttcagatactcggtctgcttttgcgactcttcgtagatgccggcgacggcgaaccagagggcgaacacgacggacatacacacaacccaggcgccggtcagcaggagggccagcgggccgatgacgaagacggtggcagccaggacgattgcgccgccccagataatgaagccggccagaccattggtgatgtcgatacagaactttttcatttgcggattccttcggttacaggattgaggggatttggaactctgcgccaccgagcacatcggtgacgacttcccagagcgtcggcactgaccactggtagcggtcgaagtcggtttcaggatcgacgcccagcgtcacataggaagtggcaggccatttatgaacgctacctttccgcatgagagtcgccacgcggccgtcaccgagcgggttcgtcttgtgcggaacgtacgcagacatcgaatattgctgcccagcatcaacgatgaatctttgtctctggcgcagacatacagagccaacaggattccaaccgcgaccgccgcaggcctggcgagccgaagaatgctcatacccttcatgagtcatttcgccgaggcaagccgagcgatcttcgtaataattgatgttctccatcgatccaaccagcaccagagactcgaaatcgaatcggtgatcgtgaatggacgagtgatggacgcaacgccggcgcggcaactccgggtgccaaacatggaggcgccctgccgggagctggacctggatgaaccccaggccgtgcaaagtgatcttgtccttcagcggatcatggactgtactcatggataatcctcaatagcagaagtgtatggtgagagttacgatggccaagccggtcgcccatagaagggcgaaccaggccatagcttttatggttatgtagatcatccgaagaattttccggcacagatcgggccgattcccatttcgatggacgcgtggttggtcaactcgcgaccgcagcaggagcattgaccagtcttccggccgtaggcgactgccgattccatcggcttttcgaacatcttcagaacgtcgtcgtgctcggtatcggtgcagtcgcgactcttgatgaatttgccattggtgatacggccgaggtagatgtcgcccaggacgtacaagctaccggcgttccggctgtgagcgctagcctctttcaccacaacgatgagcggctcctcgccttcgccagccaggcgaattttcgggcgcttgattccagattctttcgccttctcaaacgccttctcgatgccggaaatgtccagagtcggcgcagcagcttcctgcgcggccactttctcgcgatacttggcgaagttttcgatggcgcgcttcgcagcagcgatctgattttctgtcaaggagccgtatttatacaacgactcctgaaggctctgagcgaagctgaaggaatttccagtccaccactcgacgatgtccgggtgcgcggcttcgaaggccttaattttgaggtcgcgctcttgcgcagcgctacagattttctcgatgcgcttttctgccgccttagcacggctcttggcgcgctgctccgggctggttttgtactctttgtatccgacaccgccgcaggcgaaacaggcgcgaccataagatgaagggccacggtacaggccggtgcctgcgcattttgtgcacttgtcgcgatacagcttcacttccttccgggagttcgggcgggcgcccatggacacgtcttccagcgtcttcggcgcttcgtcagtgatcgctacggtagcgaagtcatcgcccaggtcttcgaagccggtgaacagattctctgctgcgttcatatcgattctcctgtttggaaagttcgtttcgatgagttgactatacgccagaaatggaaaaacggtagcgatttctcactaccgttcgtcgggtcgaagataatcaatagatgtcgctattgatcttgaacccatgctcagcgccgtcgttgtagtcatactcagcatagctgtcgcagtagtcgttcaaatgctgaatgatgcctagaacgtcgttagcggccttgtgccgtttcgcggcgatggtcttggcgatgctatcgccgacttccagggtttcggccgtccggcgatggatcagtagacgactccaaagatagagccggacgcgacgaattatgtcgcgatggcgctccagtcgtccgtgcagctcttcaatttcttgctcgcgagatttcaccactcgtcgaagctgttgaacttccaattccaaatcggccttagtagccatgttcacctcagaaaggaaaatcgtctgggactccaggaagctcgacgattattgttgagcctgatcggtccagaatgcatccgaccgagccggccctgtggggatagggtctacacgaactataacaggtgacttccaggactatccgccaggtcgatcctccacaccatctacagactggtgggcgcttcgacttcagttttcgttcgtccaagacggcgcgtctgtcgcaggaaaggcagcgcgccttaaccgacgtaaccatgggtatagtcgatcattcggatgagatcatcatcctctgattccctcgacttcagaccgcccaaagagtcagactggccgttgcatttcgcatcgatatccatcgaagacaagaatcctgccgatactacggtgatatcaactttgtcgccggccttcttgaagccttcgcactcagcatcgagggccacaaccgcactcgcagccatgttcacatgacttatgaggtcggggaagatcacgggaacttcacgcgacatgccacggaccgtcatcttcaggactacatacttcatactcactatcccttttgtatgtgaggaaagaatttactgttttccggatggtggaagcgctcggccgcaggcggtcttccttccggacattgaatcgtcgaaggcgggaaaaccgcgcaggcgataatcgccgcgaggagtgcagcggatgtcgacatccagagggcggtttccaggctcacccgaacttccggacggcgcggcttcattcgctccaccctcttcccggttcataggatggtagactgccgccgcgaacccagttgtcccacatgcggttcagaccagtcggtggctggggcggcggactgtagaatccgggagtctcagtgctgctcaggaaataaggcgtgcaaacggcctggacggccagttggtgccgctcccacatcttatcaatcgctcttagcatgacgtcttcgcactgagccttactgtcgaaccgtctgctagtgtggtccggtatctggatgcatccgtctccagtgcaaaggaaagcagtagcaatccacacggtgatactcgccatttcgtcaccctctttagttgatgagcagagtctattccatctgctcgccaggagtaaagcgcttttcgtcgggataaatgccgatgatgtctgcgtcgagcatccaaatgtccacggacggatcgtcgctgctgatttgatataggttgtacagctcccgtccgccgacagcacgctcacctcgcggctcaaccgccagcaccttgccgtgtccttctccgtgctcgtccaggtatatgacgtgatcaccgacttcatagctttcttttgtgacgaggcgtgaacgcgagctgttctgcgattctactacccaggaatccagcacgccgcctttcacgtcgcgaaacaatcttgccgatttgtcgcaatcgaatacgcccagaacttcgccgtctttcaacacgatatgtacgattggcaaaagagtattcatgtttaatctccattggttgataattagagtctaatctgccgaaaagttcccgtaaagaattattttctcataactgattagttgcaactgttaatctgatgtatatgtttgaatctcttttgaacgtttgatgtttcccctataataagcgcacacagccaacaaccacgtggaactacaatgtttaaactttcctggatattcgggcgcaaaaaggataatgctgcctgttctgaatcggcgccggagaaagtcgcacaaatccctcaacacgatccgctcgaccccatgatcaagctgggaaggattcgcggctggaacgtcgagccggagaaagccccggtaattcgtagtgtgaaagatttcctggagccgggcctatctgtagcaatggatagtgcgtatggtgatggaccaactccggccgcgaaggctgctgcgggcggccagaatccctatgtcgtcccgactatgttgcaggactggtacaattcccaagggttcatcggataccaagcttgcgcaatcatttcccaacactggttggtggacaaagcttgttccatgtctggggaagacgcagcacggaacggatgggaactcaaatcggacggcaggaagctatccgatgaacaaagcgcgctgatcgcccggcgcgacatggagtttcgcgtcaaagacaacctcgtcgaactcaacagattcaagaacgttttcggcgttcgcatcgcgctgttcgttgtggagtctgacgatccggactactacgaaaaaccgttcaatccggatggaatcacgcccggctcctacaagggaatctcccagatcgatccatactgggcgatgccgcagctcactgccggctcgacggccgatccgtcttccgaacatttctatgagccggatttctggattatcagcgggaagaaatatcatcgcagccatctagtagtcgttcgcggaccgcagccgccagatatcctgaagcctacatacatcttcggcggtatcccgctcacccagagaatctatgagcgcgtgtatgcggcggaacggacggcgaacgaagccccgctgcttgccatgtcgaagcgaaccagcaccattcacgttgacgtggaaaaggccatcgcgaatgaagacgctttcaacgctcgcctggcgttctggattgccaatcgcgataaccacggcgtgaaagtcttgggtactgatgaaagcatggagcagttcgacacgaaccttgccgacttcgacagcatcatcatgaaccaatatcagctggtcgctgccatcgccaagactccagccacgaagctcctcggcacttctccaaaaggattcaatgccactggtgagcacgaaacgatttcttatcacgaagaactggagtccattcaagagcacatattcgacccacttcttgaacgccactatttgcttctggcgaagtcggaagaaatcgatgtgcagctggaaatcgtctggaaccctgtggactccacgtccagccagcaacaagccgaattgaacaataagaaagccgcgaccgatgaaatctacatcaactctggcgttgtgtcgccggatgaagttcgcgagcgtctgcgcgacgatccgcgttccggctacaaccggctcaccgacgatcaggcagaaaccgaaccgggcatgtctccggaaaacctggccgaattcgagaaggccggtgcacagtcggccaaggcgaaaggcgaagccgagcgagccgaagcccaggcgggcgccgtagagggcgcaggcgacccggttcccgccgctccacgcgggactaagcctctcgcgaaagcggccgaggaaggggccagcgaggccgctgaaccgccgtcgcggccggaccccaaggccgaactgcggaacttgttggtcgatcttttgtcgaagctccaagacctggacgacattaaggcgccggacggcgtagacatagagcacaatgatgcgcctggcgtaaagcgcacgtccaaacctggcgtgtctggcatggagccttcggtgttttcgtccaaccgcatcgtcgggcctcgtgatcattcggaactccagagaatcaaggtgaatggaataaccaccttgatcgaaaatccgcgcggaagcattcggcaaggaaaggatgggagttggcgagttcagatgaaacaccactacgggttcatcaagggaacgaaaggcgctgatggggatgaagtcgattgcttcgtcggtccgaatctgggatccaaacgggtcttcgtcgtcaaccaggtgaacaaggaaggtcagtttgacgagcacaagtgcatgctcggcttcaacaacatcaacgatgcgaagtctggatatctgtcctgcttccgcccaggttgggatggtctcggctccatccatgaagttgacctacccgctttccgtcgctggctggcgaacggcgacacaaccaaaccgtttggaggcgagtgatggcattcaaggcctccaaaaagcgcgaacgccgggcacctcttccggtcggaagagggaagcccataattccatcgtcaggaatcgaggcctggtatcgaaagcagatgaaggatatttccaagctcatgatcgccgactatcgaagcgagattgagaaggcgctgtcccagcctgcggccgaacggttcttcgccagcgacgaatccgttaacgtcctgttcaagatgacccttcgaagcctacagcagcgatggaaccgcatttttgaaggcttcgcggccaagatcgccccggagtttgtcaaccggaccgaagaagcggccaccgccgcgaccctgcacagcttgtctgtggccggcgtcgatcagccaagagctgcgtacaatgagagcgtcaggaataccctggaggcagcaactacttacaaccatactctcatcaccaggattcaagaggaagtccacgagaagatttatacatcagtaatgttgtctctgacttccccaaatccggaagagcaaggaacttccggcataacgaacgcacttcgcaaagtcgggaagttctctgaagatcgaatcgaactcatcgcaagagatcaaaccagcaagctttacagttctctgagcgatgagagaatggcggaaaatggagtcgaggaattcgagtggatgcactcttctgccggcaagactcctcgccatacccacctggagaaagatgggaaaaggttcaagctgaatgaccccagactttgggagggtccgaaggccgaccaggggccgccaggatgggcgattaactgtaggtgcagaaagataccaatcatttgatatcgataggagcgctatatgccgttagttcatggcacttccaatgaggctcgttctgaaaacatcaagcgggagatcgaagccggtaaagacccaaagcaggctgcggccatcgcttactccatccagcgcagtgagaaagggaagacggcgaaagattgttcgcctgagctcgttgccgatcttcgcgccctggtggacgctctgtcgaggctcgtgaaatgaaccgcaagacatgccggcgccgactcgtggtcgatgtaatcagggccaatattcacggcggattcttcagcctgaagtttgccgccatcgatttggcaatcatcggcgtcgccatcttgatgacttttggccgataatgctgagaaaatctggattctgactaaaattctagtccggatagccgcaagttaccgtttacggaaaatagcagtaatttggaaagcctactgccgcgaggctttaacagagctagttcctaatttccgatttagccgcgtgcttcaaaagtatatagcctgggaaattagaagtaacgtcccaatagaattcatctataagtaacgttataatataacgtcaatctatatgctctagacgtattgaaatttaatttttaatcggtaaattggtaatttgaattagtttatgagttgaaagcctcgcggcagtaggcttagacaaatcccgtcaagttccctagaccaaattaccggattttcgcggctgaggaaactggtaattagatcataatacaaattatagtgtaagttaacagtcgcgactacatctaattattgttccgcttatttacccttagatgtactgcgtatataatacagccatagtccacgactcttcgaattaacgatggcaaagtcgaaaagaaaaattgacgaaaatggatatatgaccatcgagggttgcccgatcagctcttatggcgttttccaatattctgctggtcaactcggtcttccgggcgatccgatgcggattgtcaacgtatatcgcccggagtctgccgtcagcgatcctgagtacatcgaatctctgaagaatctcccgttgatcgacgagcatgagatgctgtcgggattcgacgacgatgacgacagtgtggcccccgaagacaaaggggtggagggcatcatcacctccaacgcttactacgaagccccatgggcgcgcggcgatatccgcatctattcccgcaacatgcagaatcagctggaaaggggcaaagaagacctgtccctaggctatagttgccgctacactgagcaacccggcatctggaacggaacgccttatgaagtcgtccaggacaagatgcgcggcaaccacatcgccctggtaaaagaggggcgtgtgccgggggccagagtattggatggtctgtgttttgaccatctcagttttgatttcagaccatccgatgagggtaatgaaatgagtctcaagaaagccaagcagaagccccctgtccagcgcgtagggcaagctgctgactcggcggtcgaagagttgcgcgccctgtggccgaagctctctgcgtctgtccagaagttcctgggcgaagaggcgcaggagccggagcatcaggaaggcgcggccgctccggccgaaccgaccgacagcgagcacatgaccgagcatccgactctggaaggcgctcagaaggacaacgaagagcatgaagaggcgccttccgttgtcgatccggctgtggccgccgccgagtcggagcgtcaagaaagtgccgcatccgaaatgtccggtgaaggcgaagtcgccgaactgatctcccaggtcaaggccattctggctcgactggagggcacggcggccgaaggggcggacgaagagcatggcgaaggcaaagatgtcgtcgagggtttggaggagcagagcagcctcagcggctcgcaaaccgccagcgacgatggtggtgagggcaaggataacagcgaggaacttcctgaaatggcacagaagaacgcgcaagatgctgcaattcgcggtctctatcgcgacattgctgctaaagatcgcctctacaagcgtcttagctccgtggttggcgcgttcgatcaccgagctatggactcggctgaagtcgctgtttacggcgtgaagaagctgaacatcaactgcgcgaagggccaggaagctctggcactcgacatgtacctgaaaggcgtcgaggcctcacgtggcgcggccagccgtcaatcgaaagcccaggattcggccggctctgctccgcagtgcgccgagctggacagctacctgaagggggagtaactcatgttccagaaacaagtttaccgccagtacactcctggttttccgggcgatctgatcgaggacggcccgaagcgggcgcggccgggtcgaatcatgtctctgtctgccgtaaatccggctgccaccgccaccggccccaaccgcatcagtcgcgctttcggttacgccggtgacgtcagcgccctcggcgaaggtcagccgaagaccatcgcggctcgtgcttctgaagtcgtgatcggcggcgccaacttctttggtgtcctcggtcatccgaagcactatgccctgttcggttcggccggagactccctggctcccagctatgatctgcccgatggcgccgaaggcgagttcttcgacatggccaccggcctggtcgtcgaaattttcaacggcgccgcaaccgccctggacctggactatggtgacctggtcgcctatgtacccaacaacctgcctaccgccgacaacgcgcttggcctgccggcaggcgccctggtgggcttcaaggctggctccatgccgaccggtttggtccagattcccaacgcacgcatcgttaacgccatcagtctgccggcccagtcggcggggaatttggttgctggcgttaccatcgtccagctcacgcagtaaggaggcgtcatgagccagatcagcaagacccattcgcgcctcgcaggccgcaatgcgaaacctttcgacctgaaaaacatcaccaatgacgccgtggcgtctctgagtcgcatcggcctggtattcgaccacgccgtcgtccaggaccagatcaaggccttggcgaaggccggcgcattccgctccggctcggccatggacagcaacttcaccgccccggtgaccacgccgtccatcccgactcccatccagttcctgcagacctggttgccgggcttcgtgaaggtcatgaccgctgcacggaagatcgacgaaatcatcggcatcgataccgttggctcctgggaagatcaagaaatcgtccagggcatcgtggagccggccggcactgcggtggaatacggcgaccacaccaacatcccgctgaccagctggaacgccaacttcgaacgtcgcaccatcgttcgtggcgagctgggtatgatggtgggaaccctggaagagggtcgcgcctcggccatccggctgaacagcgccgaaaccaagcgccaacaggcggccatcggtctggaaatcttccgcaacgccatcggcttctatggctggcagagcggcctgggcaaccgcacctatggtttcctgaacgatcccaacctgccggcgttccagaccccgccgagccagggctggtccactgccgactgggcaggcatcatcggcgatatccgcgaggccgttcgccagctgcgtattcagagccaagatcagatcgatccgaaggcggaaaaaatcaccctggccctggccaccagcaaggtggactacctgtcggtcaccacgccatacggcatttcggtttctgactggatcgaacagacctatccgaaaatgcggatcgtgtctgctccggaactgtcaggcgtccagatgaaagcccaagagccggaagatgctctggtgctcttcgtcgaagacgtgaacgcggccgtcgatggaagcaccgatggcggcagcgtgttcagccagctggtacagagcaagttcatcaccctgggtgtcgaaaagcgggcgaagtcgtatgtggaagacttctccaacggcaccgccggtgcgctgtgtaagcgtccgtgggccgtggtgcgctacctcggcatctaaccgatgcctattcaccaaaggccggaaacccggcctttgttcactctgactctgactcggttgtaggggccggttagggcataattactaggactacgccaatgactgtttacatcgtttccgccatgactcaatccgtgtcttacaatgcgtatgacacctctgatccgtccaatcctcgcctccagcgaaagattctgattcgtggccgcgccggcatcgcatccgaaacttccggcttcggcgacatgatttccgacgcggccgggcgtccgatctggaccccgcagggcgattgcactgccgtgagcgattcggatttcgagctgcttcaggccaataagattttcatgcgtcacatggacaagggttatctgcgagtcgtgaagacagacatcaccagtgaccaccagcggatttccaaagagactcgcaccatggagcgcgatggattccagcctctggacgctgatcgtctgcagcagaaaatcaaggtgaccaccgccagcgcttcccaggaacaagagttccggatttaaccgagggtttcggtatggtgattttcgacgaacataagtttcgcacgctgtttccggagtttgctgatccagccgcttatccggacgtgcgcctgcagatgtatttcgacattgcgtgcgaattcatttctgatcgcgattcgccataccgtattctcaatggtaaagccctggaagcctgtctgtatcttctgaccgcccacctcctgtcgctgtccacgatgcaagttcagggcgcggctggaggtggcgtcactgccggtgggacccaaggcggtttcatcaccagcgctacggtcggcgaggtcagcgtggccaagctcgcgcccccggccaagaatggttggcagtggtggctttccgggacgccttatggccaagagctgtgggcgctcctcagcgtcaaagcggtgggcggattctacatcggcggtcttccagagcgccgaggcttccggaaggttggagggacgttctggtgatccctggtgcgaatcttctgcgaatggccttcggggtcatcggcactcaaattgtgaaatatcgcaagtttgagcagcgagtgaagaatgatcaagctcagtacgtttccatgttcgaggagcctttcgacctggcagcgtctgtccagcgagtccgacgcgatcagtatgtccagtttaatctggagttccaacggaattatgttatgatcttcgccaactttgagatggttgacttggatcgcgatgtggccggtgaccagttcctctggaccggaagagtttttcagctggagtctcaaggctcctggttttatcaggacggctggggagtttgcctggccgtggatatcggtgcggccaagctaactgatgacgggaaaccgactttctaggtgatgtatgtttgacggcgaactgatagcgaaaatggttgtcgagctgaatgcggcgatgacatctgctcaagaggctttgcagttcccggattttgaagtcgtccagaaagctcagccgacccaacagggaacgtcaaccaggccgaccatctttttccagaaactgtttgacattcctcgcggctggcctgccaccgattggcacctggacaacacgacccgcaaatatgtagaaataactcgacagcatgtagagacgactttccagatcagttcccttcattggcagaatcctgaaataactcacgtggttacggcttctgatatcgccaactatgtgagggcttatttccaagctcgatccacgattgagcgcgtaaaggaactggacttcctcattcttcgcgtttctcaaatttccaacgaggcattcgagaacgacaatcaccagttcgaattccatccaagttttgacatggttgtaacttacaaccaatatattcgcctgtacgaaaacgcagcatattcggccgatggggtattaataggcgtatgagtctgaggcgcgattcagagctaatcgccgcgcacctccagatgttaagagccatgcgcggcaggtccgtttcagccggatggtattccacggctcgatatcctgacaaggcaggcggatcggtcggaatacaagtagcgagaatcgcacgtctcaatgagtacggcggaactatcgaccatccgggcgggaccaggtatattagggacgccattgttcggggccggtttgttggcgttcggttcgtcagaaacgactttccgggagaaaccgaggtaactaagcctcacagaattaccatcccggctagaccgtttatgcgatatgcttggaacttgttttccgcagatcgcgccgcaatccagaaccggatagccatgaggctggccagaggacagatcactccagatcaagctcttgcccagatcggcctggcgttggaaggatacatagccagaagcatcaggaccgggccatgggtggctaactcagcatctacggtcaggagaaagggattcaacagaccgctggtcgatacggctcatatgcttcaatcgattagcagcagagtaacataaccaggagatcatccagtgatcagtcagagccgttatatccggatcatttcgggcgtaggcgcaggcgctccggtcgcaggccgaaagctgattctgcgcgtcatgactaccaacaacgtcattccgcccggaatcgtcatcgagttcgacaactccaacgcagtcatgtcttacttcggcgcgcagtcggaagaataccagcgcgctgccgcatatttcaagttcatcagtaaaagtgtgaattcgccgtccagcatcagcttcgctcgctgggttaacaccgccatcgcgccgatggtagttggtgacaatctgccgaagaccattgccgatttcgccggcttctccgcaggcgttctaaccatcatggtcggcgcggccgaaaagaacatcaccgccatcgatacgtccgccgcgacttccatggacaatgtggcgtcgatcatccagaccgaaatccgcaagaacaccgacccgcagctggcccaggctaccgtgacctggaatcagaacaccaaccagttcaccttggtcggcgccaccatcggtaccggcgtcctggccgtggcgaaatctgccgacccccaggacatgtccaccgccctcggctggtccacctccaacgtcgtcaacgtcgccggccaggctgccgatcttcccgacgcggccgttgccaagagcaccaatgtcagcaacaacttcggttcgttcctgttcgccggtgcgccgctcgacaatgaccagatcaaggccgtgtcggcctggaacgctgctcagaacaaccagttcatctacacggtcgccacttccctggcgaacctcggcactcttttcgacttggtgaagggcaacgccgggaccggcctgcatgtgctgtcggcgactgccgccaacgacttcgtggagcagtgccccagcgagatttttgccgccaccaactacgatgagccgggcgcttcgcaaaactacatgtactaccaattccctggccgcaacatcaccgtttccgacgataccgttgcgaacaccgtcgacaagagccggggcaactacatcggcgtcacccaggccaatggccagcagctcgctttctaccagcgcggcattctgtgcggcggtccgaccgatgcggtggacatgaacgtctatgccaacgaaatctggctgaagtcggctatcgctcaagcgcttctggacctgttcctgaacgtcaatgcggttccggcgagcagtactggtgaggcgatggtcctggcggtgctgcagccggttctggacaaggcgaccgccaacggcacgttcacctacggcaaggaaatcagcgccgtccagcagcagtacattacccaagtcaccggtgatcgccgtgcctggcgccaagtccaaaccctgggctactggatcaatatcaccttctccagctataccaacaacaacaccggcttgatcgagtggaaggccaactacacgctgatctattcgaagggcgatgccatccgcttcgtcgaagggtcggatgtgatgatctaatggtttgcggcggactcgatccgccgcaaccttccataaatggagtgaggagtaagcaatgatcaacatttctgcgttcggctcgatctgccagttcacggcaagcagaactttcccgaacggattcaccgtcaccgagttcgccgacgatgccgatcccatcgacagcccgccgttcaccgctgccgataccggcgtcggtctcaacggtgacatggtagtttggaaccgggcgaacatcctggaagtagtcgtcaacgtcattccgaataccgagggcgagcgcaacctggcagtcctgctggatgccaaccgcaccggaaaggacaagtcgggcgctcgtgatgtcgtcggcctggtcgtggcgatgccggacggcagcaaaatcacctgcaccaacggcaccccaatcgacggcgttctgatcaacgcggtggcaagcgtcggccgtctgaagaccaagccgtatcggttccgatttgaaaaagtgatcaaagccggtactagctgatgaagaaaattccgctgacagcagtccccaatcaagcgatctcatttaacgccggtagcagctattggaagattcgcctgtaccagaacatggacatgatgaatgccgatatcagccgcgacggcgtgatcgtttgccatggggtccgctgcttcggcgggattcctcttctccagtacagccgtcagtaccgacctgactatggcaatttcgtcttcgaccgcgacgccgattggacattgttcggcgacggcatcaacctgttctatctggacggcgccgaattcgccgagtatcaggcgcttgccacgaggaaagaatgagcacatcaacgatcagaaccgggacgaacaacgatatccttttggacgacaatggaaacatggttatcctcagggatgtcgaagcgtgcgcccaggacgttcgggcggcgatgctcatgcgcaccggcgaaaacattttcgatgtgaactccggtgtgggatatttcgaatacatcttctcgccgcagaaaagctatgatgacgctcgcaaatccatcgcggatgcaattttgtcctcgccggatgtgaccggcatcgagcagctggacatcgacatcaccggggaagtcttcggcgtcgatgctaaagtcatcaccatccacgggcctgttaccacaggagtttgaaatgagcacaatccgcatccaatacgccaacggcacccagctgttcctggacggcaaaaatccgccgctcctggaccctctaccctcgttcaacccgtctgtagaagatctggaaggcctggaccgcgaaaagaacaccggcaagggcgactcctcgccggccggtcttcccgttcccccggtaaacgtcgattccaatgtcgacaacggcggaaccatcccggctccggtatcgaccgacgctcctgcggccgaatcggccccggaaggcgcccaggaagctcctgcagcgggacaaggcgacgagaaaggcgccgaggaagccccgactaccgccccagtagaaaaggccgaggaaacggcctcgccggccgctgaagaggaagccccggctcccgccaaggccacctctcgcaaaaccaccagcaagtaaggactcgacatgatcaacgtcagcggcttcggcacaggaattgtaatagtttccgcctcatcgttcccgatggggttttccttgtcgaagttcgctgatgatgagagtccgatatcctccaaagagctggagccgttcggatatgagatgctttatgacggcggcctattcgcctttgacaaggctgctcctctggaagtatctgtatccgtcatcgcagggagcgaggatgatattaaccttcgcatccttctcaattccaaaaagggatcattccgatttcttccgggaatcatcccggatatgacgactctcgtggccactcttcctgatggcggccgcaccgttctgtccaatgggactatcatcaagggtccggccatcgacaccatacagaacaccggacgacgcaaaggcaacacgtacacttttgttttcggtagctatcttggcgcccagactgcgcgtcaagccatttctaacgttatccaatcggtactggaggtggtctgatgttagggattttcaccagcctcctaagttcgcgatctttttcgattgtggaccaaaacacaaaccagctagttgctgcggatttgaggataagccgggtcaacacccggttttcttctgtagggcaacgccacatgctggaagatggcaagaccaagatggattccagaacgatccaccctatggaaatcatcgtcgaagtattttgcccttcaattgatgtcgtcgatcagatcaatcaattgctcctggatcgcgacactctgtacaaagtcatcactcgcggcatggtattcgaacggatgatgtgtaccagcgaagcgctcaatcagactccggatatgatatcggcgactcctgcgcggctgacattctcccaagttctcgtccagaatcccaagcctataatgttcagaaatgcaggggactcttctatgatcgaccgagggctggccctagctgaagacgtggttggctcggccggcgatctgttcgactacgcagtaaacggcgtccagaacgccgcagacttgttctgaggtgccaattgaactctttcctcaagtctattctcaacacgcctactctcaccatacgtgatgatgttaccaaacttcctgtctggaagagtcttcaagtcaagaaagtggaaatttactcgccggcttccgtagtgtcgaaacctctggcgacgaaagaccagacggaagctcaagtgtacaccgaagctctggacattgatgtgaagaatggaaagatcatccaaccggtgcgactccgcatcaatgctatctgtccggacctgtccaccgttgaaagtatcatgaacgctttcaatgataacacctcgactttcgctatcacttctaagtcgatattggccgataaaatggccatcatgacgctcgatgtagatcagtcgccagacatgttgaacgcggctgagatcaatatggaattcgagcaggttgagcctccagtattgaatgaattcgatcctgcgttccctcaagatagtccgacttatggggtacagattcaatctctttctgatgctaatttgctggatttgggcgccatcggcgattcgatatcttcggccgcaaaatcgctatataatcgcgtgaccagctacttctgaggatgtatcatgcttgaaatcaatcttcccgatggccgtcaaactcgcgtacaaatcgaggcgtggtcggcattggatggctgggaactccagcgccgtttcgtcgaattcgctgtcagccaagattccgacttccgccgctctttcaccatggaaatcctgggctatgcgaaagtgctgcttggcgacgatgacaccggcattccgctgaccaccgcggcagtcatcaacaaccacctcggccactggaagaacgtggaactggttttcaactctgttctcaagcacaatggcatcgacccggccacgcacgccgaccggccggactattgggaacaagtcggatcgcagatggccatcgcatttctggccgaggcgtccaagctcattggtccagcaatgaagatcgccgaaggactcgccaacaagccggagtgattcatgtctagtgatttggatgaattcatacttcggtatgaggccgatactgccagagccgagcgcaatctagagcacctccagaaccagatcaggcgcgtaaacagcgcatcgacgagtggccttcaggatttgcgccacttcgcagacggcgcggccaccgaactcggccgagtcgttcctcagattgattctgtgacgagcgcaattcgcggaatgaacgcgcaactggcaataggcgcaactggcgtggccctggtcgcggccggcgtcaaggcgttcatgaacaccagggaccagtacaatcagcagcgcatccaggcgatggacatcggcatcgccccggcacgcttggaagagtaccagagaaaattcgttcgccagtccggtggaaccatcagccgcgagcagggcgcggagatgaccaaaaatctggcagacactttccggcgtgcttatcgcgatatcgggcgagtcggcccggaagcgcgaattctgcgtatggcaggcgtcgatgtcgggagcttccaaaagggcatgcggccgctcaacgacatcattactgatctggccacgaaaatggccaagttgaagccggacgaaatttctgcctacgctgatgcccttggcgtctcgcgagactacctgagcaccctggcgaagatcggcccggccatgggaaaagtcactgagatgacgactgcggaactccagtccagggtccagggcgagtccaacatccagaaattcaacgatgccctggcgaatctcaaccagacgttcactaccctggaaaaccgagtcggcgaaaagctcgcgcctgcgttcaccaagctgatcgaaatcatcgacaagatagtccaggctattcccaatgaagtggaaagcttcgcgaaggacaccaaatcccgttgggaagatggagtgctcgggaaggcgaccgttggcagtgatatcctatccctcctcagccccggcgccctgctcggtcgcctggcagcgtgggggactcgtcgcggcatggaagaatcagggctcatcgacaaggacaaggttcccggcgctcaaaccagcgaagacctggccaagaaacaagaagaccaggacaaggctactaagtccatgaaagagctagagaagctggctgaccagaccacgaagtctaccaatgattttgcggtggcgatcaacatgttcagtggcgcggtatcgtcgttcgcgaatgccgttgacgagcgccaagcttgggcagcctgggcgggggaaattggtcgggcggtcggcatgggaagcaccgcgccgacttcgcgggccaccggcgtctatccgcacgcgatctatgatcagtcgaagagtggcgcggccggacaagtcttcggcgagccaatcggcgcccagtctcttcgcaatcgcatgttctcgccgcagcgcaaggccgagccggtcaccgttccatcgtacatcaacgacatcatcaaagatgcgtcgaagatgtacaacattcctgagctggacatcaagaaactcatatacaccgaaagccgattcaacgccagggctaccagcgaagccggagcgaaaggcctcatgcagctgatgccggaaatcgccaaggcgtatggtataactgacgtatatgaccctcgccagaacatcctcggcggaacgcgcctattgcgggaaaacctggatcgagccaatggcgacatgcggttggccttgacctactatcacggcggcctcgatccgaagaactggggaccaaggactcgcgcatatccgggtttggtgatgagcgctccaatcgagctgatggaagaggctcagcgcaagcagaaggctgcggccatgaccgtcgccaacgagacgttcgccccggaaggcggcgacatggacattcgtccctatgatggcgggcgactggaaaccccagaccagggcaagaaggaagatgagcgccgcgaagcccgtcgatatgacgacagggttgtgcgaccggaaattcgcatcatcgaccgcatgccagaccgcagcgacggcgaaatcctcaagatgtctaggcgtcaagaggccgaccgggcagattctggattccggaagttcccgaatcaagttcgcggcgagaccaagcagaacatccaggctcaactcactgcaggagccatcgcgcaagtgatcggcgttaaccccaaccagatcatgcgccgcgaaatcagccgttctgacttgctgttcggatacaaccaagccatcctgggcaagcaacaggagatcaaggccgccgcgaccgaagccaacaacgtattcctgtctccagccaagcttgccgaagccacggccaaggtgaacgccgcatcgcgagaaatggatattctcaggacgtacggcgagcaacttctgaagagcgctccagagcgcggccaggagctgaccatcggtcgaatcgatatgttggtaaacgttaccggcgcgaattctccggaagaggctcgcgagatattcagtaagcagactgcagaccagctgactacggcaatccaggacgctcaaaacgattccgcaactaagatactctactgatgaaaaagagaattctgcgagtaacattcaacatgccttatggacccgaagtcatccgcgaagatctggatgttcgggtccggattatgaaggctgcgttgcggattcagaaccgggcgacgatggaaattttcggcctcaccactcagctgcgcgagtctcttctgtcgcagttcaccgcgtggaagcaccggcaacgtcaagtgggcagggaagatgaattgatgatcaaggtgtcggtggaagccggctactctgaccaggggcgcgagcaagtttccagagtctttgtcggcgaagtcgccattgtcgatatcatttctccgccaccggacattggaatccgcatccagtgctataccaggcaaatcgacaggacgaagaccattcggaatatgccgccagccaacacgacgtttgtcaagttcgtcgagtggggcgcgaacgaaatgggattgaacttcatttgcgataccagttacaacgatcaagttctgaagaatccgggccggtctatcactgtcgcgtcggcaatcctggcgtcgattcaggatatgtacatgccggacgtggccgcgttcgtcgatgatgacattttgatcgtgaaggaccgcgacaaagtcattcgaccggatgaggtgaccaacgtcaactcgttcgttggaattccatcttggtctgaatggggcgttgaattccagtgtctgtttgagccatcgattcgcgtggctggaggcgtggcggtcgaatcgctcatgaacccaagcgtcaatggcaactatgtaatcactgctctggaatacgatttggccagtcgggatcggccgttctatatcaaagtcatggggagcccagcagcataatggccagggaaatcaaaccgttcaacatgttcggcgttcactatacttcgcggcaattctctgctgtcgatgggctcagcatgatgtcggaaattcagagtgtgccgccagaagaactgctcaagggaaccagtgtattggcgcatccggaagaccatccggaaggcatctggcttccattgactgctgcgaacatcaatctttatgtcgttgatcgagcgaaagtaatagctcccgtacaagttcttgcacttctgtccgaagtggtaatcgactggaactttggttttctcaaagactggaccggagtcaagattccatccagatttgtcgaagatatcaaaagcgtgaagacggcacattcaccttctgtagttgcgagcttggtcgcgaacggctcagcctctatgcgcgagttggaagagtattattcgactcaagatgcgtttaagatgatagacatcatgacggcgaagagcgtgaacgaggccttggcgtccgaagcatcgcacaacagaatcaaaaagggataattcctaaccgggcctgggaaggctatactagacctgccaaatcagaggctttcccatgtccaatatttctctaacatccgcaaaagctcccgacaggacgcgactgatcgccgctcttgacgctcggtcgcggcgggatgctctagatttcgaagtgatgataccggctcaggttgttcaatatgaccgggccgagaacatcgcgacgattcaacctctcatcacctgggttgacacggaacacaacgccgtccaaaggcatcagctggttgatattcctgtaatttccatgggggctggcggcttccacataagtttcccgattcagcaaggtgacataggctggatttatgcggccgaccgcgacacgtctcagttcctggagtcgttgtcaatgtcgaagccgaacaccggccgcatccataagttcgagcatggcctgttcatcccggacgtattccgtcgatacaccatcaattccgaagattcggccgctatggtcatacaatcgacttccggagcgaccagaatttcgattcgcggcgataacatcaagataactgcgccgtcgaacgttactgtggatactccgcaggcgaacttcaccggcaatgtgactatcgctaacaccctggtcgtaaacggcatcaacgtgaacaaccacggccacctcgaaaacaacccgcctgatgcccggacgaaaggcggcatgattgcttaaggagattttcatggcaagttttgatttttctgatttaacagcgggggggggttgtaatggctaactacaactacatcgtcgatactggtgtgatagtcgcagataccgccgacgttctgagcgacgttgaggccgagttccgcgccgccctcggtgccaatatcaacttggccgcgagcactccgcagggatcgcttgtcgcggccgaggccattgcccgttccagcgtcatgcggaatgaagcgcgaattgccaataccataaacccgaacgtttcattcggaacgttcctggacgcgatctgtgccttgatggggatcgagcgtggttctgacctgtcaaccttcggctatggagttcaagtcaccggccgcagccaaacccgcatttccacagggtctagggtccagactccggccggcgcgatcttcacagtgctgagcgatgtcacgatccctgctggtggtgtcgcgaccatcgatatcaaatcgcaggagtatggcaacattcctctgccggtcgggaatctcatcatcatcgacggcacaattggctggtccggagcgaaagtcatcgcctccactcgcgtcgatccgggcagccgccaaatgagcgatgcagaactgaagaatgcccgcgttaatcgattggccatccaaggccgcaactcgaccatggccatcaaggcgtatgtgagcgccgttccgaacgtcacgtcggtgaacgtaatcgagaacaacaccggcgccgttcaagtggtgaatggagtatcgtttacccttccgtatgctgtttgggtctgcgtcgccggaaacccggataaacaagcagtcgccgatgcgttgtgggccgcccataacggcggaactccatgggactatggtgcgacgaacaacggcgtcccggtggacggtccgaatggcgttcctgtgcgcgatccggcgtccggtcgaaagtatgtcgtgaagtggaccactccaattatgtacgatggatatgttaacgtaacagtccagcaaggttcctcctctgtagctccggaagccattcagaacgcagtggtcaattacgcccaggggaaagtggaaggggaagaggggctggtggtgggcgcgagcctgtcggcattcgaagtcgccggcgccatcgctcgcgaaattcccggcatctacatcaaactctgccaggtcgcgtgcgtcgcggctggctcgccggctccggcgccgggcgatttcacttcggaatacgtcatgagcgcattcggccaggctaccatttccgttggtaacgttcgggtgactttcgtatgactctgcctgcgtacaattcggacatccaacaagctctgaaatggctccataaccaggcgcctggaatcaccggcctgatccagagaaaggcgcaatggtatgacagattcagccgccaattctgggccaactgggagcgcgacgttttccacttgaaaactgccaacccgttcggccttatggtttggtgcatcatcctcggcacgccttcgaaagggttcggcctttatccaaaaaacagttcttgggcattcggtcggctacgccagaacttcatctatagcggtacacaagttccgccaccggcagacgcatcgcctggcggcaacttctacggtggcggcaatgccgaaattctcaacttggacgaaatcaggaaagtgcttcagctaagatatgtagcgctgatttctaacggctcgattgcatatatcaatcgcatgcttcgttacatattcaatgatgatgagccatgggacgaggcgaccggtctgtacttctatctcatggactcaaccggcgagaatggccctgtggagaacttggcgatatatcggaaagattgggaaggtatggtgctgttgtccagttcgcccagaacgaaccacgtgctgacatcgacccctgccagcgacgccgattggccgggagtcgatccggccgcgagcggtattccggtaacggtcgaaacggcgtccgctacggccccggacggctccgctacggtgtgcaagcttactaagccggccgggagtaccgcttacgtctccgcgccgatagatgggccgctggggtccggtagcactgtaacgttctcgttcttcgcgaaagccggctccacccgtttcattgcaattcagtcggctgccgatttccccagtcgagccgatgccgttttcgacctggattccgggaacgtaatcagcgatcagatgctggacagcagcgtggtaagcgcccgaatgattcgtctggaaaatggctggtggcgttgcgttctcacgaccaagaccgtcagctcttcgttccgcgctgcttacgtcgctccggcagaaaccaacttcagctggattgattcgaattccagcgcggcgattgacgtgcttatctggggcgctcagatcgaactgggtgatactccaactggatacttggaaactaccggggcgcccgtaaccatgaccgattatgttttgcagaacgcccagaccggaacagtcaagttcacacagccccttccgaccggagtagaagcgtattggactggagactggaaaggcgggactgcagcagaaccggccagattcgcagtcgggaatgggactcaggatacgtttactctgtcagaccccgcatacatcggcctacccaccagtggggcgttcaagctagaatacagggttggtccggcgcttaatctgtcgccgcaattgatcaacctcatgaatgaccgggcagttggtattatgccgacttgcgccggttgcgatgtcaaagtcattcaggagtaatgacgtgatcacacccgaactgatccccagtccgtttgccgctcagggcgataaagacccgattccacaaacctcctccactggcttcgcaaaccttcgcgacggctatacgccggactacgaaatcagcctggcgtcgaacaacccgcaggccaaagcggtcgagcggaaaattcaaaaccaactcttcttcatcgcgacccagaacgcacaggcgtggcagcgacaaatggcgccgccgtggtttcagggcatgcctggcggctacgaacagaatgcagaagtcgtgcgcgtcggaaatgacggcataatgcggcgttatcgttccatggtgaatgccaatgcgagcgaccctctcagcagcacgacttgggaagaacaacccgcatggtcggcgatgcgctccaacatcccgatgccggccggaggcccaggcctatcttctggcggagaagtcatcacgaccggccgcaacttcaacgacctgttaaatgggacgtgggagttcttctctgattcagtggttatcgcttctcagaatgcccccgtatatccggcgtccgctggtgccgctgctggcatgttggaggcgaaatcttggatatccgggtccaatacgttctgcgttcaacgctacactgaccgcgtcgggaacgtcgctgtgcgcgggcttaatgccggggcatggaccaactggatgtatgctgtaaacgttatggccctccaacaaggtcgagtgacctatggagtcgcggccggcccggcgaacgcttacacgttgacgctcgttccgcagctccaaggcggcctggtggatggcatgattcttcgggtcaagttcaacaccatgaacaccggcgcctccaccatcaacgtctccggactcggcgccaaagccatcgtcggcgcggccaacttccctctcaccggcggcgaacttggccaaggactcatcgctgagcttgtattcgacgcagcaggcgaccgctggagaatcctcgcaggcgcgccacgcatccaagttggcaacgccgatcaagattaccaggcccccagctggaaacaggtgaaggattacgtcgcgtcccaaaagctgactgaagtggactgggctgacgtcgtcaacaagccgaacgtcgctatccaagacactacgccgtggttcgccaatctggagttgtctgacgctcggcctttcatcgatttccacttcaacaacaaccgcgccaaagacttcgactatcgctttatctctgaagctgatgggtcgatggcgttctactctcgccaggggtcagctggtcctacccaggatatcctgttcagcaggtcgaatgttacattcctccagccgcgactggatgttgcgaaaaacctcgcgtacatcgcgaactctggtcccctttggcagaacaccactgccgatcagcccggttggaagttcacattcgcgcaaggcgtggacgcgaacaacaacgcggtgatcgcagtcaataccaccaatcctgacggctcctatcgctcacagataatgcgttgggactgggcgtccacgaatgtaatcttcaacaatcgtccgcttttcgccgggcaatatgttccttgggattctggtaacttcgacccttcaacaaagttgacagtcaatgccacgaaccagatcgccgggcccaccgggattcggaacaccaacggcaacaccggcaatatgaacacatggggttccggttccacgacggcatcctatggcaatgctgccatccagatcttcgggaaagggggcggtgagcctgccgcgatctattttgacaactcccagaccggatggtatctgggtatggacaaggatggacagctcaagcgggccggctggtcactcggcaacaactcttatgtcatcaccgatgaattgaacatcagaaaccacatcaacggtatggcagcaaggccggtttggggcggaaatgaattctgggggccgtggaacttcaatccgaacactaagcttacgttgggcgcattcaacgatagccaacacaccaggatggtaaacagcgccgcgaaggacgtagggatagccgccatgacaagttatggcgacgcggctatgtcgttcttcaactatgaggcttcgacgccgaccgggaatcgtgctgctgtaatttcgtttgttcgtaacggggcacgaggcgttctgttcggcctggacacggacaacaagctgaaatggggcggctattctctaggtgccgtcgcgttcgagattgccgactccaacaacctcatgagcctgtggtcatcccacgctgccgcgccgaactggaacgggcagaccatctggaggtcgggaaacttcaacccagacaccaaggcgactttggcagctcgcaatacgacgtcatcccctacaatattcagttatggggcgtccggaatcgcatcaaccggacaggtcggtgcgttggttgtggaaaacaacagcgtcaccaataccgcagccgccatcacgttccattcgccgcagaaatatcaggtcaacttcggcctggatgcggacaacgtggtaaagatcggtggcggcacaatgggcggcgtagcatatcccatcatccactccggcaactacaacaactacatcaaccaggcgctggttcaggtaggtcttggcggcgtcggttcctacgcgatccttgccgtatttgacacctccgcgccggcagcgtccattgcccccggaacgatcatggacagttccaagctgttctattcgtcctgcgattcgacctatcgcagcagcgccagtccgacgggcacctggcgctgcatggggtatgtgtataaccgagactccaccaacggcgactcggcatccctattccagcgggtaacgtaacatgaaatggacgcgaatcagaaaccctcgttggctggatgagacaaatattcacgccatggttactttcgaggggattggagaagttcctttcaccgccaatccgcacgacgtggaggcccacggaagggccattcacgctgcgatcctgtccggggcgcacggacctatcgccccagtagactcgacgcgggagcaggccttgcaggacgctatacgagcaagggaaaagcgggctatccttcgcgatacccgatggcccatagatcgtcacgacgagcagaggcggctgggtatcgaaaccacggacgggcctgggctgatagcagcccttgttcactggaggcagcagattcgcgattggaatagcggggatcggccgcgacttcccatggctctgaaagcaatattcaaaaatcaggagtattgatgaaaatcacgaaggatattctgatcatcggaaccgggtgcaccacggatcgggcgatcaagtggctggatgacgtccaggcggccatggacaagttccacatcgagtcgccgcgagccattgcggcctacctcgccaacatcggcgtcgagtccggtggcctggtaagtctggtggagaatctcaactacagcgctcaaggattggccaacacctggcctcgccggtacgcagtagacccgcgagtccgcccgtatgtcccgaacgctctggcgaaccgcctggcccgtaacccggtcgccatcgccaacaacgtgtacgcggatcgcatgggtaatggatgcgagcaggatggcgatggttggaagtatcgcgggcgcggcttgatccagctgaccggaaagtcgaactattccctgttcgccgaagactccggcctggacgctctggagcaaccggagctgctggagactccggccggcgcggcgatgtcttctgcctggttcttctggcgcaatcgctgtatccccatggcggagtccaacaacttctccctggtcgtgaaaaccatcaacggtgccgcgccgaacgatgcgaaccacggccagctccggatcaaccgctatatgaagaccatctccgcgatcaatcaaggctcctgatattcaaccccaaagaaaaggccgcttattcagcggcctttttgctttccggctttgcctcttcaaccatcttgacctcaaccggcgcggcggactcctcctgagtgatcgagtccacatagttccctagtgaactcagaacgccgattaacagcgctctcaccaccttgtccttgactgtctcgcctatgatcttggtcagaacggatattaactcttcccggagtctggggctgattcttggccgaaagcgcttgcgatgctctttgcgtttcatgtttagtcctctgtctgcggtcttctcctcaccccgataattgcttggggatgctttgtgttaatcggaagggtcgggcgctattataacccgtcgaaaatgctagcgcttaactgtttaacgatacgcaccgcgatattaaatcgccttctttctggccgaggaactctggcggccgggtccggtctaaggcctaatttgtcgacatcaaaacgagaaaacccggatcgcctgtagggtaaggcgtccgggtttatttcgatctagtgtccgctagaatcagtggcttccgccccatccgtccagccagcaatcgaagacggcgtgtctcggcttgtccttggcgccatgggagaagtgcttgaatcggatgacctggcccttgaggtattccctgtcattccagcggcgctgtttctcgtcgtgggtcaggctggaggccgacacgttgaaggtgacgccaggccacagacgttcgttgcggcagacgaacgcaccgaccattccggacggcgacaggttttctgcgtggctggagcgggccgtgtggccaagttcattgatgaaagcttcattgttgttgtgcatcaactcttccacgtcgatgatctcagcttcatcgtagtcgtatcgcttgactttcacacagtgcccttccttggcagtcgagcgaccgaacttgtacagtccatcagcgcgcttgcccatggaaccttcgaatcccagcattgtgtggcggcgctcgacttcgctgaactgttcgatggaagtcaccagttcctgctcgaccaggtgaatcctctcatagccgaggcagtgacgaaggaagttcacgcgctcggccgccctggctaggcgatcttcggtcggtgcgcgaggatcggtgaaatcatcgaacacatggaaagaccagtccggctcaccgctgtggcggcgaagatcgccggacgacttctggaaaactttcgggtcgctgatgtcgccgcagaccagctcgccgtccaggccgttgaacagcttatcgctgaggtattcgtagatcgattgattgttctgccgcttgagttgacgggtcagcgcctcgccttcgaatacgaagcagcgaaatccatcgatcttcggtgagaaatacatcggcagttggccttccagcagcttcgggtcaaaattcgatgcgagcatgggtttcatacagttctccagaaaagaagcccggcgaaccgggctaaatggcggtaagccggctcagatggtttcgttggcgtggttcagttcggccatgatcgacgcatagcgctcgtccgactccttgatgaacacgccgtcgtacatgacgcctttgcgatccttgatggtgtcgtaggccgcagcgtagcaggcgagcatggtagtgtcgtgctcttccgtcacatcgaacagagtcatgacggccaagaccaggctcttgatggctaatccatgatttccgcgtgccagcgcgccggccagatgtccgaggtgctgcaaatcgtcgccgtaggtgggatgaacttcgacagtctcgctgaagacagatagatgatcgaacagattttcaccgagttgcgcggccatgatcgtggcaaccaccattacgtcgccgatgccgtctttcacctcgactggtttgttataaacccaggcttcgcaaacttctgcgaactcttcgaccaacttcaggaattgatccttggccgaagagcctttgatcaggttccggtcggaaccccatttaacaaccaggtcgtgaagttcgcgactcatgatttgttcgatattcattctttcgattccttttggatttgggattttactgcgttgattatggacgccgtgctctggcgcgatccatccttggtggtgccgaagtagaaggccattaccgacttcagctcggcgaaccaatagccgatgatggtgccgatggcgacagaggatgtcgggtccatcagagcctcgcggccgaatgtgaagattgcgatgatgatgagaatggagcctgtcagaagagcgaatgtaatcgccgggcgaacgaaatcgttctgctgcgccgcaagcctcctcgcagaatccctgtcggccgcctctgcggcgaactggctaagctcggcctggagctggttctgctcagactgaaggcgattttgttcggcttgaatcgcaagctcctggagacgaacgcgctcggcgctctggagttcggcgagacgcgctagagcttccggattcgcgtctagagcgctagcgaccgaggctgggtcggccttcgaccccagcgccgtcgcgacgatagcgcccacggcggcgcctgcaggcccacccaggagcgaacccagagccggggcagccgcgccgatcttactacctatgtctttccagtccatttcgactcctcaaaagaaaggcgccattacagcgcctttctccggccggtgatttagaactcttcggcttcggtcgcatcgccgacgccaccggcgtcactgcgaggctgttcctgcttgctgtagtccaccttcacctcgccgccgacgaacgacttgtacaggtcggccgcagccttgaagtgatccgggttcttcaccaggccttccagctcgaactggacgccggaccagctacccttgtcgttcgacatgcctacggtggtcatgcggaccaggttggcgaaagtcggcggggtgcgcaggccctgcggggtctgaacctttttctgggacagcgcggtcatgagcttcttcgaggccttgatctgcgaagacgacagggagatcagagcctggccgaaatcgccggtgtccggatcgatgacgatgacgtaatgaccacgggtgtcggcgaagtagtcagacttcttgtcgctgaccgaaccgtcttcgttcggcgcgtacaggcgtccttcgacttccttcaccttggtcgggtctttcatcatttccttgaagtcttcgacgctgatggcgcccttgaaaccgccctcggcctcgcgaccggcccagcggatgaactcgcggcggtacgcggccggaatgatcagcaggccggtcttgccgtcgtaaatcttgccggtgacggtgttcaggaacatgccggccttcgcgccttcgatgtacttcgggtcatcttcatcgacctggggagacatcttctgcagaacctggatgaaggggatggcataggactcggcatcggcgccttcgaagcctgcgccgtcatacgatcccaaatccatgaagtcgggaacttcggtagttgcgacggcgccgccaccggtggcaactgctacggccttggtttcttcggttgcttcggaagtttcggttttcttaccagccatgttaggctccttgtttgtcgaatttcagttatcgctaactgtgggtttataataacggaagttgcaactaagtaaagcaaattacatattaagatttgctctttttcaccttcggtttcgtgattttggcctctttgtattcgtgcacgccgatgaaatctggcagctcttcgcccttctccaaatactcgcgaccgaacgcctggagggtctggtagtggacatcgcggttgatggtggcgtcatagccggcctcaatgatagcctcggccgccttcttcgcatcttccatttcgccgcgaccgaattcggccagaaccttggtcttgatgatgccgtcgttgtcggtttcttccagccacttccagaacttcgatttgttctcttctttgacggaaatgatggccttcggctcgactttgaccgtgcgaccgtcagccagagtagtggtcttttgaccaagctcctccagcagctccggaatggtgttgcgcttgagggttttcagctcctcttccttttcggccagcgccttttgaagatcgaggatttcgacgtccagctgcgaagccttgtccaccaggttcagcagtcgatggccgatgtcggtggcttcaaccgccatttcatccatgacgccaaaatagtcgatttcgcccggcgcgttctctttcaagtattccgggatttcaagctcttgctctttcatgtccgcctccaacttagtgatgttcccttacttgaaccaagtattgagtagatattatgccgcatcttccttgatacggctactgatttacatattaaatttcgtcgcgagtgctaacgtcagcctcaaacacgccatcaacgacataacttgccaggttgcgtttccactccaagctgacctggattttctcgtcgatggaatccagacagatcaggtcgaagtacagaaccgagttgacggtgccgattcgatgatttcggtcttcggactgcatccgcagctcgttgtcttcgtcggtcgtgtagtagatggccacgtctgcggccgtgagcgtgatcccgatccctgctgcggccgggttgcccaggaacacctggacgcgcttggcctggaaatcgtcgatcaatttttcccgctcggcctctttggtctcgccgtagtaggtgccaaacgaaatcccttgggcctccaaatacgccttgatctggtcgatttcctgaatgcgcatggcccagacgatgatggaacgctccgggtcttcctccagcagaccctccagaagatcagtaaacacggcgaatcgcgggttgtcttcgggcggcaggatcaccggctcaccatagacgttgatatagccggacgcaacttgcttgagcttcgaacgcgctgccgcagcatcgaaagatacatccagcatgaaatcttcgttctggagaacgaagtgatagtcttcttccacgcgctgataaacctttcgttgctccggcgacatttcgaagtatatgcgcttgtacaccttgtccggcaggaatggcaatgcttccttcttcgtgacccggaagctgtgcggctcgatcagggatcgcagcttgtccaggttccggaataccgggcgcccataatcgtctttttcgacgagttgcggcggcatggtttgcttcccttccagcttgcgcatgatagcgatcattcgaggatcgtcactgggcaccaagacggaaaattcggccacaaacgcccgataggatttagtccccagaattccattccgcaagaattggaactgcatgaacaaatcggtcggtgcccgcgtcagaggagttccggaaaggatgcgacgggccacggccttctcgcccagctttacgatctttttcgcacgcttggcttgtgggtttttgatcctcgttgactcgtccacaattgcgcaaactttgaatgtatcaaggaatcgctcgacctcatcatagccagcctggtggttgattgcgtcaacgttgatggcgaagacgcgaagaactttttcatctgcgaacgtctcggaatacagacggtccaagcgcgccctggcctttttggaagtcggtcggccgcgccaatccacgctcaaagtcttgatcgcgacgtgggtgggaatctcgcgcagaatccagttggtgtggacgcctttgggggcgacgatgagcagcgcgtccacgcgcccctgtaggaagaggcgaacggcatcggccaaagtcgtccaagtcttcccggtgccctgctccatcaggtatgcgaagttccgtttgttcagggacgctgccagggcattgaattggtgctgcatggcctcggtcttcatgcccttgacgggatatgttttggctttcatttgttctccaaatcggcgaggaactgaacaatgttatccagtccttctgcatagctcgcaacttccaccaagtcgcggctgttaagctcgaacaaatcgaacataggattcagcagcagccaatcggttccgatcttggccaggacgaagccccggccaccccagccgatccgctcccgaagaaaagggatttgcccaggttcgaaacatctggccattgggcaggtggaagcgcgtttcggccactcctccaaagccttgaactcgacccagaactggacacctcgacgattcaggcagatcgaatcggacatgccagaccgccgcgtctccagaaagtcgatcaggattcggccgagcgagcgctgcttaaacgcattcgccgctttcgtttcgcgatcattcatcaccttcgccctctttggaaactttctctgcttgcgatgccaactttgacttctcgcgctcggtcaatatccgcttgacggccttcacgatgaacatgtcgatgccgctgagcctccatcctttgatcaggaaccaagcgccggtcggcgtcccttcagcaatctgctttccgtattgcagatatttttcaggccgaattctgaaacgtatcggctgatcaaccgagtcatcaacgcacatgatgtcgagaaactgcgactggcccttgtacaccgggtttttcccttgatcggccctcttcttctggcgaatcggttcgttctcatcggacagaactttcttcaccatcttgacgatgactaggccatcgtctccatcgcggatatcccgaatgttctgaatggggtttccggaagtcactccaaccagctccggattgtcataagcatgaccccagagcgtgtgagcttcgttcaagtctgcgaattgcacttcagaattcgacaaactagctgcgactttctcccaatcctgaagcgtcttcaggtgggtgcctgccagctctttatattgagccttcagctccttaagatcggccttcaactccttcagatcggccttcaacagtttctccagttctttgtcttggctgattttcgccgaaagaatctgggcttccagagctgctacatcagcagccttgtcctcaacatcctgtgccgatatcgggcaattggccagggcgatcctcgcggccttgacttcctcgcgaagacgcaggaaccgctcggccttcgccgggccgaagcctttggcgttcatgatgccgccgatcaggcgcccgtccgccaccacccagttgagttcggaatgctccgggtccagggccgtatattctacgccttctttggccaattcgcgaaggatggacacagtttgctggtcgtctttcgccgcccgaagacacgcggccgcgtattccaggcgatgatatcgcttcatgtagcaggtccagtacgtcaccacagcgtagctgaccgagtgggagcggttgaatccccaggcgccgaacgttaccatttcctgccaaacacggtgagcatcgtccggggcgacgcctatggtcttggcgccctcgatgaacaattcccggcgcttgttgaaaaattcttcgccctttcgcgcagacatggctttccgaatcgccgacgtttgttcccagtcgaactgcccaatgtccttcacaatggacatgatctgttcttggtacaggaaaactccatatgttccagacagatactgctcgacctgcgggatggtataggtcacaggctcgcgaccggccacgcgctcgatgtatttggtggccatgcccgaagacaacgggcctggacgggcgagcgccgttatgtggtcgatgttttcgaacgcggtgatattgatcgcattggcgaccgagcggacggcctggccttcgaactggaagatgccggacatcttgtcttcgttgagaatgtccagaaccgccttgtcgttcaacggcaagtcgtacagctcttgcgccgtcacgcaattagcatcttggatgacgcccagagttcgaagcccgagcgcatcgatcttgagaagattcagatattctgaatcgggcttgtcgagctgcgcgacaccttcagaagttaccgtgcagaagtcgatcacttcatcgttgcagaccaggatgcctgccgcgtggacgccggagtgggatgggtggatttcgaggtcgcccatgcaggcggacgcaatctcatacttttcacggaagtcgcggccgggctgagttttttcgaaagtatcctccaatccttttccatatcgttcgtccgccgatgtatattcgatgatcgagtttttgatgttgtcggtgtcgtggaatggaatgccgaagcgttttccgacgtgagcgataaccgacgcggccttgagtgtgttgatgttcccaagctttaccacgttccaagtgccgtatttctgctggagatattcgaacactaaatagcgatgggtatcggcaaagtcgatatctatatcgggaagatcggaacgggaaatgtcgataaagcgctggaagagaaggcgatgcgggagcgggtcaacctcggtaatgcccaggaggtagcagaccaaagagccggctgaagagccgcgagccgggccgaccagcatatgcttcttggcgaacgcaaccagatcggcgaccaccagaaagtagctgtcgaagtctttcagctgaatctgcttgatctcttcttggaatcgatcctcatactcctgggtccattccttgatgtggccgcgactgagacggtaggcttgcccctcgcgagccagcgcgacgatatccccatccaggtggatcataggcgccttcgccagtttcacatccgccaattgttcgactaccgcacgagtattggcggcggcggcatcgaactcttcgcgagtcatgatgtggcgtaaacggctccacaactcctcttcggtggcgatgtggcgaaggccgaccgattcccgcaccttccaggccgacgcgaaatcagcatggtcgatggacggcatgtcgttgtaagaggtaattaccaccggctttccgaatgccctggccgtctccatagcgccgtgcgcggcgaccatcgacgcgggattgatgtcaatgtagtcgattccggccagatccagatgggcataggcctcgccagcgaatttgatgacgccgtcagcttcctggaattcttgcggagtcaatccttgattctggaccgacttggaagtcaagcggtagaacttctttgtgtccttggcgagcacccaggctttgagcttcagctctttctcgccatcgtcggcgcatttgatcgggatttccatgccgaatccgcgaggcagttctgccttggtagcggcttgttcccaacggacgtggccccatgttccatcatcgacgatggcgacgaatggggattcgatctctttggcgcgctcgatgatctccgggaatcgaccatatgcggcgccgtaggagtaaccagagcgaacgcggagctgagggaaagacatcatgcggcctccattgcttgatacgcccgatacactcccatgcgcttgcagacttcgtggagcagccgcacgtcgtcgagcgcccggtgtttctgtacatatgggccgcagtagtgctcataaagatgttgcagccgcatgcggtggccgaacaacggcgccgactcttccacagtacagatatcgagcgatgggaaattgacttcgtccaggccgaacttgccgcgagccagatcgcaggccagcatgaacttatcgaatggcaggttgtgggcaatattcgcgtcggctctggaaaagaagtcgcgaactttctggcgctgatcgaggaaagatgggtgcttgatcaggtcttcgttcttcaacccggtgatcttggtgatgatttcctcgataacgattccaggattgcagatgaactctacttcatccaaaatcttttcgccatcagttatcacgccggcgaattcgattattctcggctgctttctcagactcaccctttggtggaacgggagtcctgtggtctcagtatcccatacagcgaatatcatgtttgttccctcttatgtcgaaaggccggctgctttcgcgaccggcctgaggagtataccgcgacggctgaagatttacgccttctgtccgtctttcggcgtgatgcggccggagcgcatggtggcgtgaacaaacgccgaatagttgatcgagtccaaggccgaatcggcatccttgaacccgctattcgccaggcgagtgagtttacccaccatgtgcatcacgaacagggcgagtcgatgatcatcggcggtcttcgccaccaggccgttcgggaagaggatttccatgatctttccgtacatcagatcattgcgaccataggtgctctggcgggcgcggaagacttctgctgcggcgtacagattgttgagaacatcttccgcgaaatcatcgggatgggaatcatcttcgcccggccagacggattccatggcgaacggcgcggcgtcttcggtcgggtctttgggctgagccgtttcagcgagcggagacggggctttcgcaaacgcctcgtcgagggtaggggcggagttcggggcggccgggaacggctcgcctgccatgtcgttgggcgcgctatcggggtcgctatcggccgcgacggcgaagaacggcgcatcgcaaccttccaggttcaggatgtaggagtcgatccccaggctattgtaggcatcgatgatgtcctggcgatcatcgaacgccgcgacgatcttggtgacgccttcgattttcttcaggatgtcgagcgcgactgcccgcttgaactgaggcgccggctcggtgttaccatacggccgcatgatgagttcatactcgcgatgttcggcgatgccgagttcgcggtggagcttggccctggtctggaaaaagtggttgtcggttcggccggtgacgaagaaaatcatgaggtcggcgtcgatggcattcctgatgcgacctacagcgtgcgggttgagagtgtccttgtcgagacgagaatgatactcgtcccattgccgttccaaggcgaagctcttgcggtggctatcgtcgaatacgcagccgtccagatcgaagatgatgatgccattcttgggtttgcgttccatattcagatttccttgatggttgctttctgggtgacggttttatcgatgaacgtcccatcagaagtgaggcggaaaacttcgccattctggctgaaatcgaacgattgcacgttcatcgtgatgcgaatggattcgctgccgttggtcacttcgacttgtgcgatgtcgccaactttctcgacaatgatcttcatgttacatggacttcccattaacggccacagggctggcctcttgtttttccgatccccagaaatcgcggcgcagttcttcctgctcggccgagcgatccatccatggacgatagaacttgcactgatagatcggtttcaccggcaactcaaccacaggaatctggccgggtttcgtctccagagcggacatgaagcggtcataggattgctcatgaatctcatcttcattcagaaccttcgatccatagcgcgggaaggcacaggagccagtagcgacacagtgcggctggagcagactatcgaacatcggatagacttccagaaccagtcggcgcatttcgcggaaggcttcctgatactccccttgcgtacgaacacacaggcgaactttcgccatgtcgctcagagtgcgcaaattgaacttggccgcgatcttcgtttccatgttggaaggaatgatggcacgagcatcctggagcgatgcgccggcctccaagagcttctggtaactggtctgcgcgtcggcgatggcatcgtgccacaggcggttcaactcttcgcgggcgtgataggtcgggtccggctcgccattggccgtagcctgctcatcgaaatcccagcggaatgcttccggctgaacaacggcgctaacctccagggcgcgactggtttcctgctggtaagcaccggtccgcgtccggacgagttggtgggtaaaattcttgcttacgccctcgatctggaaaatgaagtccacgaattcgaacggcgagcgaatggtgtccagcatgtacttccagtggtcgagcttttcggcttcggtcatggtcgccgggtcttggccgcgcatgcgggtggatttcgtccccaggaggagttcccaggcgttctgggtgtaactgatcagagaaatcttcatcagaaatcttccggaattggcgtgaaggtgaatttttctgtgagagcaagtgccaggccttgggcttgctccttacgaagtccatactgctccatctcttccttaagcagttcgcaggcctccagacgagactcatactcttcagcctcatgaactgacgagaagacggttccatcagaggttctgtatacgagttcaatagccatgatcgcctcagtagcagcggatgatttcggcgcggatatctcgacggtcgaggtagtgctcacgaatcttatcgcgggcgcgctcggcctcttctcgactgccgaacgacaggttgaacgaagtgaaaggcttatcgtccaggcgcccatcgccaatcaggtacaggatgcctaccagcacgaaagacggcgctgtctgtcgcgtttgcggcgggtcgatttgcatttctaggaaagacatgggaacctcttcaggatggtctggtgagtacatcaatagcgctcctgctgagcagctacggtttccggctcgtagatgagcatgtcaacgatttccgggcactggcctttcacccagtcgatggccgcgaccagtgtggtggaagcggagaaagagaaagtgcggtaagactcatggatgtacggcgaccccatcgaatcgcgctcggtcgtgcgagaaatgactgctttgatattaacgatccggcccatcttcggcctccactttagcgattatatctgacaggctcagcttctcgccattcaggaaataactggcgcgaaacttcctgtcaccctctggcccgacgatccgggccgttatggtgagactcccgccgccaagggcatcggtgtccctgaagaaagccagcagcgcccgcttgagcgctgcctcgcgaggatcgacggccattaacctaccacgttccagccgtgctgagcgcaccaaaccgcaccggcccctgcaggaaggctattcagaaggaatacaggggtcaggcggccatcctcggtcatgtggatgaagtagcgtgcactttcaccgagccattcggccttggcgatggcgcgttcaagattggccttggtggcgtaggtcttggtggtgtttttgtcggtggagaaggttacttcgcgggccattttgtcgattccttttggttgaagggtttcgcgtttcgatgagggaatactactctcacctgactcagaagtaaagcacttcgtgtcgattatttcacgaacatcttcttggccttctgataggacgaagaagtcatcaggcgctcgatgacatccatgtccgaaaccaggtcatccagaaggacgttgcgccaggtagcgaaccggccgagcgagaagatgccggcttcatgggtgaggttccagatcatggactcgcgctcgtcgcggccgagcggaacgattttgcctttggtctggatggtcggctcgccgtcctcgatgagatgccttttcctgatgccgaaggccgcgcaaacgtaatccatatcccagtcgctgtcccattcgatggtttcgattttaccatctaaagtctccactatccccttagtgatggattcgacgatcagagtatcaccggtgatggacgctcgaaacgttcccactttaggaccagggaaatacacggtctggaagacatcacaagggatggaaagcttgtatcgactcacgatgatggaggttccttcaccgaatgacgggtcgattcccaggtccagccctgccgcagccaggttggcgcggaatggcgcggtgctgatgacgttcacatggtcatcttgccggcgaagatactggaagaaagaggcgtcgaaaggacggctccaagtgatacgattcgcaagcttagccaccagctgctcatagtagtcggccggtgcgatccaacgcttttcagtcgccagattccagatggaccggtccgacaggccgcccgttactttcctggagtacatgttgcagtggtcgatgcgcggctgggaaatgaactcgccgtcgatgtagatagctttgtgtacagtgacttcgcggaacgggatgccggtgagttggccaatcactggcgagcggaatcgcagaagtgcgttgtggcgctccttattctccggcgtcgccgcgtcgatgatttgggcttgaggaaagcgatgcgcggcgatcagtccagcgagtccggcacctacgatgattactttctgatcaggaatcatgatatgttccttatgagtgtacaaaacttgagaggataaaaaagggacccattttcatgagtcccttgaagagctagacgattcaggctcagaggagcggcggcttactcctcctcaccttcggaaccatcggcgccctgatcttcaccgtcgtgctcctggccttcgtcatcggccttctcgtcatcgccctggccagcttcgtcttccttcgaagcgatggcaaccagatcgacccagcccatgatttccagcttgctcagatagctgcgaaccgaggtgccgtacagcaggtgggccaccttctcgccgaaggattcgatttcgaccggctcaccaacggtgcagtgctcgttgatgtaagcaaacaccttgccgcgagtcgagaaggcctgcggggttccatggccgtcgccggtcgggatgaagtgagtggcgcgggggcgacgcgagccgttggacttcaggtcttcgcggcgggcttcggccttcgcgcggcgctcttcctgctcttccttgcggcgctgcttctcggcttcgcgctctgccttcttctgctcggccaggcgcttgcgctcttcttcgcgtgcggctttctgggcttcctgcgcggccttcttctcttcggccttcttggcgcgctcggcttccttctcggccttcttctgctcgcgctcggcttccttggccttcgccttctcggcctgctcggcttccttcgccttggccttttcagcgcgctcggcttccttggcggcggccttttccttcgccttctcggcgcgctcggcttctttcttctcgcgctcggctttgcgcttctcttcgcgctcggctttcttctgctcggcttccttggccttggcttcggccttctcggcgcgctcgcgctctttacgttggcgctcagcggccttctcggccttgcgcagggcagcggcttgttccttggtcagctcttcgccttgggtctgttcgttctggtccttctgttccatgttcttactccgggaatgtttaaagggatggcttattggcctgtgaggggattatctctaaactaattgaagaagggaatacccttagcctgaactttcctaaatattttctttcgggaaagtccaaactctagggaacttatttatgttcgagaagttcctagcttttacgcaagaacagtaagtattcgattgcgcgagttatcccagtatacatcaactgactataagggatggacggcaagttttcttctaacatggcaacccgtttccattctgaaccctgcgacttgtggaacgtcatcgcccagccgaagtcgaatccgccaatagccttctgcgcctccagccgcacgtcttcctcggccgaaaagctcaaaggattgaacttcacccagcgctcatagttcgtgccgataatgcgaactttggcgaacaacatttcgtccggctcgtcatcatcctcttggccttcggggaccggcttgagttcgagcaggatggcttgctcgccgttcataatgccatattcgtgctggttcccggtgcaaaccagcttctcgccgatttccggttgtccacccttgtagccgaggatgcggcgcgccctggcgttcaaacggcggcgagtattgttgtaggcgcaaaggatcacgccatcatcgtccaagaacgtccgcatttcgtcgtccgacatgtcgaatccggcccgtaccagaatgtcgtcatactcgcggcagggtaggcgcttgccctggcggacgaacatcgacgcccgaacgatattgccggcgttgcgctcgatttcggtcatgatggtgtcacagctgttctcatggaaaatctggacgccgcgcacaggaggaacttggccaaagtcgccaatctccagaaccggaattcggtgcgacagcaagcgctcttcatcccactcgccgatcatggacgactcgtcgagcacgaccaacttcggcttctcgtcgagcgagtctttgttggcaaacatgatttcgccgtcttcatcttcgccaatcggccgatagatgaagctgtggagggtccgggcattggtgcaacccttctcgcgaagccgcgctgctgctttcccggttggcgcgacgaagaccgtccagtccatcgagcagcaaagttcggcgatgatcttcgcgatggaggtcttaccagttccggcgaaaccagcgagtcgatagacctggcggcggtgcgctcgatcacaccaaccgcgataccagtccacaacggaattgatcgcgtcgatctgctgactgtttggtcgaaagccgaatcgctcttcgatctgatcgacggtgaagttagatgctgacatatttgcgttctccaacgctaggtttaattgaatcgaggctcagtttaagcacgccgtccacagaccagccagtatcacgacgatacttgcggccttgcggatcgacatagaagttcttcgtgcgccgcagcagaacataatgccaagcagctccaagcgcgtggacccttcctttatacgggaaagccttcgcctgctctgcggcctctttggccccagggagccagcggacggtagaaaggaccaggaccgcacccttaatagcctgggaagcggcgcggccgtcctgtgggctatagcgatgtctatcgaagtctacccagtggtggttgccgcgccggagcttgaccgttcgggatcgcccctcgaacaccaccgtgccttcgtgagtaaaaatatgttccgccatcgaatgttcctttataacgtacagttatgctttacctctgcgcaggaagagtatactatcagctgactcgccaaagcgagcgaatttaatccaactttacttcggcaggaaagtggccgatactagcgccgccgcctgtactgccctccaaaacagaggatacattaaatgcaagaatgcaagatttcccgcgaccaactcccggtcggtaatccgaatcccaatgtcgacaagacccgcgacccgaacctgaagcccggtttcctgcgtcgcagccgcgagctggaaccggcgctggcagttcgcattcgtcgcgagctgatccacgccgaagcgtccgacttggccaaggccggatgggtcaattcacagtccagcctctatggatcgaaagccttcccgcgccattccgtcgttcgcgttaccggagttccggaagatggagctttcatcggcatgctgatcggcttcatcgagcatcgcgagcatggcgaatgggcggtcatggaagccggaacgaaagaaggcggcgcagtcatcatcccggtcaatcacatcacgcgagcgtcattcgccgaagccgaagagttcgccgaaaagtgggagcggaacttgggctggcgcctcctgcgacagctccgcgagtgcggcgccctggccgggactgaagacgagttcctgcggcggatcatcaatcgatacgttcgtgatcgcacgatcctcgatcaccacaaagtcggcgcggacaaaatctatactgatgcagtactcaaaagcatcggcgaaacatggccgaagattccttcggggaaattcgtcggccaccgagtcgcgcagctcctgatcggccacaagctaggtcgagcggggaccattctgaatgacctggtggacttcctggagaagttcgcggccgggcgcgataaaattctcaacatcgccatctgtaattgaggtgaatgaaatggttgacttggaaaagctgagtccaaagctgagtcctcggcagcatgccgttctactggagatgtacaggcatcctgagcatccagttcacagatcgccaacgaatttaactcttaaggctttgagacgaagggggcttgtcgagctatcctggaaggattccgtggctggatatatgttcggtcgccaaccttgctggaaaataactgatgccggcataaggcgaatcctgggagtgctggggaataatatggaaaaagaacaaagcgaagatcgcccaagcatccctgagtttgagaagaccgacgccaacaaactctatgatgctctggagacgatttcgctgctggagaagaagttggacgaatccgaaaagcgcgggagcgagctggccgcgagctattgtgacggcgtagtcggcgatgaatacggccatccttattgccgttataaagtggaacgcgacgccgccttggccgaagtagagcgcctgcgagaatcaaaaggcgatccctctggcagcttcgacaggtgtatgaagatgatgtacgagcgcgacgagaatgcaaaacgactcgacgccgccttggccagggtcgcggagctggaagggaagttgacggactgggtgcacgaagggttccggctcaacgaggcgctagcggtcgccaaggctcaacccagcgtgccggaaatatctggcatcggtcgcgatgccgaacatcccagagctgtagtgctgtatctgcgtaacgaacccagcgatgaagatatgcgagcaattcagaactttttgcgcgccatggccgcccccgctcagcacagcgtgccgaaagcatggctcgacgttcaggcagagcgccgccggcaggtcgaggcccaggcgctaaggcaggaagtcgcagcactgcgcgcaagggcggatgttgtgccggaggtattcgggcttgagcggtaccgcgtagaaaaaactgggaagggtttctggccatactgcgtgcgtgcgggggatggaacgcgtgaactgttcgtcggccacttgaagcagtgtcagcgggtagcgaccgaattggctacggcgtttgaagatgggaagtttatcgccgcgcccggcagctcggctcagcacagcgtgccggaggggtggaagctcgtaccgatggacccgacatcgcagatgacctatgtcggtcagtccctgcgttatgacgcggtaaacagcatcggcgagatttaccggcaaatgctcgccgtagctccctcacccatcgatccggccgcgcatcctcagccgtgccagcaaccacaggcccatcctgcccgctgcgggtgcgagcggtaagtgccaagtaaggaattcatgtaatggaacagaagaaaccttcaccagtagatggagtcatcatgaccagcctcgacgttctccggaaagcacagcccgaagcccaggacgagtatgccgtgtccatgttcgcaacggcgatccgccagaaaatgcagcgctcccgcgataaaggccgaggcggctggatcgactgcgacgaagatattctgatcaacggattcgccgaacatgcgctgaagggaaatgagaacaacctcttggacctggcgacgttcctgatgttcatgtgggtgcgcggcatcgacgatgcgaagattcccccggcgctcgaaaaggcgcggcagcacaagatcatggaagcatggagtcgggtccacgaagatggactaaactccgccagaaaggcgagtgctgcgcgacagttcgtggaagtgcctcgacgcaaggggcgcccggagcgacttgcatgaagcctcacgaaataagactggcacaggccgaagagttcctgcgcgaactcggccgagggattccggacgacgaacgggtgatggtcggctacgctgaagaggccacagtccaaaccgacgagaacggtcgcaagctcaacgccggctggtggcctgtgccctggaaggaagggaaatacatcaactcccgatccaacgcctacgcctgtatatcgtcgtccatcaagacgcccaacccgaagaccggccagatgcgatactggcgcggcgaagcctctttcggccacggcctagcgttgatggttgatgacatcggctccggcaaagggtcaaagggcgacttcgaccgcgacgagttccgcgagcgacttgagccgaccgcgattgtggagacttcgccgaacaactaccagttctggtatttcttcaaagagccgatgtcccacatgctccagttcaaggcgctgctctattcgttcgtggaccaggtgctaaagaaaggcggcgacaacaccgtcaaggacgtcagccgttacggccggatgcccttcggcttcaacaacaagcgcgggaaagacggcaagttcaaatatgccgacgaaaacggcaagcccgaactcgtgcgactgttcagcgccgactattccaagcgctactcgccagaagagatcgcccaggcattcggcgtccgcatcatcatgccacagatgaagaaggtggagataaaccgcgacgattgggtgtatgaccaagtatggctgaagtatgccgagcacatctgcacgaaatacaagatgggcgaagcggcaggcggccaggtccagcagaatatgtccggcaaataccgcatccgctgcccgtggggagacgagcacaccaacggcgatccattcggcgcctactttcgcggaccgatccctggagccgagcacgaatatgtgttcggctgcggccacgatacttgccgcaaagagcatcgccggacgtgggcggccttcacggatgaagtcgtgctaccctatatcgtcgaacaattggaaagaatcaaccgccgtcatatcggtgaggagtagacaatatgcaaaacgatcctggaatcctgattaccgccatcggcttgctgttcctcggccttatcatcttcttcgaaggcctaaagggatggaaaatacaagtcgcaaacttcctcgcgtcgcttctgtgcttcttcttcggcctttctgctttgacgttctggttcgtcgttgcgtttgacgtattttaatcgacgaacggtacagaaattttcggatggggacggaacttattagctatgccggtttaggtaggagataatagccgtccctttcgcctcaatgtgtagaggcaatgttgaatccgatcatgtaaagcagaaggcggcaaacctaacatgattatcgacgaagataatatttttgatgatggcgaatcagggtccagtgagtttgatctcacgcagatagaagatgctggaatggaccctttgatgaccgccgcgagcaaggcggccgatgatgcgattgcgaggaacgaaacgcatcgcgcgcaaaaggcggcaagatacgccgaggcgtatgctgaaccagacttgaggaagcgagcgcggttgttgatgctcgaccaggcgttcgatcttccggtcagccgggtggtgaaagggccgttcgatgacttcatcacgaaatacagctcgacgtcagacagcaactacctcgcggtctatgatacgttgttctgtaagggcgacggaaccgtcccacacccgcacttcgacgagtttcgcggccggctggtggaccatcgcggcgtggcgttcaacaacaagaccctcgatccgattgacctgatgggcgccctcgcggctgcggccttggacgatccctcgattaagaagacgattgagacttgctgcgtgtgggctcgtcgatatcgccgcaactctctgatcgagacgttcgagaagaagataccggagtgggatggtgaagagcgaatcgacacgctgctgatcgacttgttcaaaccgttcgacaccgaactcaaccggatggtgagcaagtatttctggctgagcttgtactgccgcatcaactaccctggaatctcggcgccgatctcgttggcgttgattggtgggcaggatgcggggaaatcatatttcggcttgctgatctgtaaggaactgtccggtgggcgcgatctggctccagttcagctcgacctgagccgacacgaccagacgccgttcctgcgcaacatcaccggcaactcggttattgcgaacgtcggcgaaatgtccggcttcaaaaagggcgacatggaacgcatcaaagaattcctggtgcgatcttcggatacattcgatcagaagtttgagcctggcgaaacgatcaagcgacaatggatcaccatcatggacggcaacggatacgatggactccagcgggacgactccggcaaccgtcgattctatccgatgttcgtggcacaacttcccgacgaagatggaaagccgaactgggttaagccgggcgatggtaatgaaccgttcaaggtggacttcacagacttcggccgcaagttctggcaggctatggctgagtgccgcgcctggatcgaagagcatggcgtcgatggatacctgaatatggtgtcggaagctaaccgcgaagtgcagaacttctctatttcggaaatggagaatgcgcgtggcgtggttcgtgatgatacgattgacatgtatctgatcaacgttctgataagttgcgagttcgaagagatcaagccgggcaagaattccaagaatcctgggtggagggctgacaccgtcaccattctgaaatggttcgatattctcgccaggaagaagccgatttctcgccacttaactccgcacctgaaggcgctggggttcgtcccgaacaagaacggcctggctggttggtgcctgcccgtcgataaggttgcgcctggatggacgaatagtatgcaaaccacgctgccgccgttcaatgatgcgcttgtgtacttgctgaggaagggcgacccggatatcactgatgaggctgcaatggcaaagattcgggcagtccgggccgagcgagccaagattttgggcgaggatttctgatgtagtggtggagtgtacttggattaggccgccttcgggcggtctttttctttggtgcggcgtacattagattccggcgttgggcgggattggtagaagtgaatacagtaatttggaccagtttcgagcgcgaataatggaaagtcgatagattttcggtatcggtttagcgtgtatggtggatggattttgcgtgaaatgttgagaaattgcgtgtttgaggtggacttttcgtgggaaatagccgcaaattactgtatagcgattctgagcggtaatttgggaagcctactgccgcgtgggttagcgggccaatttcctaatttccggtttttcgagcatgggttaaaactattctacagcgaaaat

SEQ ID NO: 34 - DNA, 67457 bp, synthetic construct
  source 1..67457: mol_type = other DNA
cgattgcacaatcctaatagaaaaaatctatcacggacgttacctatctttaaaattaataaaattaatagtaatttggtaatttggtaaactttagtatttgaaagcctcgcggcactaagcttgtacatatcccgtcaagtttccgattccagctagctcgcggcagggtcgccggaaacttccggacttccaatccatgggtcgcggcgacaccacggcggactaagcggcaaggaccaaaactcgacgaacggaaccggaaatttgggagcgcgatagaatcgctcagctggacatatttctaacattcgatttaacactcaatccaaacactcaccaccagcgtctcccgccaaccgccgattcgatcctcacccaccagcggatcgcccgtataacatcctataacaccacctaacactcattcatcatcaaacccacccagacctacagcccacccacaagcagcccatagacgcgatccctggccccatagtacaatcgcgccatactcagtgtcgcggcagagcaccaggggccatccgccaaccaagccaccacgacgactccagaatcgaactccagggacgcagcaccaaatgaccaaacactacagccccgacgatctagtcacgccacaggaattcgcagacccgcatttcgcggcgatcaaccaaaagcgattcgacctgtacatcgacctgcgcgtccaaggttacagctcctggcgggtcttccgggccatctggggcgaggagcatatggacggtcccgcgcaggcccgcatcttcgcgatggagtccaacccgtactatcgcaagcagttcaaggccaagttgaacgcgaccaaaacgtccgacttgtggaacccaaagacggcgctccacgaactcctccaaatggttcgtgaccccaccgtcaaggactccagccgtctgtcggccatcaaggagttgaacgttctggctgaaatcacgttcgtggacgagtctggcaagaccaggatcggtcgcggtttggccgacttctacgcatcagaagccgaggctcagaccgcgaccgtcgctgctgcggccgaagccaatggctatgtgccggaaggcgaagagggcgatttcccgtccccgacgccggaaccgaccgaggaagaccgcgccaaccccatttagacataaaataacggctaaggatttaaggtaaggaggtttatttatgagcattcaattttcgaaaattttgcttcttacggtgctcgcaacagccacgatctccaacgcccaggataaaaagtctaaaagtaagactgccaagattgattggtctcactggacagtgacggtccctgaggagaacccggacaagccaggtaagccgtattcactgggttatccggagattctcaattatgcagaggacaaaatcgcgtcaaaatacatgtacgacgatccaaaggacaaaagtgtcgtgttctacgcattcccgtccggcgtgactaccgctaacacccattacagccggtcagagttacgggaaactatggagaccgggtcaaacaaagttaactggaccttcgctaagggtggcaaaatgcgtggtacttacgctatcgacgacatcagcaaagagccggatggtaagtattcccgcgtaattatcgcccaaatccacggcgtactgaccgacgagcaacgtgatcttattgggcaaaaggacaataatgcccctccgattctcaaggtgtactgggataaaggtaaaattcgggtaaaaacgaaagttttaaaggacctgaacgccccttacaaagagatgcttctggaacacgcttggggtgatgacgaaggccggaactttaaagagaagattgacttaaatacacggttcacattggaggttaaagtgagcgatgggcggatggaagtcattcttaacgacaccgaaagtttggtctatgacgacattcacatgaaaaaatggggcattttcgaaaactactttaaagcagggaactacttccagtctaaaactccgggcacttttgcaaaagttaaaatttattcacttcaggttacccactgaagaagcgacaaagccccggactctagttcagaatccggggctttctttttgggcgccttactcgccagcttcgatgatttcgaagttgtatttgacgccttcgtgctcgaaagtcatcttgccagccgccttcagctgcatgcggaagcggatgtgtttcgaagaaggcaggccgaactcgatgaatgctgcgttggtggaccggaactcgccgcgcttgccttttacagtcacagccacgccatggcgctgggtgcgtttcttggaaacttctgggtctttccaggagttggcgatggctgccgacaaatccttggcctctttggctttctccggcgcgttcttggcctcttcgcgcatcttccggatttcttccagcgcttcctcttcggtgacttcttcttccggcttcagattctcttcctcggccttctcttcttccttcttcttggaagtgcgggtcttgtaaaccttggccggggcttcctcttcctggaaggcctcttcctcggccggcagagcattcaggatggcgaggcagcgacgctcagcagtcttgcggtcagagaagcgcttgacagtcgcatcagcgttgtgagcgttgtagaaagcgaccagttctttcatttctgcgttctggatgtcgccgaaggttttgatggagttggtcatcttgcgatcctctgttttggaagatttcttttgggcttcggtttgtcgcccccgttgaaagagattatgcctaggtcgatgctgcgtgtctacatctatttcatcagattgatcacaaagccgacgaacggttgtcggatgtgaaaacaccgcagagcaggctgcggtgtttgttggtgagggcgatggtcagaaagtcgggatcgtgatcggctcgatgggcggatcgccgggcctgtcgttgtccgatgcgggcgccgggttggacgggattgcgccggaccgaagctccagagattccgactgcctgctcacctgcggagctggaggcgcctttggcgcaggaggagcaggcgggaccggcaggcctggaggcgccatctgcgtcatgggcggttccggaagatcgggaaggcttggcgctatgctgccaaaggaccgctgcgactgctgtgccggattttcgccgaacatttcggcggatcggttgtccttgatgacttgacctatggccgtcttgtcggcgcccggttctgccggatcgaagccagtgaatggagtggttgtgcagcgcatgttcggatgggtcggcagattgttcagggcgatggagtccgcccagacgtacgggtttttatgcttgccagggctgtggctgatgatctcggcaggaatgtgaccgttcctgttcagccatctcgccatctcctgccgattcagagggctggccacgatctggccagtggaatcttcgacgatagcgaacagatcaccgagtttgaatccgatgattgtgtagttggacctggactcgccgacgaaagccagggtttcgatgttgtggtagatatcttggtcttcccagatgtacagcatggttcactcctcaataaggctgcttgttgtgttcgaccagagacataccggccggaactttgaagcggatgtattcgatcatcatcgcggttcggcgtttgttggcgccggattcgtcgttgacgaagagttcgcattggtgcggaatgactcgcgtcaccaggtcttcgcctttcgaaccgtagaacttgatgtaggctgcgacgcctcgcgtcatgctcagatggatcgtttcgcagagtcgctgcgcggccgacgcgctggacagatcggtcggactgaccgtcgcccagtaatggccactttgttctttatcgggcataagctaccctccaatgagaaagcctctgccgaggctggttgttagtcgagccagtcagtcgtacttcctgccgtgaaatgcgtgtccgcagccgaagattgatctgtatgcgttgattgaattcctgttcctttcagattcgatttgaatactgagcatctccagctcgtatcgggccagtccgccccattcgcgctcaatgcgtgaatactcggcctccagttgcctcaatcgttcgctcatataacctccaacaatcgtcattaatcgatcaacccctgccgaaccgcagaggctggttgttaatcgcgcttcagcaaaaccactttctcgtttgcgcgatgattcctgtgccagtcttcccaatagtctccgcactgacgggccaactccagagtgacatagccgtcgtcgctgctacattcgacagaaaggacaatcgcgttgcctctggactcgctgccagacccgaatccgatcagaacttcgtcgccagttttcagctcatctgccctgattactttggccatggcgttctcctattgggtagcgccgcgagggcggatcgggtcgatgtcatgtaagcagatggtgggatagtccctggccagcttgagcttgaagtccacccagtcagcaccgatgagcgccgcgacttcgatgcttactttgcggtgcggcgcagctccagatcgcaggactatagcccgacgccgaacgggatcgttgacgtcaacatgcgtgagtatttcgtcgccgacgagcaactcgcaagccatcaatattttggccataatacactcctatgaggaggcgcgcccaggacgatcccagccgcgccgatggattaacgtttgtgaaggatggacactgcgtccacgtcgaggatgctgatggtacggcgacggcgcggattgctgcgttcatggatgcgaatcaggtcagcggatggcgcttcgtgcaccacccatacatcctccggcttctgcgtccggagcaggaccgtcacttctgtgttctgggcgaggccgttgcagatgaacgtgaacttggacgagggagttctgtacatttcgagattcctttttggacttcgggtccggctcctcagccggtgaagagattatgcctgatcatcgcagtcgagtaaagcacttgtgtaccaattctccagttaaatggaaccaaagcgcggtatcgctgattgctacgctcccacgccatggcccttcttgctcacagacttcgaaccacaagctgatttccattctggccaggactcggccgaaggattcgagccggcaccggctggacagaatgtcgacattcacccgtcgattgatttcgtaccggcgaccgttgatgacgaataccaagcgtagagtttgtccgtccagacattcccagtatctggtttcataccgaagccaatagcgcttgctagcagggcctaccatagtcatttaatcgatgctcctggccgcgccacgcggtccggtcggcgggacgggatcgaaccgacccaggatgtagtcgggccggcgcgcttcctgaggacacacggcgagaaggcgccatcctgcgtccagggcatgctggagttcgtccgtgcagcagtcttccttgagcagcagacgattgatgctctggagatttggaccagggatagcagagccggtgaccgagttccagccttcgataccgtgcaccatctgcggctggttgatgtagccttctgacctgccagccaaccggctcgcggccagctccaggcgctccagcattggccgcagagcggcttccgggtcaacatcgtcccagagcaggaccaggttgatgatggtgtacggatagtccttgtccagatcccaggccgaagcggtcagacggcccaggccgatttcattacacatcacgggaacgtcgttgctccaggtggacggctcccagttccgctcgccaggattcccgattgttacgccttccaggttccccaggagaacgtggagcttgctgacatattccgcctccaaggctttccgctcttcgtcggtctggttgtggcgatagaaggatggagggctgacttttgcatggtagagtttcataactgttcctcggttttggaaggcttgaacgttagagaattgtgtcgcagtatttctcgaaaggactctggcgcttcttctcgcagatcgcacaggtgatttccaggtcgggcagctcgctgtaagtcttgccgaggtacagccagcgcttgcacaggctgcgaccgtccgacgtgaagaaatggactttgcgagcgtcgccgggttgcgcccagccgccctgatagttttcgcgcttgctcatggcgatatttccttttggatcgtggatccatggtgtacgttcagtcacccaaactccatctacatagatcaggactgacagagcagtcgcgccaaacccgaagcctacatagaatgaacctggatcgatttccatggtggcgctattagtggcgctattgcaatcgacttcaaagtcgaatagcgaatgaccaatcataccatcaccatgtcgatttcattgacgaagaaatggacatcgacaccatcggcgctgccggtgtaacgcagccgagtcgtcccatcaatgtgggcctcctcgacgccgacgacttccaggatggtgtcgttgcagtacagtttgacgaacatcttgatgccagagccaatcgcctcgaaggcgatctgcttgtacaggtcttgcttgatcatgctttacgctcctgtttgcggatgtattctgccctggcttcggcttcgagcttcgcccaaagcgcgttgtcgactggaccccagggacctgtctgagttccgtccaccggtgcgaacttgccaccggcgcgacgatacttggacagagttctcagaccgatgattttctcttcttgggaatcgagttggacgatcacttaacatacttcccgaagtagcaggtgtggaggatttccaggcccttggaaatggccttcagcttgataccgaaattcttgatcgcccagtccagatcgtggtgatagaactcgatgatgttgacgatttgaccggcgctgtagtggatgacgcgaaccttgccattccagcggaaatcttcgcggctgtttacggcctcgacttcgatagtgtcatttctgccgatggtccatttggagctagtcatgtcgcaatcctctttttggagcgtttcgcgtttcgatgaggtaactatacttcagtcacctcatcgagtaaagcccttttgaacagattgcctaaaatttctggaagacaaaatcaatcggtcgcgtcatcgatagcgaacgccgagcgcgccaggtcgatgatctctggccaggtcaaagtgaaggttttgccgtcatcgagaatgatgatgggagtccgcagcggctcgccaaccagcagttcgtaggaatgtttctcgctggatgcggagccgatgcgggtgtggagggtgagttaggccggggaaatctcggccgccgtaaaggccgcaatgcgaccgctattcagcctgacgaacaccgggaatgcgccgccctcgcgaatctcgctgatcacgccgtggccgccgccttgcgcatagacattctgtccaacagacaattttttgaggatgtcgctaaaaactacggttttcatcgtcttgccctcggtgatgcccggcgaaccgggcggggtttgctacagcatgcctgctttgcgttcggccttgatggtgtataccgcctcatcgaccagccactcttcagcttccaggtaggctttggcgacttctacggttacgttggcgaatttggctacgttctggattttggcttgcttggtcatttcgatttccttttgtctgaagggtttcgcgtttcgatgaggtaactatacctcagtcacctcatcgagtaaagcattttcttcagattatctgaaaccttttgaagccaggaattgccgccagagccagtcgatgtgttcgttgcagtaacgctcgccatcggacgacatagctaaggcgccatcattgatgccgaagtgggccgcagcgagacattcgaactcgaactggagcgttcctgggcgagggatatgggacatggcgtatttctgcacggtcagtgatcctcagaaggtttcgcgtttgcgatagccgctactttctgcataccgaggcgatagaattcggcctcttccctggccttggccagattatccctggcttcgcacgccagcttgtactgattgttggcattctggatgcttccgtccagactcctgtccagttcttcccgaagagccttctgcgacgctagctcggcctccaaatcctggattctgatctgaagctggcgattcctttcagacatctcgttttcgcgggcgatggagttctgaaggcattcgtcaaggcgagtattttcgcgcaccagctgatgcttttcgactttcgcctttctgcacgtctctcgcattgctgaaagctcactcgcatgcagatcgtcatccgggtctttacgctcttccttcgactccatccgcatatagtactggccggctgcgaaggcgagcactgcctggtcggcatacgctgcggcatcggtcatgtatctggatttgtagcgaggcagaaacttgcactcctctggatcccagaggagactatcggcaataggccagaatttgcggaagccatcaggatcgacttctacattgaccatttgcagctggccggcctccacttcgacttccagaggaacctgaatggtgccggtgatgtactggaagtacactatgctagacataacacaatcctcataagaagttgcggccaggaccatcccagccgcatcgtaatcactcttcgccttcgtccgcgctcagccactcttcgaaggcgaaatttaccttcgactcgacccaatcctgcagctcatcggcgaactcgtcactgtcgatgtccatggtgattcccataacttccatgttccatagcgcggcattcagttcgaactgtaccatctgctcgccatcgacttccaacaggatgcggtctgcgacttcatagtcgtctacatcgaacagatggccgcccgccaggaggtgctggacgaaagcttcatcgaggttggtgacttcgatctggacttgtttggtcattttcgtatccttacttagcggctttgaattgggctttgaggttggcaagttcagctttcagatcgatcatcgcctgaccgcgcaggccttccatttcagcctcgctgattgcgatcttggctgcgcggattttgtcgttgatttgatctttagtcatttcggcttccttttgtttgaagggtttcgcgtttcgatgaggagattatgccgatagtcagaatggaagtaaagtgtctgagtgaagaaatttctgtacaccgacgaacggtcgcgctcgactgtctgctgcggtgtcgatatactcggcctattgcgaacgatggactgattaaatgttcaagctcaatcctgcactgcgagcggtctggcgaactcgtgcccgttacaaagtcatctatggcggccgggcgtcttcgaagtcgcacgacgctggcggtatagccgttttcctcgcggccaactacaagctcaaattcctctgtgctcgccagttccagaaccgcatcagcgaatctgtctacacattgatcaaagacaagatcgaaaactcagagtataatggcgaattcatcttcaccaagaactccatcaagcacaagattaccggctcagagttcctgttttatgggatcgcccgtaacctgtcggaaatcaagtccaccgaaggcatcgacattctctggcttgaggaagctcactacctgacccaggagcaatgggaagttatcgagcctaccatccggaaagaaaactctgaaatctggatcatcttcaaccctaacgaagtcaccgatttcgtgtatcagaacttcgtggtcaaacccccgaaagactcctgcgtcaagatgatcaactggaacgaaaatccgttcctcagtgagacgatgctcaaagtgattcacgaagcctatgagcgcgaccgggagcaggccgagcacatttatggcgggattccgaagacgggaggcgacaaatccgtcatcaacctcaagttcattctcgcggccatcgacgctcacaagaaactcggctgggagccggccggatcgaagcgcatcggcttcgacgttgcggacgacggcgaggatgcgaacgcaactacgctcatgcacggcaacgtcatcatggaagtggacgaatgggacggcctggaagatgaactgctcaagtcgtccagccgcgtttacaacctggcgaagatgaaaggcgcctcggtcacttatgactccatcggcgtcggtgctcacgtcggttcgaagttcgccgaattgaacgatgccagcccagacttcaaactgatctatgatccattcaacgcgggcggcgctgtcgataagcctgatgacgtctacatgaagctgccgcacacgacgatcaagaacaaagaccacttcagcaacattaaggcgcagaagtgggaagaagtcgcgacccgattccggaagacttatgaagcggttgagcatggaaaggttcatccattcgacgaattgatttcgatcaactctgaaacgattcacccggacaaactgaatcagctgtgcatcgaactttcgtcgccgcgcaaagacctggacatgaacggccggttcaaagtcgagtccaagaaggatatgcgcgagaagcgcaagatcaagtcgccgaacatcgctgactcggtgattatgtcggccattctgccgatccggaagcccaaaggcttcttcgacttctaaacatagaaaagcccggagcgatccgggcttcgggtcttactcggtgtggttcctggcgctgagtgtcgacgaaacggcctcgccgacgcccagagcttcctgaccggccgcgagcgcttcggcttccgactcgacgttgaagtcatcaccttggccattgcctggcggaacctcgaccagcacggcttcttcgccttcgaaacgcaggtcataggtcttgtcgacggacagaccgtaacgagcgttgagcgcgtcccagagctgggcctcataggtacgcaggtcttgcagagctttctggtggctgagcatggccatgtcaacggcccgttgcagggtttcgtccaggacgttgaaccgaatgcgaagagcacgaatccgctcgacggtttccgcatccactacatgtctttcgatcattgcttttcacctttgctgaatgttacgttgtagccgttgtcggccaggtaggtcagggcgccttcgaaggaagttccgacgaggtgcttgagcttcatttcgcgttgcgcggccaaccagaatgcagttccggaaaactctgcgcggccttcggacaaaaccctgccatcaggcccggcgatccgtacatggacggaagatagcttgatcggcatcagtgaatacctccactggcttgcgacggcatgctttcggcgcgagcggcttcgcagtccgggcagggacaggcttggcggacgcgctccaactcgtcggcatccatgacatagagcttcccatcggcagtgtcatgtgccatagcgatgttcgggaagtcggttgcgctcaggccggcgacagtgcggatttcgtcccagagcaccagatgctcggcattcagtcgggcggcgagcgcttcgtgctctttagcgacgcgcgccatgaactcgtccatccggaatgcgaattccgcatcgatggcacgggccgaggccatggagctgagtcgaatcggttctttcttcatgatgattctcttttggttggtggttgttagctgctcaggcctattacagcctgagcagcatgatgaagatgaacgcaaggaacgcgaacggcacaagtatgccggacatcagctttgacaggcgctgcatctcagcgtatttctcggtagacattccgtgctgcgccgcctcggccgcgaagcgggctttcgcctcgataacttccgggcgcagcgacaggacatattctaaggcctcttcccgcgctttttcggcctcgaccgacctagggtcgcgggccgagacttcgctgtgccctggcctcgcgggatgggcttgcagcgatggagggagttcagcggccacgactccataatcggcacaggcccaagcgatcccaatgaggatcgcgaggatggactggacgattcgcagcatcactttgtcgctagggaagctcatgatcaatcctccaccgaccgaacgatttccatgttgcggccggcattggtcccggcattgaaggcgcgccgaccgtcgctatcgtccagacgcatgagcttagtaacattagacttcttgtagccaggatcaccgaaatgttcgtgaaccgcagcttccttcgccaccaccagagacgttccggcagaagataccagctccatgcgcttcctggtgatggattgaaggcgatagctgatttcctgggtcgcggccagcttgaattgcgcggcaacctttacgttgaaacgttcgtacccttgagacttctgatactcccggcacagacgatcaacggcctcgaccaaggagttgaacatgttcactgccagctcaacgtccgacttgtagcctttaaagcgtacggcatgaccccagcgcttggtagtgcttccgtcgcgggcactcctggacgccttagccgatgctctgtggttgttgacgccaccggcgaaatccatgatgcaatcattgtacgtcgccacggccaccgagaagaacttcatccagttcgggattgcggaatagtaacgagtggcaatttgctcatcgaactcttcgcgaatctcgccggtcgcttcgaagtcgtgaaggtcatatttgtccttcaatttcttcacgcgctcggctgcgatagcagcttcgtgcggactggaggagtcggccgccatggcggtcagtttgcggatgcggtctttcgccttctcgatggcttccggagtgaattcgttctggtcggtcatggtcggttccttttgtctgaagggtttcgcgtttcaatggagctattctgccttcattcagaatggaagtaaagcactttcttccactatttcggcatcgactggaagaaattccagatccaatcacctgctaccagcaagaggatgagggcgacaaagaacaggacggcggccgcgagctgtgcgcccggcttcagcttgggatggctgagcttgggctctgcgggaacggatggagcgttggcgctgcgaccgtcttctcccaggccgtagccgatgccgcgctcgcgcgcatggagcgacaccagaagtttcagatactcggtctgcttttgcgactcttcgtagatgccggcgacggcgaaccagagggcgaacacgacggacatacacacaacccaggcgccggtcagcaggagggccagcgggccgatgacgaagacggtggcagccaggacgattgcgccgccccagataatgaagccggccagaccattggtgatgtcgatacagaactttttcatttgcggattccttcggttacaggattgaggggatttggaactctgcgccaccgagcacatcggtgacgacttcccagagcgtcggcactgaccactggtagcggtcgaagtcggtttcaggatcgacgcccagcgtcacataggaagtggcaggccatttatgaacgctacctttccgcatgagagtcgccacgcggccgtcaccgagcgggttcgtcttgtgcggaacgtacgcagacatcgaatattgctgcccagcatcaacgatgaatctttgtctctggcgcagacatacagagccaacaggattccaaccgcgaccgccgcaggcctggcgagccgaagaatgctcatacccttcatgagtcatttcgccgaggcaagccgagcgatcttcgtaataattgatgttctccatcgatccaaccagcaccagagactcgaaatcgaatcggtgatcgtgaatggacgagtgatggacgcaacgccggcgcggcaactccgggtgccaaacatggaggcgccctgccgggagctggacctggatgaaccccaggccgtgcaaagtgatcttgtccttcagcggatcatggactgtactcatggataatcctcaatagcagaagtgtatggtgagagttacgatggccaagccggtcgcccatagaagggcgaaccaggccatagcttttatggttatgtagatcatccgaagaattttccggcacagatcgggccgattcccatttcgatggacgcgtggttggtcaactcgcgaccgcagcaggagcattgaccagtcttccggccgtaggcgactgccgattccatcggcttttcgaacatcttcagaacgtcgtcgtgctcggtatcggtgcagtcgcgactcttgatgaatttgccattggtgatacggccgaggtagatgtcgcccaggacgtacaagctaccggcgttccggctgtgagcgctagcctctttcaccacaacgatgagcggctcctcgccttcgccagccaggcgaattttcgggcgcttgattccagattctttcgccttctcaaacgccttctcgatgccggaaatgtccagagtcggcgcagcagcttcctgcgcggccactttctcgcgatacttggcgaagttttcgatggcgcgcttcgcagcagcgatctgattttctgtcaaggagccgtatttatacaacgactcctgaaggctctgagcgaagctgaaggaatttccagtccaccactcgacgatgtccgggtgcgcggcttcgaaggccttaattttgaggtcgcgctcttgcgcagcgctacagattttctcgatgcgcttttctgccgccttagcacggctcttggcgcgctgctccgggctggttttgtactctttgtatccgacaccgccgcaggcgaaacaggcgcgaccataagatgaagggccacggtacaggccggtgcctgcgcattttgtgcacttgtcgcgatacagcttcacttccttccgggagttcgggcgggcgcccatggacacgtcttccagcgtcttcggcgcttcgtcagtgatcgctacggtagcgaagtcatcgcccaggtcttcgaagccggtgaacagattctctgctgcgttcatatcgattctcctgtttggaaagttcgtttcgatgagttgactatacgccagaaatggaaaaacggtagcgatttctcactaccgttcgtcgggtcgaagataatcaatagatgtcgctattgatcttgaacccatgctcagcgccgtcgttgtagtcatactcagcatagctgtcgcagtagtcgttcaaatgctgaatgatgcctagaacgtcgttagcggccttgtgccgtttcgcggcgatggtcttggcgatgctatcgccgacttccagggtttcggccgtccggcgatggatcagtagacgactccaaagatagagccggacgcgacgaattatgtcgcgatggcgctccagtcgtccgtgcagctcttcaatttcttgctcgcgagatttcaccactcgtcgaagctgttgaacttccaattccaaatcggccttagtagccatgttcacctcagaaaggaaaatcgtctgggactccaggaagctcgacgattattgttgagcctgatcggtccagaatgcatccgaccgagccggccctgtggggatagggtctacacgaactataacaggtgacttccaggactatccgccaggtcgatcctccacaccatctacagactggtgggcgcttcgacttcagttttcgttcgtccaagacggcgcgtctgtcgcaggaaaggcagcgcgccttaaccgacgtaaccatgggtatagtcgatcattcggatgagatcatcatcctctgattccctcgacttcagaccgcccaaagagtcagactggccgttgcatttcgcatcgatatccatcgaagacaagaatcctgccgatactacggtgatatcaactttgtcgccggccttcttgaagccttcgcactcagcatcgagggccacaaccgcactcgcagccatgttcacatgacttatgaggtcggggaagatcacgggaacttcacgcgacatgccacggaccgtcatcttcaggactacatacttcatactcactatcccttttgtatgtgaggaaagaatttactgttttccggatggtggaagcgctcggccgcaggcggtcttccttccggacattgaatcgtcgaaggcgggaaaaccgcgcaggcgataatcgccgcgaggagtgcagcggatgtcgacatccagagggcggtttccaggctcacccgaacttccggacggcgcggcttcattcgctccaccctcttcccggttcataggatggtagactgccgccgcgaacccagttgtcccacatgcggttcagaccagtcggtggctggggcggcggactgtagaatccgggagtctcagtgctgctcaggaaataaggcgtgcaaacggcctggacggccagttggtgccgctcccacatcttatcaatcgctcttagcatgacgtcttcgcactgagccttactgtcgaaccgtctgctagtgtggtccggtatctggatgcatccgtctccagtgcaaaggaaagcagtagcaatccacacggtgatactcgccatttcgtcaccctctttagttgatgagcagagtctattccatctgctcgccaggagtaaagcgcttttcgtcgggataaatgccgatgatgtctgcgtcgagcatccaaatgtccacggacggatcgtcgctgctgatttgatataggttgtacagctcccgtccgccgacagcacgctcacctcgcggctcaaccgccagcaccttgccgtgtccttctccgtgctcgtccaggtatatgacgtgatcaccgacttcatagctttcttttgtgacgaggcgtgaacgcgagctgttctgcgattctactacccaggaatccagcacgccgcctttcacgtcgcgaaacaatcttgccgatttgtcgcaatcgaatacgcccagaacttcgccgtctttcaacacgatatgtacgattggcaaaagagtattcatgtttaatctccattggttgataattagagtctaatctgccgaaaagttcccgtaaagaattattttctcataactgattagttgcaactgttaatctgatgtatatgtttgaatctcttttgaacgtttgatgtttcccctataataagcgcacacagccaacaaccacgtggaactacaatgtttaaactttcctggatattcgggcgcaaaaaggataatgctgcctgttctgaatcggcgccggagaaagtcgcacaaatccctcaacacgatccgctcgaccccatgatcaagctgggaaggattcgcggctggaacgtcgagccggagaaagccccggtaattcgtagtgtgaaagatttcctggagccgggcctatctgtagcaatggatagtgcgtatggtgatggaccaactccggccgcgaaggctgctgcgggcggccagaatccctatgtcgtcccgactatgttgcaggactggtacaattcccaagggttcatcggataccaagcttgcgcaatcatttcccaacactggttggtggacaaagcttgttccatgtctggggaagacgcagcacggaacggatgggaactcaaatcggacggcaggaagctatccgatgaacaaagcgcgctgatcgcccggcgcgacatggagtttcgcgtcaaagacaacctcgtcgaactcaacagattcaagaacgttttcggcgttcgcatcgcgctgttcgttgtggagtctgacgatccggactactacgaaaaaccgttcaatccggatggaatcacgcccggctcctacaagggaatctcccagatcgatccatactgggcgatgccgcagctcactgccggctcgacggccgatccgtcttccgaacatttctatgagccggatttctggattatcagcgggaagaaatatcatcgcagccatctagtagtcgttcgcggaccgcagccgccagatatcctgaagcctacatacatcttcggcggtatcccgctcacccagagaatctatgagcgcgtgtatgcggcggaacggacggcgaacgaagccccgctgcttgccatgtcgaagcgaaccagcaccattcacgttgacgtggaaaaggccatcgcgaatgaagacgctttcaacgctcgcctggcgttctggattgccaatcgcgataaccacggcgtgaaagtcttgggtactgatgaaagcatggagcagttcgacacgaaccttgccgacttcgacagcatcatcatgaaccaatatcagctggtcgctgccatcgccaagactccagccacgaagctcctcggcacttctccaaaaggattcaatgccactggtgagcacgaaacgatttcttatcacgaagaactggagtccattcaagagcacatattcgacccacttcttgaacgccactatttgcttctggcgaagtcggaagaaatcgatgtgcagctggaaatcgtctggaaccctgtggactccacgtccagccagcaacaagccgaattgaacaataagaaagccgcgaccgatgaaatctacatcaactctggcgttgtgtcgccggatgaagttcgcgagcgtctgcgcgacgatccgcgttccggctacaaccggctcaccgacgatcaggcagaaaccgaaccgggcatgtctccggaaaacctggccgaattcgagaaggccggtgcacagtcggccaaggcgaaaggcgaagccgagcgagccgaagcccaggcgggcgccgtagagggcgcaggcgacccggttcccgccgctccacgcgggactaagcctctcgcgaaagcggccgaggaaggggccagcgaggccgctgaaccgccgtcgcggccggaccccaaggccgaactgcggaacttgttggtcgatcttttgtcgaagctccaagacctggacgacattaaggcgccggacggcgtagacatagagcacaatgatgcgcctggcgtaaagcgcacgtccaaacctggcgtgtctggcatggagccttcggtgttttcgtccaaccgcatcgtcgggcctcgtgatcattcggaactccagagaatcaaggtgaatggaataaccaccttgatcgaaaatccgcgcggaagcattcggcaaggaaaggatgggagttggcgagttcagatgaaacaccactacgggttcatcaagggaacgaaaggcgctgatggggatgaagtcgattgcttcgtcggtccgaatctgggatccaaacgggtcttcgtcgtcaaccaggtgaacaaggaaggtcagtttgacgagcacaagtgcatgctcggcttcaacaacatcaacgatgcgaagtctggatatctgtcctgcttccgcccaggttgggatggtctcggctccatccatgaagttgacctacccgctttccgtcgctggctggcgaacggcgacacaaccaaaccgtttggaggcgagtgatggcattcaaggcctccaaaaagcgcgaacgccgggcacctcttccggtcggaagagggaagcccataattccatcgtcaggaatcgaggcctggtatcgaaagcagatgaaggatatttccaagctcatgatcgccgactatcgaagcgagattgagaaggcgctgtcccagcctgcggccgaacggttcttcgccagcgacgaatccgttaacgtcctgttcaagatgacccttcgaagcctacagcagcgatggaaccgcatttttgaaggcttcgcggccaagatcgccccggagtttgtcaaccggaccgaagaagcggccaccgccgcgaccctgcacagcttgtctgtggccggcgtcgatcagccaagagctgcgtacaatgagagcgtcaggaataccctggaggcagcaactacttacaaccatactctcatcaccaggattcaagaggaagtccacgagaagatttatacatcagtaatgttgtctctgacttccccaaatccggaagagcaaggaacttccggcataacgaacgcacttcgcaaagtcgggaagttctctgaagatcgaatcgaactcatcgcaagagatcaaaccagcaagctttacagttctctgagcgatgagagaatggcggaaaatggagtcgaggaattcgagtggatgcactcttctgccggcaagactcctcgccatacccacctggagaaagatgggaaaaggttcaagctgaatgaccccagactttgggagggtccgaaggccgaccaggggccgccaggatgggcgattaactgtaggtgcagaaagataccaatcatttgatatcgataggagcgctatatgccgttagttcatggcacttccaatgaggctcgttctgaaaacatcaagcgggagatcgaagccggtaaagacccaaagcaggctgcggccatcgcttactccatccagcgcagtgagaaagggaagacggcgaaagattgttcgcctgagctcgttgccgatcttcgcgccctggtggacgctctgtcgaggctcgtgaaatgaaccgcaagacatgccggcgccgactcgtggtcgatgtaatcagggccaatattcacggcggattcttcagcctgaagtttgccgccatcgatttggcaatcatcggcgtcgccatcttgatgacttttggccgataatgctgagaaaatctggattctgactaaaattctagtccggatagccgcaagttaccgtttacggaaaatagcagtaatttggaaagcctactgccgcgaggctttaacagagctagttcctaatttccgatttagccgcgtgcttcaaaagtatatagcctgggaaattagaagtaacgtcccaatagaattcatctataagtaacgttataatataacgtcaatctatatgctctagacgtattgaaatttaatttttaatcggtaaattggtaatttgaattagtttatgagttgaaagcctcgcggcagtaggcttagacaaatcccgtcaagttccctagaccaaattaccggattttcgcggctgaggaaactggtaattagatcataatacaaattatagtgtaagttaacagtcgcgactacatctaattattgttccgcttatttacccttagatgtactgcgtatataatacagccatagtccacgactcttcgaattaacgatggcaaagtcgaaaagaaaaattgacgaaaatggatatatgaccatcgagggttgcccgatcagctcttatggcgttttccaatattctgctggtcaactcggtcttccgggcgatccgatgcggattgtcaacgtatatcgcccggagtctgccgtcagcgatcctgagtacatcgaatctctgaagaatctcccgttgatcgacgagcatgagatgctgtcgggattcgacgacgatgacgacagtgtggcccccgaagacaaaggggtggagggcatcatcacctccaacgcttactacgaagccccatgggcgcgcggcgatatccgcatctattcccgcaacatgcagaatcagctggaaaggggcaaagaagacctgtccctaggctatagttgccgctacactgagcaacccggcatctggaacggaacgccttatgaagtcgtccaggacaagatgcgcggcaaccacatcgccctggtaaaagaggggcgtgtgccgggggccagagtattggatggtctgtgttttgaccatctcagttttgatttcagaccatccgatgagggtaatgaaatgagtctcaagaaagccaagcagaagccccctgtccagcgcgtagggcaagctgctgactcggcggtcgaagagttgcgcgccctgtggccgaagctctctgcgtctgtccagaagttcctgggcgaagaggcgcaggagccggagcatcaggaaggcgcggccgctccggccgaaccgaccgacagcgagcacatgaccgagcatccgactctggaaggcgctcagaaggacaacgaagagcatgaagaggcgccttccgttgtcgatccggctgtggccgccgccgagtcggagcgtcaagaaagtgccgcatccgaaatgtccggtgaaggcgaagtcgccgaactgatctcccaggtcaaggccattctggctcgactggagggcacggcggccgaaggggcggacgaagagcatggcgaaggcaaagatgtcgtcgagggtttggaggagcagagcagcctcagcggctcgcaaaccgccagcgacgatggtggtgagggcaaggataacagcgaggaacttcctgaaatggcacagaagaacgcgcaagatgctgcaattcgcggtctctatcgcgacattgctgctaaagatcgcctctacaagcgtcttagctccgtggttggcgcgttcgatcaccgagctatggactcggctgaagtcgctgtttacggcgtgaagaagctgaacatcaactgcgcgaagggccaggaagctctggcactcgacatgtacctgaaaggcgtcgaggcctcacgtggcgcggccagccgtcaatcgaaagcccaggattcggccggctctgctccgcagtgcgccgagctggacagctacctgaagggggagtaactcatgttccagaaacaagtttaccgccagtacactcctggttttccgggcgatctgatcgaggacggcccgaagcgggcgcggccgggtcgaatcatgtctctgtctgccgtaaatccggctgccaccgccaccggccccaaccgcatcagtcgcgctttcggttacgccggtgacgtcagcgccctcggcgaaggtcagccgaagaccatcgcggctcgtgcttctgaagtcgtgatcggcggcgccaacttctttggtgtcctcggtcatccgaagcactatgccctgttcggttcggccggagactccctggctcccagctatgatctgcccgatggcgccgaaggcgagttcttcgacatggccaccggcctggtcgtcgaaattttcaacggcgccgcaaccgccctggacctggactatggtgacctggtcgcctatgtacccaacaacctgcctaccgccgacaacgcgcttggcctgccggcaggcgccctggtgggcttcaaggctggctccatgccgaccggtttggtccagattcccaacgcacgcatcgttaacgccatcagtctgccggcccagtcggcggggaatttggttgctggcgttaccatcgtccagctcacgcagtaaggaggcgtcatgagccagatcagcaagacccattcgcgcctcgcaggccgcaatgcgaaacctttcgacctgaaaaacatcaccaatgacgccgtggcgtctctgagtcgcatcggcctggtattcgaccacgccgtcgtccaggaccagatcaaggccttggcgaaggccggcgcattccgctccggctcggccatggacagcaacttcaccgccccggtgaccacgccgtccatcccgactcccatccagttcctgcagacctggttgccgggcttcgtgaaggtcatgaccgctgcacggaagatcgacgaaatcatcggcatcgataccgttggctcctgggaagatcaagaaatcgtccagggcatcgtggagccggccggcactgcggtggaatacggcgaccacaccaacatcccgctgaccagctggaacgccaacttcgaacgtcgcaccatcgttcgtggcgagctgggtatgatggtgggaaccctggaagagggtcgcgcctcggccatccggctgaacagcgccgaaaccaagcgccaacaggcggccatcggtctggaaatcttccgcaacgccatcggcttctatggctggcagagcggcctgggcaaccgcacctatggtttcctgaacgatcccaacctgccggcgttccagaccccgccgagccagggctggtccactgccgactgggcaggcatcatcggcgatatccgcgaggccgttcgccagctgcgtattcagagccaagatcagatcgatccgaaggcggaaaaaatcaccctggccctggccaccagcaaggtggactacctgtcggtcaccacgccatacggcatttcggtttctgactggatcgaacagacctatccgaaaatgcggatcgtgtctgctccggaactgtcaggcgtccagatgaaagcccaagagccggaagatgctctggtgctcttcgtcgaagacgtgaacgcggccgtcgatggaagcaccgatggcggcagcgtgttcagccagctggtacagagcaagttcatcaccctgggtgtcgaaaagcgggcgaagtcgtatgtggaagacttctccaacggcaccgccggtgcgctgtgtaagcgtccgtgggccgtggtgcgctacctcggcatctaaccgatgcctattcaccaaaggccggaaacccggcctttgttcactctgactctgactcggttgtaggggccggttagggcataattactaggactacgccaatgactgtttacatcgtttccgccatgactcaatccgtgtcttacaatgcgtatgacacctctgatccgtccaatcctcgcctccagcgaaagattctgattcgtggccgcgccggcatcgcatccgaaacttccggcttcggcgacatgatttccgacgcggccgggcgtccgatctggaccccgcagggcgattgcactgccgtgagcgattcggatttcgagctgcttcaggccaataagattttcatgcgtcacatggacaagggttatctgcgagtcgtgaagacagacatcaccagtgaccaccagcggatttccaaagagactcgcaccatggagcgcgatggattccagcctctggacgctgatcgtctgcagcagaaaatcaaggtgaccaccgccagcgcttcccaggaacaagagttccggatttaaccgagggtttcggtatggtgattttcgacgaacataagtttcgcacgctgtttccggagtttgctgatccagccgcttatccggacgtgcgcctgcagatgtatttcgacattgcgtgcgaattcatttctgatcgcgattcgccataccgtattctcaatggtaaagccctggaagcctgtctgtatcttctgaccgcccacctcctgtcgctgtccacgatgcaagttcagggcgcggctggaggtggcgtcactgccggtgggacccaaggcggtttcatcaccagcgctacggtcggcgaggtcagcgtggccaagctcgcgcccccggccaagaatggttggcagtggtggctttccgggacgccttatggccaagagctgtgggcgctcctcagcgtcaaagcggtgggcggattctacatcggcggtcttccagagcgccgaggcttccggaaggttggagggacgttctggtgatccctggtgcgaatcttctgcgaatggccttcggggtcatcggcactcaaattgtgaaatatcgcaagtttgagcagcgagtgaagaatgatcaagctcagtacgtttccatgttcgaggagcctttcgacctggcagcgtctgtccagcgagtccgacgcgatcagtatgtccagtttaatctggagttccaacggaattatgttatgatcttcgccaactttgagatggttgacttggatcgcgatgtggccggtgaccagttcctctggaccggaagagtttttcagctggagtctcaaggctcctggttttatcaggacggctggggagtttgcctggccgtggatatcggtgcggccaagctaactgatgacgggaaaccgactttctaggtgatgtatgtttgacggcgaactgatagcgaaaatggttgtcgagctgaatgcggcgatgacatctgctcaagaggctttgcagttcccggattttgaagtcgtccagaaagctcagccgacccaacagggaacgtcaaccaggccgaccatctttttccagaaactgtttgacattcctcgcggctggcctgccaccgattggcacctggacaacacgacccgcaaatatgtagaaataactcgacagcatgtagagacgactttccagatcagttcccttcattggcagaatcctgaaataactcacgtggttacggcttctgatatcgccaactatgtgagggcttatttccaagctcgatccacgattgagcgcgtaaaggaactggacttcctcattcttcgcgtttctcaaatttccaacgaggcattcgagaacgacaatcaccagttcgaattccatccaagttttgacatggttgtaacttacaaccaatatattcgcctgtacgaaaacgcagcatattcggccgatggggtattaataggcgtatgagtctgaggcgcgattcagagctaatcgccgcgcacctccagatgttaagagccatgcgcggcaggtccgtttcagccggatggtattccacggctcgatatcctgacaaggcaggcggatcggtcggaatacaagtagcgagaatcgcacgtctcaatgagtacggcggaactatcgaccatccgggcgggaccaggtatattagggacgccattgttcggggccggtttgttggcgttcggttcgtcagaaacgactttccgggagaaaccgaggtaactaagcctcacagaattaccatcccggctagaccgtttatgcgatatgcttggaacttgttttccgcagatcgcgccgcaatccagaaccggatagccatgaggctggccagaggacagatcactccagatcaagctcttgcccagatcggcctggcgttggaaggatacatagccagaagcatcaggaccgggccatgggtggctaactcagcatctacggtcaggagaaagggattcaacagaccgctggtcgatacggctcatatgcttcaatcgattagcagcagagtaacataaccaggagatcatccagtgatcagtcagagccgttatatccggatcatttcgggcgtaggcgcaggcgctccggtcgcaggccgaaagctgattctgcgcgtcatgactaccaacaacgtcattccgcccggaatcgtcatcgagttcgacaactccaacgcagtcatgtcttacttcggcgcgcagtcggaagaataccagcgcgctgccgcatatttcaagttcatcagtaaaagtgtgaattcgccgtccagcatcagcttcgctcgctgggttaacaccgccatcgcgccgatggtagttggtgacaatctgccgaagaccattgccgatttcgccggcttctccgcaggcgttctaaccatcatggtcggcgcggccgaaaagaacatcaccgccatcgatacgtccgccgcgacttccatggacaatgtggcgtcgatcatccagaccgaaatccgcaagaacaccgacccgcagctggcccaggctaccgtgacctggaatcagaacaccaaccagttcaccttggtcggcgccaccatcggtaccggcgtcctggccgtggcgaaatctgccgacccccaggacatgtccaccgccctcggctggtccacctccaacgtcgtcaacgtcgccggccaggctgccgatcttcccgacgcggccgttgccaagagcaccaatgtcagcaacaacttcggttcgttcctgttcgccggtgcgccgctcgacaatgaccagatcaaggccgtgtcggcctggaacgctgctcagaacaaccagttcatctacacggtcgccacttccctggcgaacctcggcactcttttcgacttggtgaagggcaacgccgggaccggcctgcatgtgctgtcggcgactgccgccaacgacttcgtggagcagtgccccagcgagatttttgccgccaccaactacgatgagccgggcgcttcgcaaaactacatgtactaccaattccctggccgcaacatcaccgtttccgacgataccgttgcgaacaccgtcgacaagagccggggcaactacatcggcgtcacccaggccaatggccagcagctcgctttctaccagcgcggcattctgtgcggcggtccgaccgatgcggtggacatgaacgtctatgccaacgaaatctggctgaagtcggctatcgctcaagcgcttctggacctgttcctgaacgtcaatgcggttccggcgagcagtactggtgaggcgatggtcctggcggtgctgcagccggttctggacaaggcgaccgccaacggcacgttcacctacggcaaggaaatcagcgccgtccagcagcagtacattacccaagtcaccggtgatcgccgtgcctggcgccaagtccaaaccctgggctactggatcaatatcaccttctccagctataccaacaacaacaccggcttgatcgagtggaaggccaactacacgctgatctattcgaagggcgatgccatccgcttcgtcgaagggtcggatgtgatgatctaatggtttgcggcggactcgatccgccgcaaccttccataaatggagtgaggagtaagcaatgatcaacatttctgcgttcggctcgatctgccagttcacggcaagcagaactttcccgaacggattcaccgtcaccgagttcgccgacgatgccgatcccatcgacagcccgccgttcaccgctgccgataccggcgtcggtctcaacggtgacatggtagtttggaaccgggcgaacatcctggaagtagtcgtcaacgtcattccgaataccgagggcgagcgcaacctggcagtcctgctggatgccaaccgcaccggaaaggacaagtcgggcgctcgtgatgtcgtcggcctggtcgtggcgatgccggacggcagcaaaatcacctgcaccaacggcaccccaatcgacggcgttctgatcaacgcggtggcaagcgtcggccgtctgaagaccaagccgtatcggttccgatttgaaaaagtgatcaaagccggtactagctgatgaagaaaattccgctgacagcagtccccaatcaagcgatctcatttaacgccggtagcagctattggaagattcgcctgtaccagaacatggacatgatgaatgccgatatcagccgcgacggcgtgatcgtttgccatggggtccgctgcttcggcgggattcctcttctccagtacagccgtcagtaccgacctgactatggcaatttcgtcttcgaccgcgacgccgattggacattgttcggcgacggcatcaacctgttctatctggacggcgccgaattcgccgagtatcaggcgcttgccacgaggaaagaatgagcacatcaacgatcagaaccgggacgaacaacgatatccttttggacgacaatggaaacatggttatcctcagggatgtcgaagcgtgcgcccaggacgttcgggcggcgatgctcatgcgcaccggcgaaaacattttcgatgtgaactccggtgtgggatatttcgaatacatcttctcgccgcagaaaagctatgatgacgctcgcaaatccatcgcggatgcaattttgtcctcgccggatgtgaccggcatcgagcagctggacatcgacatcaccggggaagtcttcggcgtcgatgctaaagtcatcaccatccacgggcctgttaccacaggagtttgaaatgagcacaatccgcatccaatacgccaacggcacccagctgttcctggacggcaaaaatccgccgctcctggaccctctaccctcgttcaacccgtctgtagaagatctggaaggcctggaccgcgaaaagaacaccggcaagggcgactcctcgccggccggtcttcccgttcccccggtaaacgtcgattccaatgtcgacaacggcggaaccatcccggctccggtatcgaccgacgctcctgcggccgaatcggccccggaaggcgcccaggaagctcctgcagcgggacaaggcgacgagaaaggcgccgaggaagccccgactaccgccccagtagaaaaggccgaggaaacggcctcgccggccgctgaagaggaagccccggctcccgccaaggccacctctcgcaaaaccaccagcaagtaaggactcgacatgatcaacgtcagcggcttcggcacaggaattgtaatagtttccgcctcatcgttcccgatggggttttccttgtcgaagttcgctgatgatgagagtccgatatcctccaaagagctggagccgttcggatatgagatgctttatgacggcggcctattcgcctttgacaaggctgctcctctggaagtatctgtatccgtcatcgcagggagcgaggatgatattaaccttcgcatccttctcaattccaaaaagggatcattccgatttcttccgggaatcatcccggatatgacgactctcgtggccactcttcctgatggcggccgcaccgttctgtccaatgggactatcatcaagggtccggccatcgacaccatacagaacaccggacgacgcaaaggcaacacgtacacttttgttttcggtagctatcttggcgcccagactgcgcgtcaagccatttctaacgttatccaatcggtactggaggtggtctgatgttagggattttcaccagcctcctaagttcgcgatctttttcgattgtggaccaaaacacaaaccagctagttgctgcggatttgaggataagccgggtcaacacccggttttcttctgtagggcaacgccacatgctggaagatggcaagaccaagatggattccagaacgatccaccctatggaaatcatcgtcgaagtattttgcccttcaattgatgtcgtcgatcagatcaatcaattgctcctggatcgcgacactctgtacaaagtcatcactcgcggcatggtattcgaacggatgatgtgtaccagcgaagcgctcaatcagactccggatatgatatcggcgactcctgcgcggctgacattctcccaagttctcgtccagaatcccaagcctataatgttcagaaatgcaggggactcttctatgatcgaccgagggctggccctagctgaagacgtggttggctcggccggcgatctgttcgactacgcagtaaacggcgtccagaacgccgcagacttgttctgaggtgccaattgaactctttcctcaagtctattctcaacacgcctactctcaccatacgtgatgatgttaccaaacttcctgtctggaagagtcttcaagtcaagaaagtggaaatttactcgccggcttccgtagtgtcgaaacctctggcgacgaaagaccagacggaagctcaagtgtacaccgaagctctggacattgatgtgaagaatggaaagatcatccaaccggtgcgactccgcatcaatgctatctgtccggacctgtccaccgttgaaagtatcatgaacgctttcaatgataacacctcgactttcgctatcacttctaagtcgatattggccgataaaatggccatcatgacgctcgatgtagatcagtcgccagacatgttgaacgcggctgagatcaatatggaattcgagcaggttgagcctccagtattgaatgaattcgatcctgcgttccctcaagatagtccgacttatggggtacagattcaatctctttctgatgctaatttgctggatttgggcgccatcggcgattcgatatcttcggccgcaaaatcgctatataatcgcgtgaccagctacttctgaggatgtatcatgcttgaaatcaatcttcccgatggccgtcaaactcgcgtacaaatcgaggcgtggtcggcattggatggctgggaactccagcgccgtttcgtcgaattcgctgtcagccaagattccgacttccgccgctctttcaccatggaaatcctgggctatgcgaaagtgctgcttggcgacgatgacaccggcattccgctgaccaccgcggcagtcatcaacaaccacctcggccactggaagaacgtggaactggttttcaactctgttctcaagcacaatggcatcgacccggccacgcacgccgaccggccggactattgggaacaagtcggatcgcagatggccatcgcatttctggccgaggcgtccaagctcattggtccagcaatgaagatcgccgaaggactcgccaacaagccggagtgattcatgtctagtgatttggatgaattcatacttcggtatgaggccgatactgccagagccgagcgcaatctagagcacctccagaaccagatcaggcgcgtaaacagcgcatcgacgagtggccttcaggatttgcgccacttcgcagacggcgcggccaccgaactcggccgagtcgttcctcagattgattctgtgacgagcgcaattcgcggaatgaacgcgcaactggcaataggcgcaactggcgtggccctggtcgcggccggcgtcaaggcgttcatgaacaccagggaccagtacaatcagcagcgcatccaggcgatggacatcggcatcgccccggcacgcttggaagagtaccagagaaaattcgttcgccagtccggtggaaccatcagccgcgagcagggcgcggagatgaccaaaaatctggcagacactttccggcgtgcttatcgcgatatcgggcgagtcggcccggaagcgcgaattctgcgtatggcaggcgtcgatgtcgggagcttccaaaagggcatgcggccgctcaacgacatcattactgatctggccacgaaaatggccaagttgaagccggacgaaatttctgcctacgctgatgcccttggcgtctcgcgagactacctgagcaccctggcgaagatcggcccggccatgggaaaagtcactgagatgacgactgcggaactccagtccagggtccagggcgagtccaacatccagaaattcaacgatgccctggcgaatctcaaccagacgttcactaccctggaaaaccgagtcggcgaaaagctcgcgcctgcgttcaccaagctgatcgaaatcatcgacaagatagtccaggctattcccaatgaagtggaaagcttcgcgaaggacaccaaatcccgttgggaagatggagtgctcgggaaggcgaccgttggcagtgatatcctatccctcctcagccccggcgccctgctcggtcgcctggcagcgtgggggactcgtcgcggcatggaagaatcagggctcatcgacaaggacaaggttcccggcgctcaaaccagcgaagacctggccaagaaacaagaagaccaggacaaggctactaagtccatgaaagagctagagaagctggctgaccagaccacgaagtctaccaatgattttgcggtggcgatcaacatgttcagtggcgcggtatcgtcgttcgcgaatgccgttgacgagcgccaagcttgggcagcctgggcgggggaaattggtcgggcggtcggcatgggaagcaccgcgccgacttcgcgggccaccggcgtctatccgcacgcgatctatgatcagtcgaagagtggcgcggccggacaagtcttcggcgagccaatcggcgcccagtctcttcgcaatcgcatgttctcgccgcagcgcaaggccgagccggtcaccgttccatcgtacatcaacgacatcatcaaagatgcgtcgaagatgtacaacattcctgagctggacatcaagaaactcatatacaccgaaagccgattcaacgccagggctaccagcgaagccggagcgaaaggcctcatgcagctgatgccggaaatcgccaaggcgtatggtataactgacgtatatgaccctcgccagaacatcctcggcggaacgcgcctattgcgggaaaacctggatcgagccaatggcgacatgcggttggccttgacctactatcacggcggcctcgatccgaagaactggggaccaaggactcgcgcatatccgggtttggtgatgagcgctccaatcgagctgatggaagaggctcagcgcaagcagaaggctgcggccatgaccgtcgccaacgagacgttcgccccggaaggcggcgacatggacattcgtccctatgatggcgggcgactggaaaccccagaccagggcaagaaggaagatgagcgccgcgaagcccgtcgatatgacgacagggttgtgcgaccggaaattcgcatcatcgaccgcatgccagaccgcagcgacggcgaaatcctcaagatgtctaggcgtcaagaggccgaccgggcagattctggattccggaagttcccgaatcaagttcgcggcgagaccaagcagaacatccaggctcaactcactgcaggagccatcgcgcaagtgatcggcgttaaccccaaccagatcatgcgccgcgaaatcagccgttctgacttgctgttcggatacaaccaagccatcctgggcaagcaacaggagatcaaggccgccgcgaccgaagccaacaacgtattcctgtctccagccaagcttgccgaagccacggccaaggtgaacgccgcatcgcgagaaatggatattctcaggacgtacggcgagcaacttctgaagagcgctccagagcgcggccaggagctgaccatcggtcgaatcgatatgttggtaaacgttaccggcgcgaattctccggaagaggctcgcgagatattcagtaagcagactgcagaccagctgactacggcaatccaggacgctcaaaacgattccgcaactaagatactctactgatgaaaaagagaattctgcgagtaacattcaacatgccttatggacccgaagtcatccgcgaagatctggatgttcgggtccggattatgaaggctgcgttgcggattcagaaccgggcgacgatggaaattttcggcctcaccactcagctgcgcgagtctcttctgtcgcagttcaccgcgtggaagcaccggcaacgtcaagtgggcagggaagatgaattgatgatcaaggtgtcggtggaagccggctactctgaccaggggcgcgagcaagtttccagagtctttgtcggcgaagtcgccattgtcgatatcatttctccgccaccggacattggaatccgcatccagtgctataccaggcaaatcgacaggacgaagaccattcggaatatgccgccagccaacacgacgtttgtcaagttcgtcgagtggggcgcgaacgaaatgggattgaacttcatttgcgataccagttacaacgatcaagttctgaagaatccgggccggtctatcactgtcgcgtcggcaatcctggcgtcgattcaggatatgtacatgccggacgtggccgcgttcgtcgatgatgacattttgatcgtgaaggaccgcgacaaagtcattcgaccggatgaggtgaccaacgtcaactcgttcgttggaattccatcttggtctgaatggggcgttgaattccagtgtctgtttgagccatcgattcgcgtggctggaggcgtggcggtcgaatcgctcatgaacccaagcgtcaatggcaactatgtaatcactgctctggaatacgatttggccagtcgggatcggccgttctatatcaaagtcatggggagcccagcagcataatggccagggaaatcaaaccgttcaacatgttcggcgttcactatacttcgcggcaattctctgctgtcgatgggctcagcatgatgtcggaaattcagagtgtgccgccagaagaactgctcaagggaaccagtgtattggcgcatccggaagaccatccggaaggcatctggcttccattgactgctgcgaacatcaatctttatgtcgttgatcgagcgaaagtaatagctcccgtacaagttcttgcacttctgtccgaagtggtaatcgactggaactttggttttctcaaagactggaccggagtcaagattccatccagatttgtcgaagatatcaaaagcgtgaagacggcacattcaccttctgtagttgcgagcttggtcgcgaacggctcagcctctatgcgcgagttggaagagtattattcgactcaagatgcgtttaagatgatagacatcatgacggcgaagagcgtgaacgaggccttggcgtccgaagcatcgcacaacagaatcaaaaagggataattcctaaccgggcctgggaaggctatactagacctgccaaatcagaggctttcccatgtccaatatttctctaacatccgcaaaagctcccgacaggacgcgactgatcgccgctcttgacgctcggtcgcggcgggatgctctagatttcgaagtgatgataccggctcaggttgttcaatatgaccgggccgagaacatcgcgacgattcaacctctcatcacctgggttgacacggaacacaacgccgtccaaaggcatcagctggttgatattcctgtaatttccatgggggctggcggcttccacataagtttcccgattcagcaaggtgacataggctggatttatgcggccgaccgcgacacgtctcagttcctggagtcgttgtcaatgtcgaagccgaacaccggccgcatccataagttcgagcatggcctgttcatcccggacgtattccgtcgatacaccatcaattccgaagattcggccgctatggtcatacaatcgacttccggagcgaccagaatttcgattcgcggcgataacatcaagataactgcgccgtcgaacgttactgtggatactccgcaggcgaacttcaccggcaatgtgactatcgctaacaccctggtcgtaaacggcatcaacgtgaacaaccacggccacctcgaaaacaacccgcctgatgcccggacgaaaggcggcatgattgcttaaggagattttcatggcaagttttgatttttctgatttaacagcgggggggggttgtaatggctaactacaactacatcgtcgatactggtgtgatagtcgcagataccgccgacgttctgagcgacgttgaggccgagttccgcgccgccctcggtgccaatatcaacttggccgcgagcactccgcagggatcgcttgtcgcggccgaggccattgcccgttccagcgtcatgcggaatgaagcgcgaattgccaataccataaacccgaacgtttcattcggaacgttcctggacgcgatctgtgccttgatggggatcgagcgtggttctgacctgtcaaccttcggctatggagttcaagtcaccggccgcagccaaacccgcatttccacagggtctagggtccagactccggccggcgcgatcttcacagtgctgagcgatgtcacgatccctgctggtggtgtcgcgaccatcgatatcaaatcgcaggagtatggcaacattcctctgccggtcgggaatctcatcatcatcgacggcacaattggctggtccggagcgaaagtcatcgcctccactcgcgtcgatccgggcagccgccaaatgagcgatgcagaactgaagaatgcccgcgttaatcgattggccatccaaggccgcaactcgaccatggccatcaaggcgtatgtgagcgccgttccgaacgtcacgtcggtgaacgtaatcgagaacaacaccggcgccgttcaagtggtgaatggagtatcgtttacccttccgtatgctgtttgggtctgcgtcgccggaaacccggataaacaagcagtcgccgatgcgttgtgggccgcccataacggcggaactccatgggactatggtgcgacgaacaacggcgtcccggtggacggtccgaatggcgttcctgtgcgcgatccggcgtccggtcgaaagtatgtcgtgaagtggaccactccaattatgtacgatggatatgttaacgtaacagtccagcaaggttcctcctctgtagctccggaagccattcagaacgcagtggtcaattacgcccaggggaaagtggaaggggaagaggggctggtggtgggcgcgagcctgtcggcattcgaagtcgccggcgccatcgctcgcgaaattcccggcatctacatcaaactctgccaggtcgcgtgcgtcgcggctggctcgccggctccggcgccgggcgatttcacttcggaatacgtcatgagcgcattcggccaggctaccatttccgttggtaacgttcgggtgactttcgtatgactctgcctgcgtacaattcggacatccaacaagctctgaaatggctccataaccaggcgcctggaatcaccggcctgatccagagaaaggcgcaatggtatgacagattcagccgccaattctgggccaactgggagcgcgacgttttccacttgaaaactgccaacccgttcggccttatggtttggtgcatcatcctcggcacgccttcgaaagggttcggcctttatccaaaaaacagttcttgggcattcggtcggctacgccagaacttcatctatagcggtacacaagttccgccaccggcagacgcatcgcctggcggcaacttctacggtggcggcaatgccgaaattctcaacttggacgaaatcaggaaagtgcttcagctaagatatgtagcgctgatttctaacggctcgattgcatatatcaatcgcatgcttcgttacatattcaatgatgatgagccatgggacgaggcgaccggtctgtacttctatctcatggactcaaccggcgagaatggccctgtggagaacttggcgatatatcggaaagattgggaaggtatggtgctgttgtccagttcgcccagaacgaaccacgtgctgacatcgacccctgccagcgacgccgattggccgggagtcgatccggccgcgagcggtattccggtaacggtcgaaacggcgtccgctacggccccggacggctccgctacggtgtgcaagcttactaagccggccgggagtaccgcttacgtctccgcgccgatagatgggccgctggggtccggtagcactgtaacgttctcgttcttcgcgaaagccggctccacccgtttcattgcaattcagtcggctgccgatttccccagtcgagccgatgccgttttcgacctggattccgggaacgtaatcagcgatcagatgctggacagcagcgtggtaagcgcccgaatgattcgtctggaaaatggctggtggcgttgcgttctcacgaccaagaccgtcagctcttcgttccgcgctgcttacgtcgctccggcagaaaccaacttcagctggattgattcgaattccagcgcggcgattgacgtgcttatctggggcgctcagatcgaactgggtgatactccaactggatacttggaaactaccggggcgcccgtaaccatgaccgattatgttttgcagaacgcccagaccggaacagtcaagttcacacagccccttccgaccggagtagaagcgtattggactggagactggaaaggcgggactgcagcagaaccggccagattcgcagtcgggaatgggactcaggatacgtttactctgtcagaccccgcatacatcggcctacccaccagtggggcgttcaagctagaatacagggttggtccggcgcttaatctgtcgccgcaattgatcaacctcatgaatgaccgggcagttggtattatgccgacttgcgccggttgcgatgtcaaagtcattcaggagtaatgacgtgatcacacccgaactgatccccagtccgtttgccgctcagggcgataaagacccgattccacaaacctcctccactggcttcgcaaaccttcgcgacggctatacgccggactacgaaatcagcctggcgtcgaacaacccgcaggccaaagcggtcgagcggaaaattcaaaaccaactcttcttcatcgcgacccagaacgcacaggcgtggcagcgacaaatggcgccgccgtggtttcagggcatgcctggcggctacgaacagaatgcagaagtcgtgcgcgtcggaaatgacggcataatgcggcgttatcgttccatggtgaatgccaatgcgagcgaccctctcagcagcacgacttgggaagaacaacccgcatggtcggcgatgcgctccaacatcccgatgccggccggaggcccaggcctatcttctggcggagaagtcatcacgaccggccgcaacttcaacgacctgttaaatgggacgtgggagttcttctctgattcagtggttatcgcttctcagaatgcccccgtatatccggcgtccgctggtgccgctgctggcatgttggaggcgaaatcttggatatccgggtccaatacgttctgcgttcaacgctacactgaccgcgtcgggaacgtcgctgtgcgcgggcttaatgccggggcatggaccaactggatgtatgctgtaaacgttatggccctccaacaaggtcgagtgacctatggagtcgcggccggcccggcgaacgcttacacgttgacgctcgttccgcagctccaaggcggcctggtggatggcatgattcttcgggtcaagttcaacaccatgaacaccggcgcctccaccatcaacgtctccggactcggcgccaaagccatcgtcggcgcggccaacttccctctcaccggcggcgaacttggccaaggactcatcgctgagcttgtattcgacgcagcaggcgaccgctggagaatcctcgcaggcgcgccacgcatccaagttggcaacgccgatcaagattaccaggcccccagctggaaacaggtgaaggattacgtcgcgtcccaaaagctgactgaagtggactgggctgacgtcgtcaacaagccgaacgtcgctatccaagacactacgccgtggttcgccaatctggagttgtctgacgctcggcctttcatcgatttccacttcaacaacaaccgcgccaaagacttcgactatcgctttatctctgaagctgatgggtcgatggcgttctactctcgccaggggtcagctggtcctacccaggatatcctgttcagcaggtcgaatgttacattcctccagccgcgactggatgttgcgaaaaacctcgcgtacatcgcgaactctggtcccctttggcagaacaccactgccgatcagcccggttggaagttcacattcgcgcaaggcgtggacgcgaacaacaacgcggtgatcgcagtcaataccaccaatcctgacggctcctatcgctcacagataatgcgttgggactgggcgtccacgaatgtaatcttcaacaatcgtccgcttttcgccgggcaatatgttccttgggattctggtaacttcgacccttcaacaaagttgacagtcaatgccacgaaccagatcgccgggcccaccgggattcggaacaccaacggcaacaccggcaatatgaacacatggggttccggttccacgacggcatcccatggcaatgctgccatccagatcttcgggaaagggggcggtgagcctgccgcgatctattttgacaactcccagaccggatggtatctgggtatggacaaggatggacagctcaagcgggccggctggtcactcggcaacaactcttatgtcatcaccgatgaattgaacatcagaaaccacatcaacggtatggcagcaaggccggtttggggcggaaatgaattctgggggccgtggaacttcaatccgaacactaagcttacgttgggcgcattcaacgatagccaacacaccaggatggtaaacagcgccgcgaaggacgtagggatagccgccatgacaagttatggcgacgcggctatgtcgttcttcaactatgaggcttcgacgccgaccgggaatcgtgctgctgtaatttcgtttgttcgtaacggggcacgaggcgttctgttcggcctggacacggacaacaagctgaaatggggcggctattctctaggtgccgtcgcgttcgagattgccgactccaacaacctcatgagcctgtggtcatcccacgctgccgcgccgaactggaacgggcagaccatctggaggtcgggaaacttcaacccagacaccaaggcgactttggcagctcgcaatacgacgtcatcccctacaatattcagttatggggcgtccggaatcgcatcaaccggacaggtcggtgcgttggttgtggaaaacaacagcgtcaccaataccgcagccgccatcacgttccattcgccgcagaaatatcaggtcaacttcggcctggatgcggacaacgtggtaaagatcggtggcggcacaatgggcggcgtagcatatcccatcatccactccggcaactacaacaactacatcaaccaggcgctggttcaggtaggtcttggcggcgtcggttcctacgcgatccttgccgtatttgacacctccgcgccggcagcgtccattgcccccggaacgatcatggacagttccaagctgttctattcgtcctgcgattcgacctatcgcagcagcgccagtccgacgggcacctggcgctgcatggggtatgtgtataaccgagactccaccaacggcgactcggcatccctattccagcgggtaacgtaacatgaaatggacgcgaatcagaaaccctcgttggctggatgagacaaatattcacgccatggttactttcgaggggattggagaagttcctttcaccgccaatccgcacgacgtggaggcccacggaagggccattcacgctgcgatcctgtccggggcgcacggacctatcgccccagtagactcgacgcgggagcaggccttgcaggacgctatacgagcaagggaaaagcgggctatccttcgcgatacccgatggcccatagatcgtcacgacgagcagaggcggctgggtatcgaaaccacggacgggcctgggctgatagcagcccttgttcactggaggcagcagattcgcgattggaatagcggggatcggccgcgacttcccatggctctgaaagcaatattcaaaaatcaggagtattgatgaaaatcacgaaggatattctgatcatcggaaccgggtgcaccacggatcgggcgatcaagtggctggatgacgtccaggcggccatggacaagttccacatcgagtcgccgcgagccattgcggcctacctcgccaacatcggcgtcgagtccggtggcctggtaagtctggtggagaatctcaactacagcgctcaaggattggccaacacctggcctcgccggtacgcagtagacccgcgagtccgcccgtatgtcccgaacgctctggcgaaccgcctggcccgtaacccggtcgccatcgccaacaacgtgtacgcggatcgcatgggtaatggatgcgagcaggatggcgatggttggaagtatcgcgggcgcggcttgatccagctgaccggaaagtcgaactattccctgttcgccgaagactccggcctggacgctctggagcaaccggagctgctggagactccggccggcgcggcgatgtcttctgcctggttcttctggcgcaatcgctgtatccccatggcggagtccaacaacttctccctggtcgtgaaaaccatcaacggtgccgcgccgaacgatgcgaaccacggccagctccggatcaaccgctatatgaagaccatctccgcgatcaatcaaggctcctgatattcaaccccaaagaaaaggccgcttattcagcggcctttttgctttccggctttgcctcttcaaccatcttgacctcaaccggcgcggcggactcctcctgagtgatcgagtccacatagttccctagtgaactcagaacgccgattaacagcgctctcaccaccttgtccttgactgtctcgcctatgatcttggtcagaacggatattaactcttcccggagtctggggctgattcttggccgaaagcgcttgcgatgctctttgcgtttcatgtttagtcctctgtctgcggtcttctcctcaccccgataattgcttggggatgctttgtgttaatcggaagggtcgggcgctattataacccgtcgaaaatgctagcgcttaactgtttaacgatacgcaccgcgatattaaatcgccttctttctggccgaggaactctggcggccgggtccggtctaaggcctaatttgtcgacatcaaaacgagaaaacccggatcgcctgtagggtaaggcgtccgggtttatttcgatctagtgtccgctagaatcagtggcttccgccccatccgtccagccagcaatcgaagacggcgtgtctcggcttgtccttggcgccatgggagaagtgcttgaatcggatgacctggcccttgaggtattccctgtcattccagcggcgctgtttctcgtcgtgggtcaggctggaggccgacacgttgaaggtgacgccaggccacagacgttcgttgcggcagacgaacgcaccgaccattccggacggcgacaggttttctgcgtggctggagcgggccgtgtggccaagttcattgatgaaagcttcattgttgttgtgcatcaactcttccacgtcgatgatctcagcttcatcgtagtcgtatcgcttgactttcacacagtgcccttccttggcagtcgagcgaccgaacttgtacagtccatcagcgcgcttgcccatggaaccttcgaatcccagcattgtgtggcggcgctcgacttcgctgaactgttcgatggaagtcaccagttcctgctcgaccaggtgaatcctctcatagccgaggcagtgacgaaggaagttcacgcgctcggccgccctggctaggcgatcttcggtcggtgcgcgaggatcggtgaaatcatcgaacacatggaaagaccagtccggctcaccgctgtggcggcgaagatcgccggacgacttctggaaaactttcgggtcgctgatgtcgccgcagaccagctcgccgtccaggccgttgaacagcttatcgctgaggtattcgtagatcgattgattgttctgccgcttgagttgacgggtcagcgcctcgccttcgaatacgaagcagcgaaatccatcgatcttcggtgagaaatacatcggcagttggccttccagcagcttcgggtcaaaattcgatgcgagcatgggtttcatacagttctccagaaaagaagcccggcgaaccgggctaaatggcggtaagccggctcagatggtttcgttggcgtggttcagttcggccatgatcgacgcatagcgctcgtccgactccttgatgaacacgccgtcgtacatgacgcctttgcgatccttgatggtgtcgtaggccgcagcgtagcaggcgagcatggtagtgtcgtgctcttccgtcacatcgaacagagtcatgacggccaagaccaggctcttgatggctaatccatgatttccgcgtgccagcgcgccggccagatgtccgaggtgctgcaaatcgtcgccgtaggtgggatgaacttcgacagtctcgctgaagacagatagatgatcgaacagattttcaccgagttgcgcggccatgatcgtggcaaccaccattacgtcgccgatgccgtctttcacctcgactggtttgttataaacccaggcttcgcaaacttctgcgaactcttcgaccaacttcaggaattgatccttggccgaagagcctttgatcaggttccggtcggaaccccatttaacaaccaggtcgtgaagttcgcgactcatgatttgttcgatattcattctttcgattccttttggatttgggattttactgcgttgattatggacgccgtgctctggcgcgatccatccttggtggtgccgaagtagaaggccattaccgacttcagctcggcgaaccaatagccgatgatggtgccgatggcgacagaggatgtcgggtccatcagagcctcgcggccgaatgtgaagattgcgatgatgatgagaatggagcctgtcagaagagcgaatgtaatcgccgggcgaacgaaatcgttctgctgcgccgcaagcctcctcgcagaatccctgtcggccgcctctgcggcgaactggctaagctcggcctggagctggttctgctcagactgaaggcgattttgttcggcttgaatcgcaagctcctggagacgaacgcgctcggcgctctggagttcggcgagacgcgctagagcttccggattcgcgtctagagcgctagcgaccgaggctgggtcggccttcgaccccagcgccgtcgcgacgatagcgcccacggcggcgcctgcaggcccacccaggagcgaacccagagccggggcagccgcgccgatcttactacctatgtctttccagtccatttcgactcctcaaaagaaaggcgccattacagcgcctttctccggccggtgatttagaactcttcggcttcggtcgcatcgccgacgccaccggcgtcactgcgaggctgttcctgcttgctgtagtccaccttcacctcgccgccgacgaacgacttgtacaggtcggccgcagccttgaagtgatccgggttcttcaccaggccttccagctcgaactggacgccggaccagctacccttgtcgttcgacatgcctacggtggtcatgcggaccaggttggcgaaagtcggcggggtgcgcaggccctgcggggtctgaacctttttctgggacagcgcggtcatgagcttcttcgaggccttgatctgcgaagacgacagggagatcagagcctggccgaaatcgccggtgtccggatcgatgacgatgacgtaatgaccacgggtgtcggcgaagtagtcagacttcttgtcgctgaccgaaccgtcttcgttcggcgcgtacaggcgtccttcgacttccttcaccttggtcgggtctttcatcatttccttgaagtcttcgacgctgatggcgcccttgaaaccgccctcggcctcgcgaccggcccagcggatgaactcgcggcggtacgcggccggaatgatcagcaggccggtcttgccgtcgtaaatcttgccggtgacggtgttcaggaacatgccggccttcgcgccttcgatgtacttcgggtcatcttcatcgacctggggagacatcttctgcagaacctggatgaaggggatggcataggactcggcatcggcgccttcgaagcctgcgccgtcatacgatcccaaatccatgaagtcgggaacttcggtagttgcgacggcgccgccaccggtggcaactgctacggccttggtttcttcggttgcttcggaagtttcggttttcttaccagccatgttaggctccttgtttgtcgaatttcagttatcgctaactgtgggtttataataacggaagttgcaactaagtaaagcaaattacatattaagatttgctctttttcaccttcggtttcgtgattttggcctctttgtattcgtgcacgccgatgaaatctggcagctcttcgcccttctccaaatactcgcgaccgaacgcctggagggtctggtagtggacatcgcggttgatggtggcgtcatagccggcctcaatgatagcctcggccgccttcttcgcatcttccatttcgccgcgaccgaattcggccagaaccttggtcttgatgatgccgtcgttgtcggtttcttccagccacttccagaacttcgatttgttctcttctttgacggaaatgatggccttcggctcgactttgaccgtgcgaccgtcagccagagtagtggtcttttgaccaagctcctccagcagctccggaatggtgttgcgcttgagggttttcagctcctcttccttttcggccagcgccttttgaagatcgaggatttcgacgtccagctgcgaagccttgtccaccaggttcagcagtcgatggccgatgtcggtggcttcaaccgccatttcatccatgacgccaaaatagtcgatttcgcccggcgcgttctctttcaagtattccgggatttcaagctcttgctctttcatgtccgcctccaacttagtgatgttcccttacttgaaccaagtattgagtagatattatgccgcatcttccttgatacggctactgatttacatattaaatttcgtcgcgagtgctaacgtcagcctcaaacacgccatcaacgacataacttgccaggttgcgtttccactccaagctgacctggattttctcgtcgatggaatccagacagatcaggtcgaagtacagaaccgagttgacggtgccgattcgatgatttcggtcttcggactgcatccgcagctcgttgtcttcgtcggtcgtgtagtagatggccacgtctgcggccgtgagcgtgatcccgatccctgctgcggccgggttgcccaggaacacctggacgcgcttggcctggaaatcgtcgatcaatttttcccgctcggcctctttggtctcgccgtagtaggtgccaaacgaaatcccttgggcctccaaatacgccttgatctggtcgatttcctgaatgcgcatggcccagacgatgatggaacgctccgggtcttcctccagcagaccctccagaagatcagtaaacacggcgaatcgcgggttgtcttcgggcggcaggatcaccggctcaccatagacgttgatatagccggacgcaacttgcttgagcttcgaacgcgctgccgcagcatcgaaagatacatccagcatgaaatcttcgttctggagaacgaagtgatagtcttcttccacgcgctgataaacctttcgttgctccggcgacatttcgaagtatatgcgcttgtacaccttgtccggcaggaatggcaatgcttccttcttcgtgacccggaagctgtgcggctcgatcagggatcgcagcttgtccaggttccggaataccgggcgcccataatcgtctttttcgacgagttgcggcggcatggtttgcttcccttccagcttgcgcatgatagcgatcattcgaggatcgtcactgggcaccaagacggaaaattcggccacaaacgcccgataggatttagtccccagaattccattccgcaagaattggaactgcatgaacaaatcggtcggtgcccgcgtcagaggagttccggaaaggatgcgacgggccacggccttctcgcccagctttacgatctttttcgcacgcttggcttgtgggtttttgatcctcgttgactcgtccacaattgcgcaaactttgaatgtatcaaggaatcgctcgacctcatcatagccagcctggtggttgattgcgtcaacgttgatggcgaagacgcgaagaactttttcatctgcgaacgtctcggaatacagacggtccaagcgcgccctggcctttttggaagtcggtcggccgcgccaatccacgctcaaagtcttgatcgcgacgtgggtgggaatctcgcgcagaatccagttggtgtggacgcctttgggggcgacgatgagcagcgcgtccacgcgcccctgtaggaagaggcgaacggcatcggccaaagtcgtccaagtcttcccggtgccctgctccatcaggtatgcgaagttccgtttgttcagggacgctgccagggcattgaattggtgctgcatggcctcggtcttcatgcccttgacgggatatgttttggctttcatttgttctccaaatcggcgaggaactgaacaatgttatccagtccttctgcatagctcgcaacttccaccaagtcgcggctgttaagctcgaacaaatcgaacataggattcagcagcagccaatcggttccgatcttggccaggacgaagccccggccaccccagccgatccgctcccgaagaaaagggatttgcccaggttcgaaacatctggccattgggcaggtggaagcgcgtttcggccactcctccaaagccttgaactcgacccagaactggacacctcgacgattcaggcagatcgaatcggacatgccagaccgccgcgtctccagaaagtcgatcaggattcggccgagcgagcgctgcttaaacgcattcgccgctttcgtttcgcgatcattcatcaccttcgccctctttggaaactttctctgcttgcgatgccaactttgacttctcgcgctcggtcaatatccgcttgacggccttcacgatgaacatgtcgatgccgctgagcctccatcctttgatcaggaaccaagcgccggtcggcgtcccttcagcaatctgctttccgtattgcagatatttttcaggccgaattctgaaacgtatcggctgatcaaccgagtcatcaacgcacatgatgtcgagaaactgcgactggcccttgtacaccgggtttttcccttgatcggccctcttcttctggcgaatcggttcgttctcatcggacagaactttcttcaccatcttgacgatgactaggccatcgtctccatcgcggatatcccgaatgttctgaatggggtttccggaagtcactccaaccagctccggattgtcataagcatgaccccagagcgtgtgagcttcgttcaagtctgcgaattgcacttcagaattcgacaaactagctgcgactttctcccaatcctgaagcgtcttcaggtgggtgcctgccagctctttatattgagccttcagctccttaagatcggccttcaactccttcagatcggccttcaacagtttctccagttctttgtcttggctgattttcgccgaaagaatctgggcttccagagctgctacatcagcagccttgtcctcaacatcctgtgccgatatcgggcaattggccagggcgatcctcgcggccttgacttcctcgcgaagacgcaggaaccgctcggccttcgccgggccgaagcctttggcgttcatgatgccgccgatcaggcgcccgtccgccaccacccagttgagttcggaatgctccgggtccagggccgtatattctacgccttctttggccaattcgcgaaggatggacacagtttgctggtcgtctttcgccgcccgaagacacgcggccgcgtattccaggcgatgatatcgcttcatgtagcaggtccagtacgtcaccacagcgtagctgaccgagtgggagcggttgaatccccaggcgccgaacgttaccatttcctgccaaacacggtgagcatcgtccggggcgacgcctatggtcttggcgccctcgatgaacaattcccggcgcttgttgaaaaattcttcgccctttcgcgcagacatggctttccgaatcgccgacgtttgttcccagtcgaactgcccaatgtccttcacaatggacatgatctgttcttggtacaggaaaactccatatgttccagacagatactgctcgacctgcgggatggtataggtcacaggctcgcgaccggccacgcgctcgatgtatttggtggccatgcccgaagacaacgggcctggacgggcgagcgccgttatgtggtcgatgttttcgaacgcggtgatattgatcgcattggcgaccgagcggacggcctggccttcgaactggaagatgccggacatcttgtcttcgttgagaatgtccagaaccgccttgtcgttcaacggcaagtcgtacagctcttgcgccgtcacgcaattagcatcttggatgacgcccagagttcgaagcccgagcgcatcgatcttgagaagattcagatattctgaatcgggcttgtcgagctgcgcgacaccttcagaagttaccgtgcagaagtcgatcacttcatcgttgcagaccaggatgcctgccgcgtggacgccggagtgggatgggtggatttcgaggtcgcccatgcaggcggacgcaatctcatacttttcacggaagtcgcggccgggctgagttttttcgaaagtatcctccaatccttttccatatcgttcgtccgccgatgtatattcgatgatcgagtttttgatgttgtcggtgtcgtggaatggaatgccgaagcgttttccgacgtgagcgataaccgacgcggccttgagtgtgttgatgttcccaagctttaccacgttccaagtgccgtatttctgctggagatattcgaacactaaatagcgatgggtatcggcaaagtcgatatctatatcgggaagatcggaacgggaaatgtcgataaagcgctggaagagaaggcgatgcgggagcgggtcaacctcggtaatgcccaggaggtagcagaccaaagagccggctgaagagccgcgagccgggccgaccagcatatgcttcttggcgaacgcaaccagatcggcgaccaccagaaagtagctgtcgaagtctttcagctgaatctgcttgatctcttcttggaatcgatcctcatactcctgggtccattccttgatgtggccgcgactgagacggtaggcttgcccctcgcgagccagcgcgacgatatccccatccaggtggatcataggcgccttcgccagtttcacatccgccaattgttcgactaccgcacgagtattggcggcggcggcatcgaactcttcgcgagtcatgatgtggcgtaaacggctccacaactcctcttcggtggcgatgtggcgaaggccgaccgattcccgcaccttccaggccgacgcgaaatcagcatggtcgatggacggcatgtcgttgtaagaggtaattaccaccggctttccgaatgccctggccgtctccatagcgccgtgcgcggcgaccatcgacgcgggattgatgtcaatgtagtcgattccggccagatccagatgggcataggcctcgccagcgaatttgatgacgccgtcagcttcctggaattcttgcggagtcaatccttgattctggaccgacttggaagtcaagcggtagaacttctttgtgtccttggcgagcacccaggctttgagcttcagctctttctcgccatcgtcggcgcatttgatcgggatttccatgccgaatccgcgaggcagttctgccttggtagcggcttgttcccaacggacgtggccccatgttccatcatcgacgatggcgacgaatggggattcgatctctttggcgcgctcgatgatctccgggaatcgaccatatgcggcgccgtaggagtaaccagagcgaacgcggagctgagggaaagacatcatgcggcctccattgcttgatacgcccgatacactcccatgcgcttgcagacttcgtggagcagccgcacgtcgtcgagcgcccggtgtttctgtacatatgggccgcagtagtgctcataaagatgttgcagccgcatgcggtggccgaacaacggcgccgactcttccacagtacagatatcgagcgatgggaaattgacttcgtccaggccgaacttgccgcgagccagatcgcaggccagcatgaacttatcgaatggcaggttgtgggcaatattcgcgtcggctctggaaaagaagtcgcgaactttctggcgctgatcgaggaaagatgggtgcttgatcaggtcttcgttcttcaacccggtgatcttggtgatgatttcctcgataacgattccaggattgcagatgaactctacttcatccaaaatcttttcgccatcagttatcacgccggcgaattcgattattctcggctgctttctcagactcaccctttggtggaacgggagtcctgtggtctcagtatcccatacagcgaatatcatgtttgttccctcttatgtcgaaaggccggctgctttcgcgaccggcctgaggagtataccgcgacggctgaagatttacgccttctgtccgtctttcggcgtgatgcggccggagcgcatggtggcgtgaacaaacgccgaatagttgatcgagtccaaggccgaatcggcatccttgaacccgctattcgccaggcgagtgagtttacccaccatgtgcatcacgaacagggcgagtcgatgatcatcggcggtcttcgccaccaggccgttcgggaagaggatttccatgatctttccgtacatcagatcattgcgaccataggtgctctggcgggcgcggaagacttctgctgcggcgtacagattgttgagaacatcttccgcgaaatcatcgggatgggaatcatcttcgcccggccagacggattccatggcgaacggcgcggcgtcttcggtcgggtctttgggctgagccgtttcagcgagcggagacggggctttcgcaaacgcctcgtcgagggtaggggcggagttcggggcggccgggaacggctcgcctgccatgtcgttgggcgcgctatcggggtcgctatcggccgcgacggcgaagaacggcgcatcgcaaccttccaggttcaggatgtaggagtcgatccccaggctattgtaggcatcgatgatgtcctggcgatcatcgaacgccgcgacgatcttggtgacgccttcgattttcttcaggatgtcgagcgcgactgcccgcttgaactgaggcgccggctcggtgttaccatacggccgcatgatgagttcatactcgcgatgttcggcgatgccgagttcgcggtggagcttggccctggtctggaaaaagtggttgtcggttcggccggtgacgaagaaaatcatgaggtcggcgtcgatggcattcctgatgcgacctacagcgtgcgggttgagagtgtccttgtcgagacgagaatgatactcgtcccattgccgttccaaggcgaagctcttgcggtggctatcgtcgaatacgcagccgtccagatcgaagatgatgatgccattcttgggtttgcgttccatattcagatttccttgatggttgctttctgggtgacggttttatcgatgaacgtcccatcagaagtgaggcggaaaacttcgccattctggctgaaatcgaacgattgcacgttcatcgtgatgcgaatggattcgctgccgttggtcacttcgacttgtgcgatgtcgccaactttctcgacaatgatcttcatgttacatggacttcccattaacggccacagggctggcctcttgtttttccgatccccagaaatcgcggcgcagttcttcctgctcggccgagcgatccatccatggacgatagaacttgcactgatagatcggtttcaccggcaactcaaccacaggaatctggccgggtttcgtctccagagcggacatgaagcggtcataggattgctcatgaatctcatcttcattcagaaccttcgatccatagcgcgggaaggcacaggagccagtagcgacacagtgcggctggagcagactatcgaacatcggatagacttccagaaccagtcggcgcatttcgcggaaggcttcctgatactccccttgcgtacgaacacacaggcgaactttcgccatgtcgctcagagtgcgcaaattgaacttggccgcgatcttcgtttccatgttggaaggaatgatggcacgagcatcctggagcgatgcgccggcctccaagagcttctggtaactggtctgcgcgtcggcgatggcatcgtgccacaggcggttcaactcttcgcgggcgtgataggtcgggtccggctcgccattggccgtagcctgctcatcgaaatcccagcggaatgcttccggctgaacaacggcgctaacctccagggcgcgactggtttcctgctggtaagcaccggtccgcgtccggacgagttggtgggtaaaattcttgcttacgccctcgatctggaaaatgaagtccacgaattcgaacggcgagcgaatggtgtccagcatgtacttccagtggtcgagcttttcggcttcggtcatggtcgccgggtcttggccgcgcatgcgggtggatttcgtccccaggaggagttcccaggcgttctgggtgtaactgatcagagaaatcttcatcagaaatcttccggaattggcgtgaaggtgaatttttctgtgagagcaagtgccaggccttgggcttgctccttacgaagtccatactgctccatctcttccttaagcagttcgcaggcctccagacgagactcatactcttcagcctcatgaactgacgagaagacggttccatcagaggttctgtatacgagttcaatagccatgatcgcctcagtagcagcggatgatttcggcgcggatatctcgacggtcgaggtagtgctcacgaatcttatcgcgggcgcgctcggcctcttctcgactgccgaacgacaggttgaacgaagtgaaaggcttatcgtccaggcgcccatcgccaatcaggtacaggatgcctaccagcacgaaagacggcgctgtctgtcgcgtttgcggcgggtcgatttgcatttctaggaaagacatgggaacctcttcaggatggtctggtgagtacatcaatagcgctcctgctgagcagctacggtttccggctcgtagatgagcatgtcaacgatttccgggcactggcctttcacccagtcgatggccgcgaccagtgtggtggaagcggagaaagagaaagtgcggtaagactcatggatgtacggcgaccccatcgaatcgcgctcggtcgtgcgagaaatgactgctttgatattaacgatccggcccatcttcggcctccactttagcgattatatctgacaggctcagcttctcgccattcaggaaataactggcgcgaaacttcctgtcaccctctggcccgacgatccgggccgttatggtgagactcccgccgccaagggcatcggtgtccctgaagaaagccagcagcgcccgcttgagcgctgcctcgcgaggatcgacggccattaacctaccacgttccagccgtgctgagcgcaccaaaccgcaccggcccctgcaggaaggctattcagaaggaatacaggggtcaggcggccatcctcggtcatgtggatgaagtagcgtgcactttcaccgagccattcggccttggcgatggcgcgttcaagattggccttggtggcgtaggtcttggtggtgtttttgtcggtggagaaggttacttcgcgggccattttgtcgattccttttggttgaagggtttcgcgtttcgatgagggaatactactctcacctgactcagaagtaaagcacttcgtgtcgattatttcacgaacatcttcttggccttctgataggacgaagaagtcatcaggcgctcgatgacatccatgtccgaaaccaggtcatccagaaggacgttgcgccaggtagcgaaccggccgagcgagaagatgccggcttcatgggtgaggttccagatcatggactcgcgctcgtcgcggccgagcggaacgattttgcctttggtctggatggtcggctcgccgtcctcgatgagatgccttttcctgatgccgaaggccgcgcaaacgtaatccatatcccagtcgctgtcccattcgatggtttcgattttaccatctaaagtctccactatccccttagtgatggattcgacgatcagagtatcaccggtgatggacgctcgaaacgttcccactttaggaccagggaaatacacggtctggaagacatcacaagggatggaaagcttgtatcgactcacgatgatggaggttccttcaccgaatgacgggtcgattcccaggtccagccctgccgcagccaggttggcgcggaatggcgcggtgctgatgacgttcacatggtcatcttgccggcgaagatactggaagaaagaggcgtcgaaaggacggctccaagtgatacgattcgcaagcttagccaccagctgctcatagtagtcggccggtgcgatccaacgcttttcagtcgccagattccagatggaccggtccgacaggccgcccgttactttcctggagtacatgttgcagtggtcgatgcgcggctgggaaatgaactcgccgtcgatgtagatagctttgtgtacagtgacttcgcggaacgggatgccggtgagttggccaatcactggcgagcggaatcgcagaagtgcgttgtggcgctccttattctccggcgtcgccgcgtcgatgatttgggcttgaggaaagcgatgcgcggcgatcagtccagcgagtccggcacctacgatgattactttctgatcaggaatcatgatatgttccttatgagtgtacaaaacttgagaggataaaaaagggacccattttcatgagtcccttgaagagctagacgattcaggctcagaggagcggcggcttactcctcctcaccttcggaaccatcggcgccctgatcttcaccgtcgtgctcctggccttcgtcatcggccttctcgtcatcgccctggccagcttcgtcttccttcgaagcgatggcaaccagatcgacccagcccatgatttccagcttgctcagatagctgcgaaccgaggtgccgtacagcaggtgggccaccttctcgccgaaggattcgatttcgaccggctcaccaacggtgcagtgctcgttgatgtaagcaaacaccttgccgcgagtcgagaaggcctgcggggttccatggccgtcgccggtcgggatgaagtgagtggcgcgggggcgacgcgagccgttggacttcaggtcttcgcggcgggcttcggccttcgcgcggcgctcttcctgctcttccttgcggcgctgcttctcggcttcgcgctctgccttcttctgctcggccaggcgcttgcgctcttcttcgcgtgcggctttctgggcttcctgcgcggccttcttctcttcggccttcttggcgcgctcggcttccttctcggccttcttctgctcgcgctcggcttccttggccttcgccttctcggcctgctcggcttccttcgccttggccttttcagcgcgctcggcttccttggcggcggccttttccttcgccttctcggcgcgctcggcttctttcttctcgcgctcggctttgcgcttctcttcgcgctcggctttcttctgctcggcttccttggccttggcttcggccttctcggcgcgctcgcgctctttacgttggcgctcagcggccttctcggccttgcgcagggcagcggcttgttccttggtcagctcttcgccttgggtctgttcgttctggtccttctgttccatgttcttactccgggaatgtttaaagggatggcttattggcctgtgaggggattatctctaaactaattgaagaagggaatacccttagcctgaactttcctaaatattttctttcgggaaagtccaaactctagggaacttatttatgttcgagaagttcctagcttttacgcaagaacagtaagtattcgattgcgcgagttatcccagtatacatcaactgactataagggatggacggcaagttttcttctaacatggcaacccgtttccattctgaaccctgcgacttgtggaacgtcatcgcccagccgaagtcgaatccgccaatagccttctgcgcctccagccgcacgtcttcctcggccgaaaagctcaaaggattgaacttcacccagcgctcatagttcgtgccgataatgcgaactttggcgaacaacatttcgtccggctcgtcatcatcctcttggccttcggggaccggcttgagttcgagcaggatggcttgctcgccgttcataatgccatattcgtgctggttcccggtgcaaaccagcttctcgccgatttccggttgtccacccttgtagccgaggatgcggcgcgccctggcgttcaaacggcggcgagtattgttgtaggcgcaaaggatcacgccatcatcgtccaagaacgtccgcatttcgtcgtccgacatgtcgaatccggcccgtaccagaatgtcgtcatactcgcggcagggtaggcgcttgccctggcggacgaacatcgacgcccgaacgatattgccggcgttgcgctcgatttcggtcatgatggtgtcacagctgttctcatggaaaatctggacgccgcgcacaggaggaacttggccaaagtcgccaatctccagaaccggaattcggtgcgacagcaagcgctcttcatcccactcgccgatcatggacgactcgtcgagcacgaccaacttcggcttctcgtcgagcgagtctttgttggcaaacatgatttcgccgtcttcatcttcgccaatcggccgatagatgaagctgtggagggtccgggcattggtgcaacccttctcgcgaagccgcgctgctgctttcccggttggcgcgacgaagaccgtccagtccatcgagcagcaaagttcggcgatgatcttcgcgatggaggtcttaccagttccggcgaaaccagcgagtcgatagacctggcggcggtgcgctcgatcacaccaaccgcgataccagtccacaacggaattgatcgcgtcgatctgctgactgtttggtcgaaagccgaatcgctcttcgatctgatcgacggtgaagttagatgctgacatatttgcgttctccaacgctaggtttaattgaatcgaggctcagtttaagcacgccgtccacagaccagccagtatcacgacgatacttgcggccttgcggatcgacatagaagttcttcgtgcgccgcagcagaacataatgccaagcagctccaagcgcgtggacccttcctttatacgggaaagccttcgcctgctctgcggcctctttggccccagggagccagcggacggtagaaaggaccaggaccgcacccttaatagcctgggaagcggcgcggccgtcctgtgggctatagcgatgtctatcgaagtctacccagtggtggttgccgcgccggagcttgaccgttcgggatcgcccctcgaacaccaccgtgccttcgtgagtaaaaatatgttccgccatcgaatgttcctttataacgtacagttatgctttacctctgcgcaggaagagtatactatcagctgactcgccaaagcgagcgaatttaatccaactttacttcggcaggaaagtggccgatactagcgccgccgcctgtactgccctccaaaacagaggatacattaaatgcaagaatgcaagatttcccgcgaccaactcccggtcggtaatccgaatcccaatgtcgacaagacccgcgacccgaacctgaagcccggtttcctgcgtcgcagccgcgagctggaaccggcgctggcagttcgcattcgtcgcgagctgatccacgccgaagcgtccgacttggccaaggccggatgggtcaattcacagtccagcctctatggatcgaaagccttcccgcgccattccgtcgttcgcgttaccggagttccggaagatggagctttcatcggcatgctgatcggcttcatcgagcatcgcgagcatggcgaatgggcggtcatggaagccggaacgaaagaaggcggcgcagtcatcatcccggtcaatcacatcacgcgagcgtcattcgccgaagccgaagagttcgccgaaaagtgggagcggaacttgggctggcgcctcctgcgacagctccgcgagtgcggcgccctggccgggactgaagacgagttcctgcggcggatcatcaatcgatacgttcgtgatcgcacgatcctcgatcaccacaaagtcggcgcggacaaaatctatactgatgcagtactcaaaagcatcggcgaaacatggccgaagattccttcggggaaattcgtcggacaccgagtcgcgcagctcctgatcggccacaagctaggtcgagcggggaccattctgaatgacctggtggacttcctggagaagttcgcggccgggcgcgataaaattctcaacatcgccatctgtaattgaggtgaatgaaatggttgacttggaaaagctgagtccaaagctgagtcctcggcagcatgccgttctactggagatgtacaggcatcctgagcatccagttcacagatcgccaacgaatttaactcttaaggctttgagacgaagggggcttgtcgagctatcctggaaggattccgtggctggatatatgttcggtcgccaaccttgctggaaaataactgatgccggcataaggcgaatcctgggagtgctggggaataatatggaaaaagaacaaagcgaagatcgcccaagcatccctgagtttgagaagaccgacgccaacaaactctatgatgctctggagacgatttcgctgctggagaagaagttggacgaatccgaaaagcgcgggagcgagctggccgcgagctattgtgacggcgtagtcggcgatgaatacggccatccttattgccgttataaagtggaacgcgacgccgccttggccgaagtagagcgcctgcgagaatcaaaaggcgatccctctggcagcttcgacaggtgtatgaagatgatgtacgagcgcgacgagaatgcaaaacgactcgacgccgccttggccagggtcgcggagctggaagggaagttgacggactgggtgcacgaagggttccggctcaacgaggcgctagcggtcgccaaggctcaacccagcgtgccggaaatatctggcatcggtcgcgatgccgaacatcccagagctgtagtgctgtatctgcgtaacgaacccagcgatgaagatatgcgagcaattcagaactttttgcgcgccatggccgcccccgctcagcacagcgtgccgaaagcatggctcgacgttcaggcagagcgccgccggcaggtcgaggcccaggcgctaaggcaggaagtcgcagcactgcgcgcaagggcggatgttgtgccggaggtattcgggcttgagcggtaccgcgtagaaaaaactgggaagggtttctggccatactgcgtgcgtgcgggggatggaacgcgtgaactgttcgtcggccacttgaagcagtgtcagcgggtagcgaccgaattggctacggcgtttgaagatgggaagtttatcgccgcgcccggcagctcggctcagcacagcgtgccggaggggtggaagctcgtaccgatggacccgacatcgcagatgacctatgtcggtcagtccctgcgttatgacgcggtaaacagcatcggcgagatttaccggcaaatgctcgccgtagctccctcacccatcgatccggccgcgcatcctcagccgtgccagcaaccacaggcccatcctgcccgctgcgggtgcgagcggtaagtgccaagtaaggaattcatgtaatggaacagaagaaaccttcaccagtagatggagtcatcatgaccagcctcgacgttctccggaaagcacagcccgaagcccaggacgagtatgccgtgtccatgttcgcaacggcgatccgccagaaaatgcagcgctcccgcgataaaggccgaggcggctggatcgactgcgacgaagatattctgatcaacggattcgccgaacatgcgctgaagggaaatgagaacaacctcttggacctggcgacgttcctgatgttcatgtgggtgcgcggcatcgacgatgcgaagattcccccggcgctcgaaaaggcgcggcagcacaagatcatggaagcatggagtcgggtccacgaagatggactaaactccgccagaaaggcgagtgctgcgcgacagttcgtggaagtgcctcgacgcaaggggcgcccggagcgacttgcatgaagcctcacgaaataagactggcacaggccgaagagttcctgcgcgaactcggccgagggattccggacgacgaacgggtgatggtcggctacgctgaagaggccacagtccaaaccgacgagaacggtcgcaagctcaacgccggctggtggcctgtgccctggaaggaagggaaatacatcaactcccgatccaacgcctacgcctgtatatcgtcgtccatcaagacgcccaacccgaagaccggccagatgcgatactggcgcggcgaagcctctttcggccacggcctagcgttgatggttgatgacatcggctccggcaaagggtcaaagggcgacttcgaccgcgacgagttccgcgagcgacttgagccgaccgcgattgtggagacttcgccgaacaactaccagttctggtatttcttcaaagagccgatgtcccacatgctccagttcaaggcgctgctctattcgttcgtggaccaggtgctaaagaaaggcggcgacaacaccgtcaaggacgtcagccgttacggccggatgcccttcggcttcaacaacaagcgcgggaaagacggcaagttcaaatatgccgacgaaaacggcaagcccgaactcgtgcgactgttcagcgccgactattccaagcgctactcgccagaagagatcgcccaggcattcggcgtccgcatcatcatgccacagatgaagaaggtggagataaaccgcgacgattgggtgtatgaccaagtatggctgaagtatgccgagcacatctgcacgaaatacaagatgggcgaagcggcaggcggccaggtccagcagaatatgtccggcaaataccgcatccgctgcccgtggggagacgagcacaccaacggcgatccattcggcgcctactttcgcggaccgatccctggagccgagcacgaatatgtgttcggctgcggccacgatacttgccgcaaagagcatcgccggacgtgggcggccttcacggatgaagtcgtgctaccctatatcgtcgaacaattggaaagaatcaaccgccgtcatatcggtgaggagtagacaatatgcaaaacgatcctggaatcctgattaccgccatcggcttgctgttcctcggccttatcatcttcttcgaaggcctaaagggatggaaaatacaagtcgcaaacttcctcgcgtcgcttctgtgcttcttcttcggcctttctgctttgacgttctggttcgtcgttgcgtttgacgtattttaatcgacgaacggtacagaaattttcggatggggacggaacttattagctatgccggtttaggtaggagataatagccgtccctttcgcctcaatgtgtagaggcaatgttgaatccgatcatgtaaagcagaaggcggcaaacctaacatgattatcgacgaagataatatttttgatgatggcgaatcagggtccagtgagtttgatctcacgcagatagaagatgctggaatggaccctttgatgaccgccgcgagcaaggcggccgatgatgcgattgcgaggaacgaaacgcatcgcgcgcaaaaggcggcaagatacgccgaggcgtatgctgaaccagacttgaggaagcgagcgcggttgttgatgctcgaccaggcgttcgatcttccggtcagccgggtggtgaaagggccgttcgatgacttcatcacgaaatacagctcgacgtcagacagcaactacctcgcggtctatgatacgttgttctgtaagggcgacggaaccgtcccacacccgcacttcgacgagtttcgcggccggctggtggaccatcgcggcgtggcgttcaacaacaagaccctcgatccgattgacctgatgggcgccctcgcggctgcggccttggacgatccctcgattaagaagacgattgagacttgctgcgtgtgggctcgtcgatatcgccgcaactctctgatcgagacgttcgagaagaagataccggagtgggatggtgaagagcgaatcgacacgctgctgatcgacttgttcaaaccgttcgacaccgaactcaaccggatggtgagcaagtatttctggctgagcttgtactgccgcatcaactaccctggaatctcggcgccgatctcgttggcgttgattggtgggcaggatgcggggaaatcatatttcggcttgctgatctgtaaggaactgtccggtgggcgcgatctggctccagttcagctcgacctgagccgacacgaccagacgccgttcctgcgcaacatcaccggcaactcggttattgcgaacgtcggcgaaatgtccggcttcaaaaagggcgacatggaacgcatcaaagaattcctggtgcgatcttcggatacattcgatcagaagtttgagcctggcgaaacgatcaagcgacaatggatcaccatcatggacggcaacggatacgatggactccagcgggacgactccggcaaccgtcgattctatccgatgttcgtggcacaacttcccgacgaagatggaaagccgaactgggttaagccgggcgatggtaatgaaccgttcaaggtggacttcacagacttcggccgcaagttctggcaggctatggctgagtgccgcgcctggatcgaagagcatggcgtcgatggatacctgaatatggtgtcggaagctaaccgcgaagtgcagaacttctctatttcggaaatggagaatgcgcgtggcgtggttcgtgatgatacgattgacatgtatctgatcaacgttctgataagttgcgagttcgaagagatcaagccgggcaagaattccaagaatcctgggtggagggctgacaccgtcaccattctgaaatggttcgatattctcgccaggaagaagccgatttctcgccacttaactccgcacctgaaggcgctggggttcgtcccgaacaagaacggcctggctggttggtgcctgcccgtcgataaggttgcgcctggatggacgaatagtatgcaaaccacgctgccgccgttcaatgatgcgcttgtgtacttgctgaggaagggcgacccggatatcactgatgaggctgcaatggcaaagattcgggcagtccgggccgagcgagccaagattttgggcgaggatttctgatgtagtggtggagtgtacttggattaggccgccttcgggcggtctttttctttggtgcggcgtacattagattccggcgttgggcgggattggtagaagtgaatacagtaatttggaccagtttcgagcgcgaataatggaaagtcgatagattttcggtatcggtttagcgtgtatggtggatggattttgcgtgaaatgttgagaaattgcgtgtttgaggtggacttttcgtgggaaatagccgcaaattactgtatagcgattctgagcggtaatttgggaagcctactgccgcgtgggttagcgggccaatttcctaatttccggtttttcgagcatgggttaaaactattctacagcgaaaat

SEQ ID NO: 35 - DNA, 67394 bp, synthetic construct
  source 1..67394: mol_type = other DNA
cgattgcacaatcctaatagaaaaaatctatcacggacgttacctatctttaaaattaataaaattaatagtaatttggtaatttggtaaactttagtatttgaaagcctcgcggcactaagcttgtacatatcccgtcaagtttccgattccagctagctcgcggcagggtcgccggaaacttccggacttccaatccatgggtcgcggcgacaccacggcggactaagcggcaaggaccaaaactcgacgaacggaaccggaaatttgggagcgcgatagaatcgctcagctggacatatttctaacattcgatttaacactcaatccaaacactcaccaccagcgtctcccgccaaccgccgattcgatcctcacccaccagcggatcgcccgtataacatcctataacaccacctaacactcattcatcatcaaacccacccagacctacagcccacccacaagcagcccatagacgcgatccctggccccatagtacaatcgcgccatactcagtgtcgcggcagagcaccaggggccatccgccaaccaagccaccacgacgactccagaatcgaactccagggacgcagcaccaaatgaccaaacactacagccccgacgatctagtcacgccacaggaattcgcagacccgcatttcgcggcgatcaaccaaaagcgattcgacctgtacatcgacctgcgcgtccaaggttacagctcctggcgggtcttccgggccatctggggcgaggagcatatggacggtcccgcgcaggcccgcatcttcgcgatggagtccaacccgtactatcgcaagcagttcaaggccaagttgaacgcgaccaaaacgtccgacttgtggaacccaaagacggcgctccacgaactcctccaaatggttcgtgaccccaccgtcaaggactccagccgtctgtcggccatcaaggagttgaacgttctggctgaaatcacgttcgtggacgagtctggcaagaccaggatcggtcgcggtttggccgacttctacgcatcagaagccgaggctcagaccgcgaccgtcgctgctgcggccgaagccaatggctatgtgccggaaggcgaagagggcgatttcccgtccccgacgccggaaccgaccgaggaagaccgcgccaaccccatttagacataaaataacggctaaggatttaaggtaaggaggtttatttatgcaggataaaaagtctaaaagtaagactgccaagattgattggtctcactggacagtgacggtccctgaggagaacccggacaagccaggtaagccgtattcactgggttatccggagattctcaattatgcagaggacaaaatcgcgtcaaaatacatgtacgacgatccaaaggacaaaagtgtcgtgttctacgcattcccgtccggcgtgactaccgctaacacccattacagccggtcagagttacgggaaactatggagaccgggtcaaacaaagttaactggaccttcgctaagggtggcaaaatgcgtggtacttacgctatcgacgacatcagcaaagagccggatggtaagtattcccgcgtaattatcgcccaaatccacggcgtactgaccgacgagcaacgtgatcttattgggcaaaaggacaataatgcccctccgattctcaaggtgtactgggataaaggtaaaattcgggtaaaaacgaaagttttaaaggacctgaacgccccttacaaagagatgcttctggaacacgcttggggtgatgacgaaggccggaactttaaagagaagattgacttaaatacacggttcacattggaggttaaagtgagcgatgggcggatggaagtcattcttaacgacaccgaaagtttggtctatgacgacattcacatgaaaaaatggggcattttcgaaaactactttaaagcagggaactacttccagtctaaaactccgggcacttttgcaaaagttaaaatttattcacttcaggttacccactgaagaagcgacaaagccccggactctagttcagaatccggggctttctttttgggcgccttactcgccagcttcgatgatttcgaagttgtatttgacgccttcgtgctcgaaagtcatcttgccagccgccttcagctgcatgcggaagcggatgtgtttcgaagaaggcaggccgaactcgatgaatgctgcgttggtggaccggaactcgccgcgcttgccttttacagtcacagccacgccatggcgctgggtgcgtttcttggaaacttctgggtctttccaggagttggcgatggctgccgacaaatccttggcctctttggctttctccggcgcgttcttggcctcttcgcgcatcttccggatttcttccagcgcttcctcttcggtgacttcttcttccggcttcagattctcttcctcggccttctcttcttccttcttcttggaagtgcgggtcttgtaaaccttggccggggcttcctcttcctggaaggcctcttcctcggccggcagagcattcaggatggcgaggcagcgacgctcagcagtcttgcggtcagagaagcgcttgacagtcgcatcagcgttgtgagcgttgtagaaagcgaccagttctttcatttctgcgttctggatgtcgccgaaggttttgatggagttggtcatcttgcgatcctctgttttggaagatttcttttgggcttcggtttgtcgcccccgttgaaagagattatgcctaggtcgatgctgcgtgtctacatctatttcatcagattgatcacaaagccgacgaacggttgtcggatgtgaaaacaccgcagagcaggctgcggtgtttgttggtgagggcgatggtcagaaagtcgggatcgtgatcggctcgatgggcggatcgccgggcctgtcgttgtccgatgcgggcgccgggttggacgggattgcgccggaccgaagctccagagattccgactgcctgctcacctgcggagctggaggcgcctttggcgcaggaggagcaggcgggaccggcaggcctggaggcgccatctgcgtcatgggcggttccggaagatcgggaaggcttggcgctatgctgccaaaggaccgctgcgactgctgtgccggattttcgccgaacatttcggcggatcggttgtccttgatgacttgacctatggccgtcttgtcggcgcccggttctgccggatcgaagccagtgaatggagtggttgtgcagcgcatgttcggatgggtcggcagattgttcagggcgatggagtccgcccagacgtacgggtttttatgcttgccagggctgtggctgatgatctcggcaggaatgtgaccgttcctgttcagccatctcgccatctcctgccgattcagagggctggccacgatctggccagtggaatcttcgacgatagcgaacagatcaccgagtttgaatccgatgattgtgtagttggacctggactcgccgacgaaagccagggtttcgatgttgtggtagatatcttggtcttcccagatgtacagcatggttcactcctcaataaggctgcttgttgtgttcgaccagagacataccggccggaactttgaagcggatgtattcgatcatcatcgcggttcggcgtttgttggcgccggattcgtcgttgacgaagagttcgcattggtgcggaatgactcgcgtcaccaggtcttcgcctttcgaaccgtagaacttgatgtaggctgcgacgcctcgcgtcatgctcagatggatcgtttcgcagagtcgctgcgcggccgacgcgctggacagatcggtcggactgaccgtcgcccagtaatggccactttgttctttatcgggcataagctaccctccaatgagaaagcctctgccgaggctggttgttagtcgagccagtcagtcgtacttcctgccgtgaaatgcgtgtccgcagccgaagattgatctgtatgcgttgattgaattcctgttcctttcagattcgatttgaatactgagcatctccagctcgtatcgggccagtccgccccattcgcgctcaatgcgtgaatactcggcctccagttgcctcaatcgttcgctcatataacctccaacaatcgtcattaatcgatcaacccctgccgaaccgcagaggctggttgttaatcgcgcttcagcaaaaccactttctcgtttgcgcgatgattcctgtgccagtcttcccaatagtctccgcactgacgggccaactccagagtgacatagccgtcgtcgctgctacattcgacagaaaggacaatcgcgttgcctctggactcgctgccagacccgaatccgatcagaacttcgtcgccagttttcagctcatctgccctgattactttggccatggcgttctcctattgggtagcgccgcgagggcggatcgggtcgatgtcatgtaagcagatggtgggatagtccctggccagcttgagcttgaagtccacccagtcagcaccgatgagcgccgcgacttcgatgcttactttgcggtgcggcgcagctccagatcgcaggactatagcccgacgccgaacgggatcgttgacgtcaacatgcgtgagtatttcgtcgccgacgagcaactcgcaagccatcaatattttggccataatacactcctatgaggaggcgcgcccaggacgatcccagccgcgccgatggattaacgtttgtgaaggatggacactgcgtccacgtcgaggatgctgatggtacggcgacggcgcggattgctgcgttcatggatgcgaatcaggtcagcggatggcgcttcgtgcaccacccatacatcctccggcttctgcgtccggagcaggaccgtcacttctgtgttctgggcgaggccgttgcagatgaacgtgaacttggacgagggagttctgtacatttcgagattcctttttggacttcgggtccggctcctcagccggtgaagagattatgcctgatcatcgcagtcgagtaaagcacttgtgtaccaattctccagttaaatggaaccaaagcgcggtatcgctgattgctacgctcccacgccatggcccttcttgctcacagacttcgaaccacaagctgatttccattctggccaggactcggccgaaggattcgagccggcaccggctggacagaatgtcgacattcacccgtcgattgatttcgtaccggcgaccgttgatgacgaataccaagcgtagagtttgtccgtccagacattcccagtatctggtttcataccgaagccaatagcgcttgctagcagggcctaccatagtcatttaatcgatgctcctggccgcgccacgcggtccggtcggcgggacgggatcgaaccgacccaggatgtagtcgggccggcgcgcttcctgaggacacacggcgagaaggcgccatcctgcgtccagggcatgctggagttcgtccgtgcagcagtcttccttgagcagcagacgattgatgctctggagatttggaccagggatagcagagccggtgaccgagttccagccttcgataccgtgcaccatctgcggctggttgatgtagccttctgacctgccagccaaccggctcgcggccagctccaggcgctccagcattggccgcagagcggcttccgggtcaacatcgtcccagagcaggaccaggttgatgatggtgtacggatagtccttgtccagatcccaggccgaagcggtcagacggcccaggccgatttcattacacatcacgggaacgtcgttgctccaggtggacggctcccagttccgctcgccaggattcccgattgttacgccttccaggttccccaggagaacgtggagcttgctgacatattccgcctccaaggctttccgctcttcgtcggtctggttgtggcgatagaaggatggagggctgacttttgcatggtagagtttcataactgttcctcggttttggaaggcttgaacgttagagaattgtgtcgcagtatttctcgaaaggactctggcgcttcttctcgcagatcgcacaggtgatttccaggtcgggcagctcgctgtaagtcttgccgaggtacagccagcgcttgcacaggctgcgaccgtccgacgtgaagaaatggactttgcgagcgtcgccgggttgcgcccagccgccctgatagttttcgcgcttgctcatggcgatatttccttttggatcgtggatccatggtgtacgttcagtcacccaaactccatctacatagatcaggactgacagagcagtcgcgccaaacccgaagcctacatagaatgaacctggatcgatttccatggtggcgctattagtggcgctattgcaatcgacttcaaagtcgaatagcgaatgaccaatcataccatcaccatgtcgatttcattgacgaagaaatggacatcgacaccatcggcgctgccggtgtaacgcagccgagtcgtcccatcaatgtgggcctcctcgacgccgacgacttccaggatggtgtcgttgcagtacagtttgacgaacatcttgatgccagagccaatcgcctcgaaggcgatctgcttgtacaggtcttgcttgatcatgctttacgctcctgtttgcggatgtattctgccctggcttcggcttcgagcttcgcccaaagcgcgttgtcgactggaccccagggacctgtctgagttccgtccaccggtgcgaacttgccaccggcgcgacgatacttggacagagttctcagaccgatgattttctcttcttgggaatcgagttggacgatcacttaacatacttcccgaagtagcaggtgtggaggatttccaggcccttggaaatggccttcagcttgataccgaaattcttgatcgcccagtccagatcgtggtgatagaactcgatgatgttgacgatttgaccggcgctgtagtggatgacgcgaaccttgccattccagcggaaatcttcgcggctgtttacggcctcgacttcgatagtgtcatttctgccgatggtccatttggagctagtcatgtcgcaatcctctttttggagcgtttcgcgtttcgatgaggtaactatacttcagtcacctcatcgagtaaagcccttttgaacagattgcctaaaatttctggaagacaaaatcaatcggtcgcgtcatcgatagcgaacgccgagcgcgccaggtcgatgatctctggccaggtcaaagtgaaggttttgccgtcatcgagaatgatgatgggagtccgcagcggctcgccaaccagcagttcgtaggaatgtttctcgctggatgcggagccgatgcgggtgtggagggtgagttaggccggggaaatctcggccgccgtaaaggccgcaatgcgaccgctattcagcctgacgaacaccgggaatgcgccgccctcgcgaatctcgctgatcacgccgtggccgccgccttgcgcatagacattctgtccaacagacaattttttgaggatgtcgctaaaaactacggttttcatcgtcttgccctcggtgatgcccggcgaaccgggcggggtttgctacagcatgcctgctttgcgttcggccttgatggtgtataccgcctcatcgaccagccactcttcagcttccaggtaggctttggcgacttctacggttacgttggcgaatttggctacgttctggattttggcttgcttggtcatttcgatttccttttgtctgaagggtttcgcgtttcgatgaggtaactatacctcagtcacctcatcgagtaaagcattttcttcagattatctgaaaccttttgaagccaggaattgccgccagagccagtcgatgtgttcgttgcagtaacgctcgccatcggacgacatagctaaggcgccatcattgatgccgaagtgggccgcagcgagacattcgaactcgaactggagcgttcctgggcgagggatatgggacatggcgtatttctgcacggtcagtgatcctcagaaggtttcgcgtttgcgatagccgctactttctgcataccgaggcgatagaattcggcctcttccctggccttggccagattatccctggcttcgcacgccagcttgtactgattgttggcattctggatgcttccgtccagactcctgtccagttcttcccgaagagccttctgcgacgctagctcggcctccaaatcctggattctgatctgaagctggcgattcctttcagacatctcgttttcgcgggcgatggagttctgaaggcattcgtcaaggcgagtattttcgcgcaccagctgatgcttttcgactttcgcctttctgcacgtctctcgcattgctgaaagctcactcgcatgcagatcgtcatccgggtctttacgctcttccttcgactccatccgcatatagtactggccggctgcgaaggcgagcactgcctggtcggcatacgctgcggcatcggtcatgtatctggatttgtagcgaggcagaaacttgcactcctctggatcccagaggagactatcggcaataggccagaatttgcggaagccatcaggatcgacttctacattgaccatttgcagctggccggcctccacttcgacttccagaggaacctgaatggtgccggtgatgtactggaagtacactatgctagacataacacaatcctcataagaagttgcggccaggaccatcccagccgcatcgtaatcactcttcgccttcgtccgcgctcagccactcttcgaaggcgaaatttaccttcgactcgacccaatcctgcagctcatcggcgaactcgtcactgtcgatgtccatggtgattcccataacttccatgttccatagcgcggcattcagttcgaactgtaccatctgctcgccatcgacttccaacaggatgcggtctgcgacttcatagtcgtctacatcgaacagatggccgcccgccaggaggtgctggacgaaagcttcatcgaggttggtgacttcgatctggacttgtttggtcattttcgtatccttacttagcggctttgaattgggctttgaggttggcaagttcagctttcagatcgatcatcgcctgaccgcgcaggccttccatttcagcctcgctgattgcgatcttggctgcgcggattttgtcgttgatttgatctttagtcatttcggcttccttttgtttgaagggtttcgcgtttcgatgaggagattatgccgatagtcagaatggaagtaaagtgtctgagtgaagaaatttctgtacaccgacgaacggtcgcgctcgactgtctgctgcggtgtcgatatactcggcctattgcgaacgatggactgattaaatgttcaagctcaatcctgcactgcgagcggtctggcgaactcgtgcccgttacaaagtcatctatggcggccgggcgtcttcgaagtcgcacgacgctggcggtatagccgttttcctcgcggccaactacaagctcaaattcctctgtgctcgccagttccagaaccgcatcagcgaatctgtctacacattgatcaaagacaagatcgaaaactcagagtataatggcgaattcatcttcaccaagaactccatcaagcacaagattaccggctcagagttcctgttttatgggatcgcccgtaacctgtcggaaatcaagtccaccgaaggcatcgacattctctggcttgaggaagctcactacctgacccaggagcaatgggaagttatcgagcctaccatccggaaagaaaactctgaaatctggatcatcttcaaccctaacgaagtcaccgatttcgtgtatcagaacttcgtggtcaaacccccgaaagactcctgcgtcaagatgatcaactggaacgaaaatccgttcctcagtgagacgatgctcaaagtgattcacgaagcctatgagcgcgaccgggagcaggccgagcacatttatggcgggattccgaagacgggaggcgacaaatccgtcatcaacctcaagttcattctcgcggccatcgacgctcacaagaaactcggctgggagccggccggatcgaagcgcatcggcttcgacgttgcggacgacggcgaggatgcgaacgcaactacgctcatgcacggcaacgtcatcatggaagtggacgaatgggacggcctggaagatgaactgctcaagtcgtccagccgcgtttacaacctggcgaagatgaaaggcgcctcggtcacttatgactccatcggcgtcggtgctcacgtcggttcgaagttcgccgaattgaacgatgccagcccagacttcaaactgatctatgatccattcaacgcgggcggcgctgtcgataagcctgatgacgtctacatgaagctgccgcacacgacgatcaagaacaaagaccacttcagcaacattaaggcgcagaagtgggaagaagtcgcgacccgattccggaagacttatgaagcggttgagcatggaaaggttcatccattcgacgaattgatttcgatcaactctgaaacgattcacccggacaaactgaatcagctgtgcatcgaactttcgtcgccgcgcaaagacctggacatgaacggccggttcaaagtcgagtccaagaaggatatgcgcgagaagcgcaagatcaagtcgccgaacatcgctgactcggtgattatgtcggccattctgccgatccggaagcccaaaggcttcttcgacttctaaacatagaaaagcccggagcgatccgggcttcgggtcttactcggtgtggttcctggcgctgagtgtcgacgaaacggcctcgccgacgcccagagcttcctgaccggccgcgagcgcttcggcttccgactcgacgttgaagtcatcaccttggccattgcctggcggaacctcgaccagcacggcttcttcgccttcgaaacgcaggtcataggtcttgtcgacggacagaccgtaacgagcgttgagcgcgtcccagagctgggcctcataggtacgcaggtcttgcagagctttctggtggctgagcatggccatgtcaacggcccgttgcagggtttcgtccaggacgttgaaccgaatgcgaagagcacgaatccgctcgacggtttccgcatccactacatgtctttcgatcattgcttttcacctttgctgaatgttacgttgtagccgttgtcggccaggtaggtcagggcgccttcgaaggaagttccgacgaggtgcttgagcttcatttcgcgttgcgcggccaaccagaatgcagttccggaaaactctgcgcggccttcggacaaaaccctgccatcaggcccggcgatccgtacatggacggaagatagcttgatcggcatcagtgaatacctccactggcttgcgacggcatgctttcggcgcgagcggcttcgcagtccgggcagggacaggcttggcggacgcgctccaactcgtcggcatccatgacatagagcttcccatcggcagtgtcatgtgccatagcgatgttcgggaagtcggttgcgctcaggccggcgacagtgcggatttcgtcccagagcaccagatgctcggcattcagtcgggcggcgagcgcttcgtgctctttagcgacgcgcgccatgaactcgtccatccggaatgcgaattccgcatcgatggcacgggccgaggccatggagctgagtcgaatcggttctttcttcatgatgattctcttttggttggtggttgttagctgctcaggcctattacagcctgagcagcatgatgaagatgaacgcaaggaacgcgaacggcacaagtatgccggacatcagctttgacaggcgctgcatctcagcgtatttctcggtagacattccgtgctgcgccgcctcggccgcgaagcgggctttcgcctcgataacttccgggcgcagcgacaggacatattctaaggcctcttcccgcgctttttcggcctcgaccgacctagggtcgcgggccgagacttcgctgtgccctggcctcgcgggatgggcttgcagcgatggagggagttcagcggccacgactccataatcggcacaggcccaagcgatcccaatgaggatcgcgaggatggactggacgattcgcagcatcactttgtcgctagggaagctcatgatcaatcctccaccgaccgaacgatttccatgttgcggccggcattggtcccggcattgaaggcgcgccgaccgtcgctatcgtccagacgcatgagcttagtaacattagacttcttgtagccaggatcaccgaaatgttcgtgaaccgcagcttccttcgccaccaccagagacgttccggcagaagataccagctccatgcgcttcctggtgatggattgaaggcgatagctgatttcctgggtcgcggccagcttgaattgcgcggcaacctttacgttgaaacgttcgtacccttgagacttctgatactcccggcacagacgatcaacggcctcgaccaaggagttgaacatgttcactgccagctcaacgtccgacttgtagcctttaaagcgtacggcatgaccccagcgcttggtagtgcttccgtcgcgggcactcctggacgccttagccgatgctctgtggttgttgacgccaccggcgaaatccatgatgcaatcattgtacgtcgccacggccaccgagaagaacttcatccagttcgggattgcggaatagtaacgagtggcaatttgctcatcgaactcttcgcgaatctcgccggtcgcttcgaagtcgtgaaggtcatatttgtccttcaatttcttcacgcgctcggctgcgatagcagcttcgtgcggactggaggagtcggccgccatggcggtcagtttgcggatgcggtctttcgccttctcgatggcttccggagtgaattcgttctggtcggtcatggtcggttccttttgtctgaagggtttcgcgtttcaatggagctattctgccttcattcagaatggaagtaaagcactttcttccactatttcggcatcgactggaagaaattccagatccaatcacctgctaccagcaagaggatgagggcgacaaagaacaggacggcggccgcgagctgtgcgcccggcttcagcttgggatggctgagcttgggctctgcgggaacggatggagcgttggcgctgcgaccgtcttctcccaggccgtagccgatgccgcgctcgcgcgcatggagcgacaccagaagtttcagatactcggtctgcttttgcgactcttcgtagatgccggcgacggcgaaccagagggcgaacacgacggacatacacacaacccaggcgccggtcagcaggagggccagcgggccgatgacgaagacggtggcagccaggacgattgcgccgccccagataatgaagccggccagaccattggtgatgtcgatacagaactttttcatttgcggattccttcggttacaggattgaggggatttggaactctgcgccaccgagcacatcggtgacgacttcccagagcgtcggcactgaccactggtagcggtcgaagtcggtttcaggatcgacgcccagcgtcacataggaagtggcaggccatttatgaacgctacctttccgcatgagagtcgccacgcggccgtcaccgagcgggttcgtcttgtgcggaacgtacgcagacatcgaatattgctgcccagcatcaacgatgaatctttgtctctggcgcagacatacagagccaacaggattccaaccgcgaccgccgcaggcctggcgagccgaagaatgctcatacccttcatgagtcatttcgccgaggcaagccgagcgatcttcgtaataattgatgttctccatcgatccaaccagcaccagagactcgaaatcgaatcggtgatcgtgaatggacgagtgatggacgcaacgccggcgcggcaactccgggtgccaaacatggaggcgccctgccgggagctggacctggatgaaccccaggccgtgcaaagtgatcttgtccttcagcggatcatggactgtactcatggataatcctcaatagcagaagtgtatggtgagagttacgatggccaagccggtcgcccatagaagggcgaaccaggccatagcttttatggttatgtagatcatccgaagaattttccggcacagatcgggccgattcccatttcgatggacgcgtggttggtcaactcgcgaccgcagcaggagcattgaccagtcttccggccgtaggcgactgccgattccatcggcttttcgaacatcttcagaacgtcgtcgtgctcggtatcggtgcagtcgcgactcttgatgaatttgccattggtgatacggccgaggtagatgtcgcccaggacgtacaagctaccggcgttccggctgtgagcgctagcctctttcaccacaacgatgagcggctcctcgccttcgccagccaggcgaattttcgggcgcttgattccagattctttcgccttctcaaacgccttctcgatgccggaaatgtccagagtcggcgcagcagcttcctgcgcggccactttctcgcgatacttggcgaagttttcgatggcgcgcttcgcagcagcgatctgattttctgtcaaggagccgtatttatacaacgactcctgaaggctctgagcgaagctgaaggaatttccagtccaccactcgacgatgtccgggtgcgcggcttcgaaggccttaattttgaggtcgcgctcttgcgcagcgctacagattttctcgatgcgcttttctgccgccttagcacggctcttggcgcgctgctccgggctggttttgtactctttgtatccgacaccgccgcaggcgaaacaggcgcgaccataagatgaagggccacggtacaggccggtgcctgcgcattttgtgcacttgtcgcgatacagcttcacttccttccgggagttcgggcgggcgcccatggacacgtcttccagcgtcttcggcgcttcgtcagtgatcgctacggtagcgaagtcatcgcccaggtcttcgaagccggtgaacagattctctgctgcgttcatatcgattctcctgtttggaaagttcgtttcgatgagttgactatacgccagaaatggaaaaacggtagcgatttctcactaccgttcgtcgggtcgaagataatcaatagatgtcgctattgatcttgaacccatgctcagcgccgtcgttgtagtcatactcagcatagctgtcgcagtagtcgttcaaatgctgaatgatgcctagaacgtcgttagcggccttgtgccgtttcgcggcgatggtcttggcgatgctatcgccgacttccagggtttcggccgtccggcgatggatcagtagacgactccaaagatagagccggacgcgacgaattatgtcgcgatggcgctccagtcgtccgtgcagctcttcaatttcttgctcgcgagatttcaccactcgtcgaagctgttgaacttccaattccaaatcggccttagtagccatgttcacctcagaaaggaaaatcgtctgggactccaggaagctcgacgattattgttgagcctgatcggtccagaatgcatccgaccgagccggccctgtggggatagggtctacacgaactataacaggtgacttccaggactatccgccaggtcgatcctccacaccatctacagactggtgggcgcttcgacttcagttttcgttcgtccaagacggcgcgtctgtcgcaggaaaggcagcgcgccttaaccgacgtaaccatgggtatagtcgatcattcggatgagatcatcatcctctgattccctcgacttcagaccgcccaaagagtcagactggccgttgcatttcgcatcgatatccatcgaagacaagaatcctgccgatactacggtgatatcaactttgtcgccggccttcttgaagccttcgcactcagcatcgagggccacaaccgcactcgcagccatgttcacatgacttatgaggtcggggaagatcacgggaacttcacgcgacatgccacggaccgtcatcttcaggactacatacttcatactcactatcccttttgtatgtgaggaaagaatttactgttttccggatggtggaagcgctcggccgcaggcggtcttccttccggacattgaatcgtcgaaggcgggaaaaccgcgcaggcgataatcgccgcgaggagtgcagcggatgtcgacatccagagggcggtttccaggctcacccgaacttccggacggcgcggcttcattcgctccaccctcttcccggttcataggatggtagactgccgccgcgaacccagttgtcccacatgcggttcagaccagtcggtggctggggcggcggactgtagaatccgggagtctcagtgctgctcaggaaataaggcgtgcaaacggcctggacggccagttggtgccgctcccacatcttatcaatcgctcttagcatgacgtcttcgcactgagccttactgtcgaaccgtctgctagtgtggtccggtatctggatgcatccgtctccagtgcaaaggaaagcagtagcaatccacacggtgatactcgccatttcgtcaccctctttagttgatgagcagagtctattccatctgctcgccaggagtaaagcgcttttcgtcgggataaatgccgatgatgtctgcgtcgagcatccaaatgtccacggacggatcgtcgctgctgatttgatataggttgtacagctcccgtccgccgacagcacgctcacctcgcggctcaaccgccagcaccttgccgtgtccttctccgtgctcgtccaggtatatgacgtgatcaccgacttcatagctttcttttgtgacgaggcgtgaacgcgagctgttctgcgattctactacccaggaatccagcacgccgcctttcacgtcgcgaaacaatcttgccgatttgtcgcaatcgaatacgcccagaacttcgccgtctttcaacacgatatgtacgattggcaaaagagtattcatgtttaatctccattggttgataattagagtctaatctgccgaaaagttcccgtaaagaattattttctcataactgattagttgcaactgttaatctgatgtatatgtttgaatctcttttgaacgtttgatgtttcccctataataagcgcacacagccaacaaccacgtggaactacaatgtttaaactttcctggatattcgggcgcaaaaaggataatgctgcctgttctgaatcggcgccggagaaagtcgcacaaatccctcaacacgatccgctcgaccccatgatcaagctgggaaggattcgcggctggaacgtcgagccggagaaagccccggtaattcgtagtgtgaaagatttcctggagccgggcctatctgtagcaatggatagtgcgtatggtgatggaccaactccggccgcgaaggctgctgcgggcggccagaatccctatgtcgtcccgactatgttgcaggactggtacaattcccaagggttcatcggataccaagcttgcgcaatcatttcccaacactggttggtggacaaagcttgttccatgtctggggaagacgcagcacggaacggatgggaactcaaatcggacggcaggaagctatccgatgaacaaagcgcgctgatcgcccggcgcgacatggagtttcgcgtcaaagacaacctcgtcgaactcaacagattcaagaacgttttcggcgttcgcatcgcgctgttcgttgtggagtctgacgatccggactactacgaaaaaccgttcaatccggatggaatcacgcccggctcctacaagggaatctcccagatcgatccatactgggcgatgccgcagctcactgccggctcgacggccgatccgtcttccgaacatttctatgagccggatttctggattatcagcgggaagaaatatcatcgcagccatctagtagtcgttcgcggaccgcagccgccagatatcctgaagcctacatacatcttcggcggtatcccgctcacccagagaatctatgagcgcgtgtatgcggcggaacggacggcgaacgaagccccgctgcttgccatgtcgaagcgaaccagcaccattcacgttgacgtggaaaaggccatcgcgaatgaagacgctttcaacgctcgcctggcgttctggattgccaatcgcgataaccacggcgtgaaagtcttgggtactgatgaaagcatggagcagttcgacacgaaccttgccgacttcgacagcatcatcatgaaccaatatcagctggtcgctgccatcgccaagactccagccacgaagctcctcggcacttctccaaaaggattcaatgccactggtgagcacgaaacgatttcttatcacgaagaactggagtccattcaagagcacatattcgacccacttcttgaacgccactatttgcttctggcgaagtcggaagaaatcgatgtgcagctggaaatcgtctggaaccctgtggactccacgtccagccagcaacaagccgaattgaacaataagaaagccgcgaccgatgaaatctacatcaactctggcgttgtgtcgccggatgaagttcgcgagcgtctgcgcgacgatccgcgttccggctacaaccggctcaccgacgatcaggcagaaaccgaaccgggcatgtctccggaaaacctggccgaattcgagaaggccggtgcacagtcggccaaggcgaaaggcgaagccgagcgagccgaagcccaggcgggcgccgtagagggcgcaggcgacccggttcccgccgctccacgcgggactaagcctctcgcgaaagcggccgaggaaggggccagcgaggccgctgaaccgccgtcgcggccggaccccaaggccgaactgcggaacttgttggtcgatcttttgtcgaagctccaagacctggacgacattaaggcgccggacggcgtagacatagagcacaatgatgcgcctggcgtaaagcgcacgtccaaacctggcgtgtctggcatggagccttcggtgttttcgtccaaccgcatcgtcgggcctcgtgatcattcggaactccagagaatcaaggtgaatggaataaccaccttgatcgaaaatccgcgcggaagcattcggcaaggaaaggatgggagttggcgagttcagatgaaacaccactacgggttcatcaagggaacgaaaggcgctgatggggatgaagtcgattgcttcgtcggtccgaatctgggatccaaacgggtcttcgtcgtcaaccaggtgaacaaggaaggtcagtttgacgagcacaagtgcatgctcggcttcaacaacatcaacgatgcgaagtctggatatctgtcctgcttccgcccaggttgggatggtctcggctccatccatgaagttgacctacccgctttccgtcgctggctggcgaacggcgacacaaccaaaccgtttggaggcgagtgatggcattcaaggcctccaaaaagcgcgaacgccgggcacctcttccggtcggaagagggaagcccataattccatcgtcaggaatcgaggcctggtatcgaaagcagatgaaggatatttccaagctcatgatcgccgactatcgaagcgagattgagaaggcgctgtcccagcctgcggccgaacggttcttcgccagcgacgaatccgttaacgtcctgttcaagatgacccttcgaagcctacagcagcgatggaaccgcatttttgaaggcttcgcggccaagatcgccccggagtttgtcaaccggaccgaagaagcggccaccgccgcgaccctgcacagcttgtctgtggccggcgtcgatcagccaagagctgcgtacaatgagagcgtcaggaataccctggaggcagcaactacttacaaccatactctcatcaccaggattcaagaggaagtccacgagaagatttatacatcagtaatgttgtctctgacttccccaaatccggaagagcaaggaacttccggcataacgaacgcacttcgcaaagtcgggaagttctctgaagatcgaatcgaactcatcgcaagagatcaaaccagcaagctttacagttctctgagcgatgagagaatggcggaaaatggagtcgaggaattcgagtggatgcactcttctgccggcaagactcctcgccatacccacctggagaaagatgggaaaaggttcaagctgaatgaccccagactttgggagggtccgaaggccgaccaggggccgccaggatgggcgattaactgtaggtgcagaaagataccaatcatttgatatcgataggagcgctatatgccgttagttcatggcacttccaatgaggctcgttctgaaaacatcaagcgggagatcgaagccggtaaagacccaaagcaggctgcggccatcgcttactccatccagcgcagtgagaaagggaagacggcgaaagattgttcgcctgagctcgttgccgatcttcgcgccctggtggacgctctgtcgaggctcgtgaaatgaaccgcaagacatgccggcgccgactcgtggtcgatgtaatcagggccaatattcacggcggattcttcagcctgaagtttgccgccatcgatttggcaatcatcggcgtcgccatcttgatgacttttggccgataatgctgagaaaatctggattctgactaaaattctagtccggatagccgcaagttaccgtttacggaaaatagcagtaatttggaaagcctactgccgcgaggctttaacagagctagttcctaatttccgatttagccgcgtgcttcaaaagtatatagcctgggaaattagaagtaacgtcccaatagaattcatctataagtaacgttataatataacgtcaatctatatgctctagacgtattgaaatttaatttttaatcggtaaattggtaatttgaattagtttatgagttgaaagcctcgcggcagtaggcttagacaaatcccgtcaagttccctagaccaaattaccggattttcgcggctgaggaaactggtaattagatcataatacaaattatagtgtaagttaacagtcgcgactacatctaattattgttccgcttatttacccttagatgtactgcgtatataatacagccatagtccacgactcttcgaattaacgatggcaaagtcgaaaagaaaaattgacgaaaatggatatatgaccatcgagggttgcccgatcagctcttatggcgttttccaatattctgctggtcaactcggtcttccgggcgatccgatgcggattgtcaacgtatatcgcccggagtctgccgtcagcgatcctgagtacatcgaatctctgaagaatctcccgttgatcgacgagcatgagatgctgtcgggattcgacgacgatgacgacagtgtggcccccgaagacaaaggggtggagggcatcatcacctccaacgcttactacgaagccccatgggcgcgcggcgatatccgcatctattcccgcaacatgcagaatcagctggaaaggggcaaagaagacctgtccctaggctatagttgccgctacactgagcaacccggcatctggaacggaacgccttatgaagtcgtccaggacaagatgcgcggcaaccacatcgccctggtaaaagaggggcgtgtgccgggggccagagtattggatggtctgtgttttgaccatctcagttttgatttcagaccatccgatgagggtaatgaaatgagtctcaagaaagccaagcagaagccccctgtccagcgcgtagggcaagctgctgactcggcggtcgaagagttgcgcgccctgtggccgaagctctctgcgtctgtccagaagttcctgggcgaagaggcgcaggagccggagcatcaggaaggcgcggccgctccggccgaaccgaccgacagcgagcacatgaccgagcatccgactctggaaggcgctcagaaggacaacgaagagcatgaagaggcgccttccgttgtcgatccggctgtggccgccgccgagtcggagcgtcaagaaagtgccgcatccgaaatgtccggtgaaggcgaagtcgccgaactgatctcccaggtcaaggccattctggctcgactggagggcacggcggccgaaggggcggacgaagagcatggcgaaggcaaagatgtcgtcgagggtttggaggagcagagcagcctcagcggctcgcaaaccgccagcgacgatggtggtgagggcaaggataacagcgaggaacttcctgaaatggcacagaagaacgcgcaagatgctgcaattcgcggtctctatcgcgacattgctgctaaagatcgcctctacaagcgtcttagctccgtggttggcgcgttcgatcaccgagctatggactcggctgaagtcgctgtttacggcgtgaagaagctgaacatcaactgcgcgaagggccaggaagctctggcactcgacatgtacctgaaaggcgtcgaggcctcacgtggcgcggccagccgtcaatcgaaagcccaggattcggccggctctgctccgcagtgcgccgagctggacagctacctgaagggggagtaactcatgttccagaaacaagtttaccgccagtacactcctggttttccgggcgatctgatcgaggacggcccgaagcgggcgcggccgggtcgaatcatgtctctgtctgccgtaaatccggctgccaccgccaccggccccaaccgcatcagtcgcgctttcggttacgccggtgacgtcagcgccctcggcgaaggtcagccgaagaccatcgcggctcgtgcttctgaagtcgtgatcggcggcgccaacttctttggtgtcctcggtcatccgaagcactatgccctgttcggttcggccggagactccctggctcccagctatgatctgcccgatggcgccgaaggcgagttcttcgacatggccaccggcctggtcgtcgaaattttcaacggcgccgcaaccgccctggacctggactatggtgacctggtcgcctatgtacccaacaacctgcctaccgccgacaacgcgcttggcctgccggcaggcgccctggtgggcttcaaggctggctccatgccgaccggtttggtccagattcccaacgcacgcatcgttaacgccatcagtctgccggcccagtcggcggggaatttggttgctggcgttaccatcgtccagctcacgcagtaaggaggcgtcatgagccagatcagcaagacccattcgcgcctcgcaggccgcaatgcgaaacctttcgacctgaaaaacatcaccaatgacgccgtggcgtctctgagtcgcatcggcctggtattcgaccacgccgtcgtccaggaccagatcaaggccttggcgaaggccggcgcattccgctccggctcggccatggacagcaacttcaccgccccggtgaccacgccgtccatcccgactcccatccagttcctgcagacctggttgccgggcttcgtgaaggtcatgaccgctgcacggaagatcgacgaaatcatcggcatcgataccgttggctcctgggaagatcaagaaatcgtccagggcatcgtggagccggccggcactgcggtggaatacggcgaccacaccaacatcccgctgaccagctggaacgccaacttcgaacgtcgcaccatcgttcgtggcgagctgggtatgatggtgggaaccctggaagagggtcgcgcctcggccatccggctgaacagcgccgaaaccaagcgccaacaggcggccatcggtctggaaatcttccgcaacgccatcggcttctatggctggcagagcggcctgggcaaccgcacctatggtttcctgaacgatcccaacctgccggcgttccagaccccgccgagccagggctggtccactgccgactgggcaggcatcatcggcgatatccgcgaggccgttcgccagctgcgtattcagagccaagatcagatcgatccgaaggcggaaaaaatcaccctggccctggccaccagcaaggtggactacctgtcggtcaccacgccatacggcatttcggtttctgactggatcgaacagacctatccgaaaatgcggatcgtgtctgctccggaactgtcaggcgtccagatgaaagcccaagagccggaagatgctctggtgctcttcgtcgaagacgtgaacgcggccgtcgatggaagcaccgatggcggcagcgtgttcagccagctggtacagagcaagttcatcaccctgggtgtcgaaaagcgggcgaagtcgtatgtggaagacttctccaacggcaccgccggtgcgctgtgtaagcgtccgtgggccgtggtgcgctacctcggcatctaaccgatgcctattcaccaaaggccggaaacccggcctttgttcactctgactctgactcggttgtaggggccggttagggcataattactaggactacgccaatgactgtttacatcgtttccgccatgactcaatccgtgtcttacaatgcgtatgacacctctgatccgtccaatcctcgcctccagcgaaagattctgattcgtggccgcgccggcatcgcatccgaaacttccggcttcggcgacatgatttccgacgcggccgggcgtccgatctggaccccgcagggcgattgcactgccgtgagcgattcggatttcgagctgcttcaggccaataagattttcatgcgtcacatggacaagggttatctgcgagtcgtgaagacagacatcaccagtgaccaccagcggatttccaaagagactcgcaccatggagcgcgatggattccagcctctggacgctgatcgtctgcagcagaaaatcaaggtgaccaccgccagcgcttcccaggaacaagagttccggatttaaccgagggtttcggtatggtgattttcgacgaacataagtttcgcacgctgtttccggagtttgctgatccagccgcttatccggacgtgcgcctgcagatgtatttcgacattgcgtgcgaattcatttctgatcgcgattcgccataccgtattctcaatggtaaagccctggaagcctgtctgtatcttctgaccgcccacctcctgtcgctgtccacgatgcaagttcagggcgcggctggaggtggcgtcactgccggtgggacccaaggcggtttcatcaccagcgctacggtcggcgaggtcagcgtggccaagctcgcgcccccggccaagaatggttggcagtggtggctttccgggacgccttatggccaagagctgtgggcgctcctcagcgtcaaagcggtgggcggattctacatcggcggtcttccagagcgccgaggcttccggaaggttggagggacgttctggtgatccctggtgcgaatcttctgcgaatggccttcggggtcatcggcactcaaattgtgaaatatcgcaagtttgagcagcgagtgaagaatgatcaagctcagtacgtttccatgttcgaggagcctttcgacctggcagcgtctgtccagcgagtccgacgcgatcagtatgtccagtttaatctggagttccaacggaattatgttatgatcttcgccaactttgagatggttgacttggatcgcgatgtggccggtgaccagttcctctggaccggaagagtttttcagctggagtctcaaggctcctggttttatcaggacggctggggagtttgcctggccgtggatatcggtgcggccaagctaactgatgacgggaaaccgactttctaggtgatgtatgtttgacggcgaactgatagcgaaaatggttgtcgagctgaatgcggcgatgacatctgctcaagaggctttgcagttcccggattttgaagtcgtccagaaagctcagccgacccaacagggaacgtcaaccaggccgaccatctttttccagaaactgtttgacattcctcgcggctggcctgccaccgattggcacctggacaacacgacccgcaaatatgtagaaataactcgacagcatgtagagacgactttccagatcagttcccttcattggcagaatcctgaaataactcacgtggttacggcttctgatatcgccaactatgtgagggcttatttccaagctcgatccacgattgagcgcgtaaaggaactggacttcctcattcttcgcgtttctcaaatttccaacgaggcattcgagaacgacaatcaccagttcgaattccatccaagttttgacatggttgtaacttacaaccaatatattcgcctgtacgaaaacgcagcatattcggccgatggggtattaataggcgtatgagtctgaggcgcgattcagagctaatcgccgcgcacctccagatgttaagagccatgcgcggcaggtccgtttcagccggatggtattccacggctcgatatcctgacaaggcaggcggatcggtcggaatacaagtagcgagaatcgcacgtctcaatgagtacggcggaactatcgaccatccgggcgggaccaggtatattagggacgccattgttcggggccggtttgttggcgttcggttcgtcagaaacgactttccgggagaaaccgaggtaactaagcctcacagaattaccatcccggctagaccgtttatgcgatatgcttggaacttgttttccgcagatcgcgccgcaatccagaaccggatagccatgaggctggccagaggacagatcactccagatcaagctcttgcccagatcggcctggcgttggaaggatacatagccagaagcatcaggaccgggccatgggtggctaactcagcatctacggtcaggagaaagggattcaacagaccgctggtcgatacggctcatatgcttcaatcgattagcagcagagtaacataaccaggagatcatccagtgatcagtcagagccgttatatccggatcatttcgggcgtaggcgcaggcgctccggtcgcaggccgaaagctgattctgcgcgtcatgactaccaacaacgtcattccgcccggaatcgtcatcgagttcgacaactccaacgcagtcatgtcttacttcggcgcgcagtcggaagaataccagcgcgctgccgcatatttcaagttcatcagtaaaagtgtgaattcgccgtccagcatcagcttcgctcgctgggttaacaccgccatcgcgccgatggtagttggtgacaatctgccgaagaccattgccgatttcgccggcttctccgcaggcgttctaaccatcatggtcggcgcggccgaaaagaacatcaccgccatcgatacgtccgccgcgacttccatggacaatgtggcgtcgatcatccagaccgaaatccgcaagaacaccgacccgcagctggcccaggctaccgtgacctggaatcagaacaccaaccagttcaccttggtcggcgccaccatcggtaccggcgtcctggccgtggcgaaatctgccgacccccaggacatgtccaccgccctcggctggtccacctccaacgtcgtcaacgtcgccggccaggctgccgatcttcccgacgcggccgttgccaagagcaccaatgtcagcaacaacttcggttcgttcctgttcgccggtgcgccgctcgacaatgaccagatcaaggccgtgtcggcctggaacgctgctcagaacaaccagttcatctacacggtcgccacttccctggcgaacctcggcactcttttcgacttggtgaagggcaacgccgggaccggcctgcatgtgctgtcggcgactgccgccaacgacttcgtggagcagtgccccagcgagatttttgccgccaccaactacgatgagccgggcgcttcgcaaaactacatgtactaccaattccctggccgcaacatcaccgtttccgacgataccgttgcgaacaccgtcgacaagagccggggcaactacatcggcgtcacccaggccaatggccagcagctcgctttctaccagcgcggcattctgtgcggcggtccgaccgatgcggtggacatgaacgtctatgccaacgaaatctggctgaagtcggctatcgctcaagcgcttctggacctgttcctgaacgtcaatgcggttccggcgagcagtactggtgaggcgatggtcctggcggtgctgcagccggttctggacaaggcgaccgccaacggcacgttcacctacggcaaggaaatcagcgccgtccagcagcagtacattacccaagtcaccggtgatcgccgtgcctggcgccaagtccaaaccctgggctactggatcaatatcaccttctccagctataccaacaacaacaccggcttgatcgagtggaaggccaactacacgctgatctattcgaagggcgatgccatccgcttcgtcgaagggtcggatgtgatgatctaatggtttgcggcggactcgatccgccgcaaccttccataaatggagtgaggagtaagcaatgatcaacatttctgcgttcggctcgatctgccagttcacggcaagcagaactttcccgaacggattcaccgtcaccgagttcgccgacgatgccgatcccatcgacagcccgccgttcaccgctgccgataccggcgtcggtctcaacggtgacatggtagtttggaaccgggcgaacatcctggaagtagtcgtcaacgtcattccgaataccgagggcgagcgcaacctggcagtcctgctggatgccaaccgcaccggaaaggacaagtcgggcgctcgtgatgtcgtcggcctggtcgtggcgatgccggacggcagcaaaatcacctgcaccaacggcaccccaatcgacggcgttctgatcaacgcggtggcaagcgtcggccgtctgaagaccaagccgtatcggttccgatttgaaaaagtgatcaaagccggtactagctgatgaagaaaattccgctgacagcagtccccaatcaagcgatctcatttaacgccggtagcagctattggaagattcgcctgtaccagaacatggacatgatgaatgccgatatcagccgcgacggcgtgatcgtttgccatggggtccgctgcttcggcgggattcctcttctccagtacagccgtcagtaccgacctgactatggcaatttcgtcttcgaccgcgacgccgattggacattgttcggcgacggcatcaacctgttctatctggacggcgccgaattcgccgagtatcaggcgcttgccacgaggaaagaatgagcacatcaacgatcagaaccgggacgaacaacgatatccttttggacgacaatggaaacatggttatcctcagggatgtcgaagcgtgcgcccaggacgttcgggcggcgatgctcatgcgcaccggcgaaaacattttcgatgtgaactccggtgtgggatatttcgaatacatcttctcgccgcagaaaagctatgatgacgctcgcaaatccatcgcggatgcaattttgtcctcgccggatgtgaccggcatcgagcagctggacatcgacatcaccggggaagtcttcggcgtcgatgctaaagtcatcaccatccacgggcctgttaccacaggagtttgaaatgagcacaatccgcatccaatacgccaacggcacccagctgttcctggacggcaaaaatccgccgctcctggaccctctaccctcgttcaacccgtctgtagaagatctggaaggcctggaccgcgaaaagaacaccggcaagggcgactcctcgccggccggtcttcccgttcccccggtaaacgtcgattccaatgtcgacaacggcggaaccatcccggctccggtatcgaccgacgctcctgcggccgaatcggccccggaaggcgcccaggaagctcctgcagcgggacaaggcgacgagaaaggcgccgaggaagccccgactaccgccccagtagaaaaggccgaggaaacggcctcgccggccgctgaagaggaagccccggctcccgccaaggccacctctcgcaaaaccaccagcaagtaaggactcgacatgatcaacgtcagcggcttcggcacaggaattgtaatagtttccgcctcatcgttcccgatggggttttccttgtcgaagttcgctgatgatgagagtccgatatcctccaaagagctggagccgttcggatatgagatgctttatgacggcggcctattcgcctttgacaaggctgctcctctggaagtatctgtatccgtcatcgcagggagcgaggatgatattaaccttcgcatccttctcaattccaaaaagggatcattccgatttcttccgggaatcatcccggatatgacgactctcgtggccactcttcctgatggcggccgcaccgttctgtccaatgggactatcatcaagggtccggccatcgacaccatacagaacaccggacgacgcaaaggcaacacgtacacttttgttttcggtagctatcttggcgcccagactgcgcgtcaagccatttctaacgttatccaatcggtactggaggtggtctgatgttagggattttcaccagcctcctaagttcgcgatctttttcgattgtggaccaaaacacaaaccagctagttgctgcggatttgaggataagccgggtcaacacccggttttcttctgtagggcaacgccacatgctggaagatggcaagaccaagatggattccagaacgatccaccctatggaaatcatcgtcgaagtattttgcccttcaattgatgtcgtcgatcagatcaatcaattgctcctggatcgcgacactctgtacaaagtcatcactcgcggcatggtattcgaacggatgatgtgtaccagcgaagcgctcaatcagactccggatatgatatcggcgactcctgcgcggctgacattctcccaagttctcgtccagaatcccaagcctataatgttcagaaatgcaggggactcttctatgatcgaccgagggctggccctagctgaagacgtggttggctcggccggcgatctgttcgactacgcagtaaacggcgtccagaacgccgcagacttgttctgaggtgccaattgaactctttcctcaagtctattctcaacacgcctactctcaccatacgtgatgatgttaccaaacttcctgtctggaagagtcttcaagtcaagaaagtggaaatttactcgccggcttccgtagtgtcgaaacctctggcgacgaaagaccagacggaagctcaagtgtacaccgaagctctggacattgatgtgaagaatggaaagatcatccaaccggtgcgactccgcatcaatgctatctgtccggacctgtccaccgttgaaagtatcatgaacgctttcaatgataacacctcgactttcgctatcacttctaagtcgatattggccgataaaatggccatcatgacgctcgatgtagatcagtcgccagacatgttgaacgcggctgagatcaatatggaattcgagcaggttgagcctccagtattgaatgaattcgatcctgcgttccctcaagatagtccgacttatggggtacagattcaatctctttctgatgctaatttgctggatttgggcgccatcggcgattcgatatcttcggccgcaaaatcgctatataatcgcgtgaccagctacttctgaggatgtatcatgcttgaaatcaatcttcccgatggccgtcaaactcgcgtacaaatcgaggcgtggtcggcattggatggctgggaactccagcgccgtttcgtcgaattcgctgtcagccaagattccgacttccgccgctctttcaccatggaaatcctgggctatgcgaaagtgctgcttggcgacgatgacaccggcattccgctgaccaccgcggcagtcatcaacaaccacctcggccactggaagaacgtggaactggttttcaactctgttctcaagcacaatggcatcgacccggccacgcacgccgaccggccggactattgggaacaagtcggatcgcagatggccatcgcatttctggccgaggcgtccaagctcattggtccagcaatgaagatcgccgaaggactcgccaacaagccggagtgattcatgtctagtgatttggatgaattcatacttcggtatgaggccgatactgccagagccgagcgcaatctagagcacctccagaaccagatcaggcgcgtaaacagcgcatcgacgagtggccttcaggatttgcgccacttcgcagacggcgcggccaccgaactcggccgagtcgttcctcagattgattctgtgacgagcgcaattcgcggaatgaacgcgcaactggcaataggcgcaactggcgtggccctggtcgcggccggcgtcaaggcgttcatgaacaccagggaccagtacaatcagcagcgcatccaggcgatggacatcggcatcgccccggcacgcttggaagagtaccagagaaaattcgttcgccagtccggtggaaccatcagccgcgagcagggcgcggagatgaccaaaaatctggcagacactttccggcgtgcttatcgcgatatcgggcgagtcggcccggaagcgcgaattctgcgtatggcaggcgtcgatgtcgggagcttccaaaagggcatgcggccgctcaacgacatcattactgatctggccacgaaaatggccaagttgaagccggacgaaatttctgcctacgctgatgcccttggcgtctcgcgagactacctgagcaccctggcgaagatcggcccggccatgggaaaagtcactgagatgacgactgcggaactccagtccagggtccagggcgagtccaacatccagaaattcaacgatgccctggcgaatctcaaccagacgttcactaccctggaaaaccgagtcggcgaaaagctcgcgcctgcgttcaccaagctgatcgaaatcatcgacaagatagtccaggctattcccaatgaagtggaaagcttcgcgaaggacaccaaatcccgttgggaagatggagtgctcgggaaggcgaccgttggcagtgatatcctatccctcctcagccccggcgccctgctcggtcgcctggcagcgtgggggactcgtcgcggcatggaagaatcagggctcatcgacaaggacaaggttcccggcgctcaaaccagcgaagacctggccaagaaacaagaagaccaggacaaggctactaagtccatgaaagagctagagaagctggctgaccagaccacgaagtctaccaatgattttgcggtggcgatcaacatgttcagtggcgcggtatcgtcgttcgcgaatgccgttgacgagcgccaagcttgggcagcctgggcgggggaaattggtcgggcggtcggcatgggaagcaccgcgccgacttcgcgggccaccggcgtctatccgcacgcgatctatgatcagtcgaagagtggcgcggccggacaagtcttcggcgagccaatcggcgcccagtctcttcgcaatcgcatgttctcgccgcagcgcaaggccgagccggtcaccgttccatcgtacatcaacgacatcatcaaagatgcgtcgaagatgtacaacattcctgagctggacatcaagaaactcatatacaccgaaagccgattcaacgccagggctaccagcgaagccggagcgaaaggcctcatgcagctgatgccggaaatcgccaaggcgtatggtataactgacgtatatgaccctcgccagaacatcctcggcggaacgcgcctattgcgggaaaacctggatcgagccaatggcgacatgcggttggccttgacctactatcacggcggcctcgatccgaagaactggggaccaaggactcgcgcatatccgggtttggtgatgagcgctccaatcgagctgatggaagaggctcagcgcaagcagaaggctgcggccatgaccgtcgccaacgagacgttcgccccggaaggcggcgacatggacattcgtccctatgatggcgggcgactggaaaccccagaccagggcaagaaggaagatgagcgccgcgaagcccgtcgatatgacgacagggttgtgcgaccggaaattcgcatcatcgaccgcatgccagaccgcagcgacggcgaaatcctcaagatgtctaggcgtcaagaggccgaccgggcagattctggattccggaagttcccgaatcaagttcgcggcgagaccaagcagaacatccaggctcaactcactgcaggagccatcgcgcaagtgatcggcgttaaccccaaccagatcatgcgccgcgaaatcagccgttctgacttgctgttcggatacaaccaagccatcctgggcaagcaacaggagatcaaggccgccgcgaccgaagccaacaacgtattcctgtctccagccaagcttgccgaagccacggccaaggtgaacgccgcatcgcgagaaatggatattctcaggacgtacggcgagcaacttctgaagagcgctccagagcgcggccaggagctgaccatcggtcgaatcgatatgttggtaaacgttaccggcgcgaattctccggaagaggctcgcgagatattcagtaagcagactgcagaccagctgactacggcaatccaggacgctcaaaacgattccgcaactaagatactctactgatgaaaaagagaattctgcgagtaacattcaacatgccttatggacccgaagtcatccgcgaagatctggatgttcgggtccggattatgaaggctgcgttgcggattcagaaccgggcgacgatggaaattttcggcctcaccactcagctgcgcgagtctcttctgtcgcagttcaccgcgtggaagcaccggcaacgtcaagtgggcagggaagatgaattgatgatcaaggtgtcggtggaagccggctactctgaccaggggcgcgagcaagtttccagagtctttgtcggcgaagtcgccattgtcgatatcatttctccgccaccggacattggaatccgcatccagtgctataccaggcaaatcgacaggacgaagaccattcggaatatgccgccagccaacacgacgtttgtcaagttcgtcgagtggggcgcgaacgaaatgggattgaacttcatttgcgataccagttacaacgatcaagttctgaagaatccgggccggtctatcactgtcgcgtcggcaatcctggcgtcgattcaggatatgtacatgccggacgtggccgcgttcgtcgatgatgacattttgatcgtgaaggaccgcgacaaagtcattcgaccggatgaggtgaccaacgtcaactcgttcgttggaattccatcttggtctgaatggggcgttgaattccagtgtctgtttgagccatcgattcgcgtggctggaggcgtggcggtcgaatcgctcatgaacccaagcgtcaatggcaactatgtaatcactgctctggaatacgatttggccagtcgggatcggccgttctatatcaaagtcatggggagcccagcagcataatggccagggaaatcaaaccgttcaacatgttcggcgttcactatacttcgcggcaattctctgctgtcgatgggctcagcatgatgtcggaaattcagagtgtgccgccagaagaactgctcaagggaaccagtgtattggcgcatccggaagaccatccggaaggcatctggcttccattgactgctgcgaacatcaatctttatgtcgttgatcgagcgaaagtaatagctcccgtacaagttcttgcacttctgtccgaagtggtaatcgactggaactttggttttctcaaagactggaccggagtcaagattccatccagatttgtcgaagatatcaaaagcgtgaagacggcacattcaccttctgtagttgcgagcttggtcgcgaacggctcagcctctatgcgcgagttggaagagtattattcgactcaagatgcgtttaagatgatagacatcatgacggcgaagagcgtgaacgaggccttggcgtccgaagcatcgcacaacagaatcaaaaagggataattcctaaccgggcctgggaaggctatactagacctgccaaatcagaggctttcccatgtccaatatttctctaacatccgcaaaagctcccgacaggacgcgactgatcgccgctcttgacgctcggtcgcggcgggatgctctagatttcgaagtgatgataccggctcaggttgttcaatatgaccgggccgagaacatcgcgacgattcaacctctcatcacctgggttgacacggaacacaacgccgtccaaaggcatcagctggttgatattcctgtaatttccatgggggctggcggcttccacataagtttcccgattcagcaaggtgacataggctggatttatgcggccgaccgcgacacgtctcagttcctggagtcgttgtcaatgtcgaagccgaacaccggccgcatccataagttcgagcatggcctgttcatcccggacgtattccgtcgatacaccatcaattccgaagattcggccgctatggtcatacaatcgacttccggagcgaccagaatttcgattcgcggcgataacatcaagataactgcgccgtcgaacgttactgtggatactccgcaggcgaacttcaccggcaatgtgactatcgctaacaccctggtcgtaaacggcatcaacgtgaacaaccacggccacctcgaaaacaacccgcctgatgcccggacgaaaggcggcatgattgcttaaggagattttcatggcaagttttgatttttctgatttaacagcgggggggggttgtaatggctaactacaactacatcgtcgatactggtgtgatagtcgcagataccgccgacgttctgagcgacgttgaggccgagttccgcgccgccctcggtgccaatatcaacttggccgcgagcactccgcagggatcgcttgtcgcggccgaggccattgcccgttccagcgtcatgcggaatgaagcgcgaattgccaataccataaacccgaacgtttcattcggaacgttcctggacgcgatctgtgccttgatggggatcgagcgtggttctgacctgtcaaccttcggctatggagttcaagtcaccggccgcagccaaacccgcatttccacagggtctagggtccagactccggccggcgcgatcttcacagtgctgagcgatgtcacgatccctgctggtggtgtcgcgaccatcgatatcaaatcgcaggagtatggcaacattcctctgccggtcgggaatctcatcatcatcgacggcacaattggctggtccggagcgaaagtcatcgcctccactcgcgtcgatccgggcagccgccaaatgagcgatgcagaactgaagaatgcccgcgttaatcgattggccatccaaggccgcaactcgaccatggccatcaaggcgtatgtgagcgccgttccgaacgtcacgtcggtgaacgtaatcgagaacaacaccggcgccgttcaagtggtgaatggagtatcgtttacccttccgtatgctgtttgggtctgcgtcgccggaaacccggataaacaagcagtcgccgatgcgttgtgggccgcccataacggcggaactccatgggactatggtgcgacgaacaacggcgtcccggtggacggtccgaatggcgttcctgtgcgcgatccggcgtccggtcgaaagtatgtcgtgaagtggaccactccaattatgtacgatggatatgttaacgtaacagtccagcaaggttcctcctctgtagctccggaagccattcagaacgcagtggtcaattacgcccaggggaaagtggaaggggaagaggggctggtggtgggcgcgagcctgtcggcattcgaagtcgccggcgccatcgctcgcgaaattcccggcatctacatcaaactctgccaggtcgcgtgcgtcgcggctggctcgccggctccggcgccgggcgatttcacttcggaatacgtcatgagcgcattcggccaggctaccatttccgttggtaacgttcgggtgactttcgtatgactctgcctgcgtacaattcggacatccaacaagctctgaaatggctccataaccaggcgcctggaatcaccggcctgatccagagaaaggcgcaatggtatgacagattcagccgccaattctgggccaactgggagcgcgacgttttccacttgaaaactgccaacccgttcggccttatggtttggtgcatcatcctcggcacgccttcgaaagggttcggcctttatccaaaaaacagttcttgggcattcggtcggctacgccagaacttcatctatagcggtacacaagttccgccaccggcagacgcatcgcctggcggcaacttctacggtggcggcaatgccgaaattctcaacttggacgaaatcaggaaagtgcttcagctaagatatgtagcgctgatttctaacggctcgattgcatatatcaatcgcatgcttcgttacatattcaatgatgatgagccatgggacgaggcgaccggtctgtacttctatctcatggactcaaccggcgagaatggccctgtggagaacttggcgatatatcggaaagattgggaaggtatggtgctgttgtccagttcgcccagaacgaaccacgtgctgacatcgacccctgccagcgacgccgattggccgggagtcgatccggccgcgagcggtattccggtaacggtcgaaacggcgtccgctacggccccggacggctccgctacggtgtgcaagcttactaagccggccgggagtaccgcttacgtctccgcgccgatagatgggccgctggggtccggtagcactgtaacgttctcgttcttcgcgaaagccggctccacccgtttcattgcaattcagtcggctgccgatttccccagtcgagccgatgccgttttcgacctggattccgggaacgtaatcagcgatcagatgctggacagcagcgtggtaagcgcccgaatgattcgtctggaaaatggctggtggcgttgcgttctcacgaccaagaccgtcagctcttcgttccgcgctgcttacgtcgctccggcagaaaccaacttcagctggattgattcgaattccagcgcggcgattgacgtgcttatctggggcgctcagatcgaactgggtgatactccaactggatacttggaaactaccggggcgcccgtaaccatgaccgattatgttttgcagaacgcccagaccggaacagtcaagttcacacagccccttccgaccggagtagaagcgtattggactggagactggaaaggcgggactgcagcagaaccggccagattcgcagtcgggaatgggactcaggatacgtttactctgtcagaccccgcatacatcggcctacccaccagtggggcgttcaagctagaatacagggttggtccggcgcttaatctgtcgccgcaattgatcaacctcatgaatgaccgggcagttggtattatgccgacttgcgccggttgcgatgtcaaagtcattcaggagtaatgacgtgatcacacccgaactgatccccagtccgtttgccgctcagggcgataaagacccgattccacaaacctcctccactggcttcgcaaaccttcgcgacggctatacgccggactacgaaatcagcctggcgtcgaacaacccgcaggccaaagcggtcgagcggaaaattcaaaaccaactcttcttcatcgcgacccagaacgcacaggcgtggcagcgacaaatggcgccgccgtggtttcagggcatgcctggcggctacgaacagaatgcagaagtcgtgcgcgtcggaaatgacggcataatgcggcgttatcgttccatggtgaatgccaatgcgagcgaccctctcagcagcacgacttgggaagaacaacccgcatggtcggcgatgcgctccaacatcccgatgccggccggaggcccaggcctatcttctggcggagaagtcatcacgaccggccgcaacttcaacgacctgttaaatgggacgtgggagttcttctctgattcagtggttatcgcttctcagaatgcccccgtatatccggcgtccgctggtgccgctgctggcatgttggaggcgaaatcttggatatccgggtccaatacgttctgcgttcaacgctacactgaccgcgtcgggaacgtcgctgtgcgcgggcttaatgccggggcatggaccaactggatgtatgctgtaaacgttatggccctccaacaaggtcgagtgacctatggagtcgcggccggcccggcgaacgcttacacgttgacgctcgttccgcagctccaaggcggcctggtggatggcatgattcttcgggtcaagttcaacaccatgaacaccggcgcctccaccatcaacgtctccggactcggcgccaaagccatcgtcggcgcggccaacttccctctcaccggcggcgaacttggccaaggactcatcgctgagcttgtattcgacgcagcaggcgaccgctggagaatcctcgcaggcgcgccacgcatccaagttggcaacgccgatcaagattaccaggcccccagctggaaacaggtgaaggattacgtcgcgtcccaaaagctgactgaagtggactgggctgacgtcgtcaacaagccgaacgtcgctatccaagacactacgccgtggttcgccaatctggagttgtctgacgctcggcctttcatcgatttccacttcaacaacaaccgcgccaaagacttcgactatcgctttatctctgaagctgatgggtcgatggcgttctactctcgccaggggtcagctggtcctacccaggatatcctgttcagcaggtcgaatgttacattcctccagccgcgactggatgttgcgaaaaacctcgcgtacatcgcgaactctggtcccctttggcagaacaccactgccgatcagcccggttggaagttcacattcgcgcaaggcgtggacgcgaacaacaacgcggtgatcgcagtcaataccaccaatcctgacggctcctatcgctcacagataatgcgttgggactgggcgtccacgaatgtaatcttcaacaatcgtccgcttttcgccgggcaatatgttccttgggattctggtaacttcgacccttcaacaaagttgacagtcaatgccacgaaccagatcgccgggcccaccgggattcggaacaccaacggcaacaccggcaatatgaacacatggggttccggttccacgacggcatcctatggcaatgctgccatccagatcttcgggaaagggggcggtgagcctgccgcgatctattttgacaactcccagaccggatggtatctgggtatggacaaggatggacagctcaagcgggccggctggtcactcggcaacaactcttatgtcatcaccgatgaattgaacatcagaaaccacatcaacggtatggcagcaaggccggtttggggcggaaatgaattctgggggccgtggaacttcaatccgaacactaagcttacgttgggcgcattcaacgatagccaacacaccaggatggtaaacagcgccgcgaaggacgtagggatagccgccatgacaagttatggcgacgcggctatgtcgttcttcaactatgaggcttcgacgccgaccgggaatcgtgctgctgtaatttcgtttgttcgtaacggggcacgaggcgttctgttcggcctggacacggacaacaagctgaaatggggcggctattctctaggtgccgtcgcgttcgagattgccgactccaacaacctcatgagcctgtggtcatcccacgctgccgcgccgaactggaacgggcagaccatctggaggtcgggaaacttcaacccagacaccaaggcgactttggcagctcgcaatacgacgtcatcccctacaatattcagttatggggcgtccggaatcgcatcaaccggacaggtcggtgcgttggttgtggaaaacaacagcgtcaccaataccgcagccgccatcacgttccattcgccgcagaaatatcaggtcaacttcggcctggatgcggacaacgtggtaaagatcggtggcggcacaatgggcggcgtagcatatcccatcatccactccggcaactacaacaactacatcaaccaggcgctggttcaggtaggtcttggcggcgtcggttcctacgcgatccttgccgtatttgacacctccgcgccggcagcgtccattgcccccggaacgatcatggacagttccaagctgttctattcgtcctgcgattcgacctatcgcagcagcgccagtccgacgggcacctggcgctgcatggggtatgtgtataaccgagactccaccaacggcgactcggcatccctattccagcgggtaacgtaacatgaaatggacgcgaatcagaaaccctcgttggctggatgagacaaatattcacgccatggttactttcgaggggattggagaagttcctttcaccgccaatccgcacgacgtggaggcccacggaagggccattcacgctgcgatcctgtccggggcgcacggacctatcgccccagtagactcgacgcgggagcaggccttgcaggacgctatacgagcaagggaaaagcgggctatccttcgcgatacccgatggcccatagatcgtcacgacgagcagaggcggctgggtatcgaaaccacggacgggcctgggctgatagcagcccttgttcactggaggcagcagattcgcgattggaatagcggggatcggccgcgacttcccatggctctgaaagcaatattcaaaaatcaggagtattgatgaaaatcacgaaggatattctgatcatcggaaccgggtgcaccacggatcgggcgatcaagtggctggatgacgtccaggcggccatggacaagttccacatcgagtcgccgcgagccattgcggcctacctcgccaacatcggcgtcgagtccggtggcctggtaagtctggtggagaatctcaactacagcgctcaaggattggccaacacctggcctcgccggtacgcagtagacccgcgagtccgcccgtatgtcccgaacgctctggcgaaccgcctggcccgtaacccggtcgccatcgccaacaacgtgtacgcggatcgcatgggtaatggatgcgagcaggatggcgatggttggaagtatcgcgggcgcggcttgatccagctgaccggaaagtcgaactattccctgttcgccgaagactccggcctggacgctctggagcaaccggagctgctggagactccggccggcgcggcgatgtcttctgcctggttcttctggcgcaatcgctgtatccccatggcggagtccaacaacttctccctggtcgtgaaaaccatcaacggtgccgcgccgaacgatgcgaaccacggccagctccggatcaaccgctatatgaagaccatctccgcgatcaatcaaggctcctgatattcaaccccaaagaaaaggccgcttattcagcggcctttttgctttccggctttgcctcttcaaccatcttgacctcaaccggcgcggcggactcctcctgagtgatcgagtccacatagttccctagtgaactcagaacgccgattaacagcgctctcaccaccttgtccttgactgtctcgcctatgatcttggtcagaacggatattaactcttcccggagtctggggctgattcttggccgaaagcgcttgcgatgctctttgcgtttcatgtttagtcctctgtctgcggtcttctcctcaccccgataattgcttggggatgctttgtgttaatcggaagggtcgggcgctattataacccgtcgaaaatgctagcgcttaactgtttaacgatacgcaccgcgatattaaatcgccttctttctggccgaggaactctggcggccgggtccggtctaaggcctaatttgtcgacatcaaaacgagaaaacccggatcgcctgtagggtaaggcgtccgggtttatttcgatctagtgtccgctagaatcagtggcttccgccccatccgtccagccagcaatcgaagacggcgtgtctcggcttgtccttggcgccatgggagaagtgcttgaatcggatgacctggcccttgaggtattccctgtcattccagcggcgctgtttctcgtcgtgggtcaggctggaggccgacacgttgaaggtgacgccaggccacagacgttcgttgcggcagacgaacgcaccgaccattccggacggcgacaggttttctgcgtggctggagcgggccgtgtggccaagttcattgatgaaagcttcattgttgttgtgcatcaactcttccacgtcgatgatctcagcttcatcgtagtcgtatcgcttgactttcacacagtgcccttccttggcagtcgagcgaccgaacttgtacagtccatcagcgcgcttgcccatggaaccttcgaatcccagcattgtgtggcggcgctcgacttcgctgaactgttcgatggaagtcaccagttcctgctcgaccaggtgaatcctctcatagccgaggcagtgacgaaggaagttcacgcgctcggccgccctggctaggcgatcttcggtcggtgcgcgaggatcggtgaaatcatcgaacacatggaaagaccagtccggctcaccgctgtggcggcgaagatcgccggacgacttctggaaaactttcgggtcgctgatgtcgccgcagaccagctcgccgtccaggccgttgaacagcttatcgctgaggtattcgtagatcgattgattgttctgccgcttgagttgacgggtcagcgcctcgccttcgaatacgaagcagcgaaatccatcgatcttcggtgagaaatacatcggcagttggccttccagcagcttcgggtcaaaattcgatgcgagcatgggtttcatacagttctccagaaaagaagcccggcgaaccgggctaaatggcggtaagccggctcagatggtttcgttggcgtggttcagttcggccatgatcgacgcatagcgctcgtccgactccttgatgaacacgccgtcgtacatgacgcctttgcgatccttgatggtgtcgtaggccgcagcgtagcaggcgagcatggtagtgtcgtgctcttccgtcacatcgaacagagtcatgacggccaagaccaggctcttgatggctaatccatgatttccgcgtgccagcgcgccggccagatgtccgaggtgctgcaaatcgtcgccgtaggtgggatgaacttcgacagtctcgctgaagacagatagatgatcgaacagattttcaccgagttgcgcggccatgatcgtggcaaccaccattacgtcgccgatgccgtctttcacctcgactggtttgttataaacccaggcttcgcaaacttctgcgaactcttcgaccaacttcaggaattgatccttggccgaagagcctttgatcaggttccggtcggaaccccatttaacaaccaggtcgtgaagttcgcgactcatgatttgttcgatattcattctttcgattccttttggatttgggattttactgcgttgattatggacgccgtgctctggcgcgatccatccttggtggtgccgaagtagaaggccattaccgacttcagctcggcgaaccaatagccgatgatggtgccgatggcgacagaggatgtcgggtccatcagagcctcgcggccgaatgtgaagattgcgatgatgatgagaatggagcctgtcagaagagcgaatgtaatcgccgggcgaacgaaatcgttctgctgcgccgcaagcctcctcgcagaatccctgtcggccgcctctgcggcgaactggctaagctcggcctggagctggttctgctcagactgaaggcgattttgttcggcttgaatcgcaagctcctggagacgaacgcgctcggcgctctggagttcggcgagacgcgctagagcttccggattcgcgtctagagcgctagcgaccgaggctgggtcggccttcgaccccagcgccgtcgcgacgatagcgcccacggcggcgcctgcaggcccacccaggagcgaacccagagccggggcagccgcgccgatcttactacctatgtctttccagtccatttcgactcctcaaaagaaaggcgccattacagcgcctttctccggccggtgatttagaactcttcggcttcggtcgcatcgccgacgccaccggcgtcactgcgaggctgttcctgcttgctgtagtccaccttcacctcgccgccgacgaacgacttgtacaggtcggccgcagccttgaagtgatccgggttcttcaccaggccttccagctcgaactggacgccggaccagctacccttgtcgttcgacatgcctacggtggtcatgcggaccaggttggcgaaagtcggcggggtgcgcaggccctgcggggtctgaacctttttctgggacagcgcggtcatgagcttcttcgaggccttgatctgcgaagacgacagggagatcagagcctggccgaaatcgccggtgtccggatcgatgacgatgacgtaatgaccacgggtgtcggcgaagtagtcagacttcttgtcgctgaccgaaccgtcttcgttcggcgcgtacaggcgtccttcgacttccttcaccttggtcgggtctttcatcatttccttgaagtcttcgacgctgatggcgcccttgaaaccgccctcggcctcgcgaccggcccagcggatgaactcgcggcggtacgcggccggaatgatcagcaggccggtcttgccgtcgtaaatcttgccggtgacggtgttcaggaacatgccggccttcgcgccttcgatgtacttcgggtcatcttcatcgacctggggagacatcttctgcagaacctggatgaaggggatggcataggactcggcatcggcgccttcgaagcctgcgccgtcatacgatcccaaatccatgaagtcgggaacttcggtagttgcgacggcgccgccaccggtggcaactgctacggccttggtttcttcggttgcttcggaagtttcggttttcttaccagccatgttaggctccttgtttgtcgaatttcagttatcgctaactgtgggtttataataacggaagttgcaactaagtaaagcaaattacatattaagatttgctctttttcaccttcggtttcgtgattttggcctctttgtattcgtgcacgccgatgaaatctggcagctcttcgcccttctccaaatactcgcgaccgaacgcctggagggtctggtagtggacatcgcggttgatggtggcgtcatagccggcctcaatgatagcctcggccgccttcttcgcatcttccatttcgccgcgaccgaattcggccagaaccttggtcttgatgatgccgtcgttgtcggtttcttccagccacttccagaacttcgatttgttctcttctttgacggaaatgatggccttcggctcgactttgaccgtgcgaccgtcagccagagtagtggtcttttgaccaagctcctccagcagctccggaatggtgttgcgcttgagggttttcagctcctcttccttttcggccagcgccttttgaagatcgaggatttcgacgtccagctgcgaagccttgtccaccaggttcagcagtcgatggccgatgtcggtggcttcaaccgccatttcatccatgacgccaaaatagtcgatttcgcccggcgcgttctctttcaagtattccgggatttcaagctcttgctctttcatgtccgcctccaacttagtgatgttcccttacttgaaccaagtattgagtagatattatgccgcatcttccttgatacggctactgatttacatattaaatttcgtcgcgagtgctaacgtcagcctcaaacacgccatcaacgacataacttgccaggttgcgtttccactccaagctgacctggattttctcgtcgatggaatccagacagatcaggtcgaagtacagaaccgagttgacggtgccgattcgatgatttcggtcttcggactgcatccgcagctcgttgtcttcgtcggtcgtgtagtagatggccacgtctgcggccgtgagcgtgatcccgatccctgctgcggccgggttgcccaggaacacctggacgcgcttggcctggaaatcgtcgatcaatttttcccgctcggcctctttggtctcgccgtagtaggtgccaaacgaaatcccttgggcctccaaatacgccttgatctggtcgatttcctgaatgcgcatggcccagacgatgatggaacgctccgggtcttcctccagcagaccctccagaagatcagtaaacacggcgaatcgcgggttgtcttcgggcggcaggatcaccggctcaccatagacgttgatatagccggacgcaacttgcttgagcttcgaacgcgctgccgcagcatcgaaagatacatccagcatgaaatcttcgttctggagaacgaagtgatagtcttcttccacgcgctgataaacctttcgttgctccggcgacatttcgaagtatatgcgcttgtacaccttgtccggcaggaatggcaatgcttccttcttcgtgacccggaagctgtgcggctcgatcagggatcgcagcttgtccaggttccggaataccgggcgcccataatcgtctttttcgacgagttgcggcggcatggtttgcttcccttccagcttgcgcatgatagcgatcattcgaggatcgtcactgggcaccaagacggaaaattcggccacaaacgcccgataggatttagtccccagaattccattccgcaagaattggaactgcatgaacaaatcggtcggtgcccgcgtcagaggagttccggaaaggatgcgacgggccacggccttctcgcccagctttacgatctttttcgcacgcttggcttgtgggtttttgatcctcgttgactcgtccacaattgcgcaaactttgaatgtatcaaggaatcgctcgacctcatcatagccagcctggtggttgattgcgtcaacgttgatggcgaagacgcgaagaactttttcatctgcgaacgtctcggaatacagacggtccaagcgcgccctggcctttttggaagtcggtcggccgcgccaatccacgctcaaagtcttgatcgcgacgtgggtgggaatctcgcgcagaatccagttggtgtggacgcctttgggggcgacgatgagcagcgcgtccacgcgcccctgtaggaagaggcgaacggcatcggccaaagtcgtccaagtcttcccggtgccctgctccatcaggtatgcgaagttccgtttgttcagggacgctgccagggcattgaattggtgctgcatggcctcggtcttcatgcccttgacgggatatgttttggctttcatttgttctccaaatcggcgaggaactgaacaatgttatccagtccttctgcatagctcgcaacttccaccaagtcgcggctgttaagctcgaacaaatcgaacataggattcagcagcagccaatcggttccgatcttggccaggacgaagccccggccaccccagccgatccgctcccgaagaaaagggatttgcccaggttcgaaacatctggccattgggcaggtggaagcgcgtttcggccactcctccaaagccttgaactcgacccagaactggacacctcgacgattcaggcagatcgaatcggacatgccagaccgccgcgtctccagaaagtcgatcaggattcggccgagcgagcgctgcttaaacgcattcgccgctttcgtttcgcgatcattcatcaccttcgccctctttggaaactttctctgcttgcgatgccaactttgacttctcgcgctcggtcaatatccgcttgacggccttcacgatgaacatgtcgatgccgctgagcctccatcctttgatcaggaaccaagcgccggtcggcgtcccttcagcaatctgctttccgtattgcagatatttttcaggccgaattctgaaacgtatcggctgatcaaccgagtcatcaacgcacatgatgtcgagaaactgcgactggcccttgtacaccgggtttttcccttgatcggccctcttcttctggcgaatcggttcgttctcatcggacagaactttcttcaccatcttgacgatgactaggccatcgtctccatcgcggatatcccgaatgttctgaatggggtttccggaagtcactccaaccagctccggattgtcataagcatgaccccagagcgtgtgagcttcgttcaagtctgcgaattgcacttcagaattcgacaaactagctgcgactttctcccaatcctgaagcgtcttcaggtgggtgcctgccagctctttatattgagccttcagctccttaagatcggccttcaactccttcagatcggccttcaacagtttctccagttctttgtcttggctgattttcgccgaaagaatctgggcttccagagctgctacatcagcagccttgtcctcaacatcctgtgccgatatcgggcaattggccagggcgatcctcgcggccttgacttcctcgcgaagacgcaggaaccgctcggccttcgccgggccgaagcctttggcgttcatgatgccgccgatcaggcgcccgtccgccaccacccagttgagttcggaatgctccgggtccagggccgtatattctacgccttctttggccaattcgcgaaggatggacacagtttgctggtcgtctttcgccgcccgaagacacgcggccgcgtattccaggcgatgatatcgcttcatgtagcaggtccagtacgtcaccacagcgtagctgaccgagtgggagcggttgaatccccaggcgccgaacgttaccatttcctgccaaacacggtgagcatcgtccggggcgacgcctatggtcttggcgccctcgatgaacaattcccggcgcttgttgaaaaattcttcgccctttcgcgcagacatggctttccgaatcgccgacgtttgttcccagtcgaactgcccaatgtccttcacaatggacatgatctgttcttggtacaggaaaactccatatgttccagacagatactgctcgacctgcgggatggtataggtcacaggctcgcgaccggccacgcgctcgatgtatttggtggccatgcccgaagacaacgggcctggacgggcgagcgccgttatgtggtcgatgttttcgaacgcggtgatattgatcgcattggcgaccgagcggacggcctggccttcgaactggaagatgccggacatcttgtcttcgttgagaatgtccagaaccgccttgtcgttcaacggcaagtcgtacagctcttgcgccgtcacgcaattagcatcttggatgacgcccagagttcgaagcccgagcgcatcgatcttgagaagattcagatattctgaatcgggcttgtcgagctgcgcgacaccttcagaagttaccgtgcagaagtcgatcacttcatcgttgcagaccaggatgcctgccgcgtggacgccggagtgggatgggtggatttcgaggtcgcccatgcaggcggacgcaatctcatacttttcacggaagtcgcggccgggctgagttttttcgaaagtatcctccaatccttttccatatcgttcgtccgccgatgtatattcgatgatcgagtttttgatgttgtcggtgtcgtggaatggaatgccgaagcgttttccgacgtgagcgataaccgacgcggccttgagtgtgttgatgttcccaagctttaccacgttccaagtgccgtatttctgctggagatattcgaacactaaatagcgatgggtatcggcaaagtcgatatctatatcgggaagatcggaacgggaaatgtcgataaagcgctggaagagaaggcgatgcgggagcgggtcaacctcggtaatgcccaggaggtagcagaccaaagagccggctgaagagccgcgagccgggccgaccagcatatgcttcttggcgaacgcaaccagatcggcgaccaccagaaagtagctgtcgaagtctttcagctgaatctgcttgatctcttcttggaatcgatcctcatactcctgggtccattccttgatgtggccgcgactgagacggtaggcttgcccctcgcgagccagcgcgacgatatccccatccaggtggatcataggcgccttcgccagtttcacatccgccaattgttcgactaccgcacgagtattggcggcggcggcatcgaactcttcgcgagtcatgatgtggcgtaaacggctccacaactcctcttcggtggcgatgtggcgaaggccgaccgattcccgcaccttccaggccgacgcgaaatcagcatggtcgatggacggcatgtcgttgtaagaggtaattaccaccggctttccgaatgccctggccgtctccatagcgccgtgcgcggcgaccatcgacgcgggattgatgtcaatgtagtcgattccggccagatccagatgggcataggcctcgccagcgaatttgatgacgccgtcagcttcctggaattcttgcggagtcaatccttgattctggaccgacttggaagtcaagcggtagaacttctttgtgtccttggcgagcacccaggctttgagcttcagctctttctcgccatcgtcggcgcatttgatcgggatttccatgccgaatccgcgaggcagttctgccttggtagcggcttgttcccaacggacgtggccccatgttccatcatcgacgatggcgacgaatggggattcgatctctttggcgcgctcgatgatctccgggaatcgaccatatgcggcgccgtaggagtaaccagagcgaacgcggagctgagggaaagacatcatgcggcctccattgcttgatacgcccgatacactcccatgcgcttgcagacttcgtggagcagccgcacgtcgtcgagcgcccggtgtttctgtacatatgggccgcagtagtgctcataaagatgttgcagccgcatgcggtggccgaacaacggcgccgactcttccacagtacagatatcgagcgatgggaaattgacttcgtccaggccgaacttgccgcgagccagatcgcaggccagcatgaacttatcgaatggcaggttgtgggcaatattcgcgtcggctctggaaaagaagtcgcgaactttctggcgctgatcgaggaaagatgggtgcttgatcaggtcttcgttcttcaacccggtgatcttggtgatgatttcctcgataacgattccaggattgcagatgaactctacttcatccaaaatcttttcgccatcagttatcacgccggcgaattcgattattctcggctgctttctcagactcaccctttggtggaacgggagtcctgtggtctcagtatcccatacagcgaatatcatgtttgttccctcttatgtcgaaaggccggctgctttcgcgaccggcctgaggagtataccgcgacggctgaagatttacgccttctgtccgtctttcggcgtgatgcggccggagcgcatggtggcgtgaacaaacgccgaatagttgatcgagtccaaggccgaatcggcatccttgaacccgctattcgccaggcgagtgagtttacccaccatgtgcatcacgaacagggcgagtcgatgatcatcggcggtcttcgccaccaggccgttcgggaagaggatttccatgatctttccgtacatcagatcattgcgaccataggtgctctggcgggcgcggaagacttctgctgcggcgtacagattgttgagaacatcttccgcgaaatcatcgggatgggaatcatcttcgcccggccagacggattccatggcgaacggcgcggcgtcttcggtcgggtctttgggctgagccgtttcagcgagcggagacggggctttcgcaaacgcctcgtcgagggtaggggcggagttcggggcggccgggaacggctcgcctgccatgtcgttgggcgcgctatcggggtcgctatcggccgcgacggcgaagaacggcgcatcgcaaccttccaggttcaggatgtaggagtcgatccccaggctattgtaggcatcgatgatgtcctggcgatcatcgaacgccgcgacgatcttggtgacgccttcgattttcttcaggatgtcgagcgcgactgcccgcttgaactgaggcgccggctcggtgttaccatacggccgcatgatgagttcatactcgcgatgttcggcgatgccgagttcgcggtggagcttggccctggtctggaaaaagtggttgtcggttcggccggtgacgaagaaaatcatgaggtcggcgtcgatggcattcctgatgcgacctacagcgtgcgggttgagagtgtccttgtcgagacgagaatgatactcgtcccattgccgttccaaggcgaagctcttgcggtggctatcgtcgaatacgcagccgtccagatcgaagatgatgatgccattcttgggtttgcgttccatattcagatttccttgatggttgctttctgggtgacggttttatcgatgaacgtcccatcagaagtgaggcggaaaacttcgccattctggctgaaatcgaacgattgcacgttcatcgtgatgcgaatggattcgctgccgttggtcacttcgacttgtgcgatgtcgccaactttctcgacaatgatcttcatgttacatggacttcccattaacggccacagggctggcctcttgtttttccgatccccagaaatcgcggcgcagttcttcctgctcggccgagcgatccatccatggacgatagaacttgcactgatagatcggtttcaccggcaactcaaccacaggaatctggccgggtttcgtctccagagcggacatgaagcggtcataggattgctcatgaatctcatcttcattcagaaccttcgatccatagcgcgggaaggcacaggagccagtagcgacacagtgcggctggagcagactatcgaacatcggatagacttccagaaccagtcggcgcatttcgcggaaggcttcctgatactccccttgcgtacgaacacacaggcgaactttcgccatgtcgctcagagtgcgcaaattgaacttggccgcgatcttcgtttccatgttggaaggaatgatggcacgagcatcctggagcgatgcgccggcctccaagagcttctggtaactggtctgcgcgtcggcgatggcatcgtgccacaggcggttcaactcttcgcgggcgtgataggtcgggtccggctcgccattggccgtagcctgctcatcgaaatcccagcggaatgcttccggctgaacaacggcgctaacctccagggcgcgactggtttcctgctggtaagcaccggtccgcgtccggacgagttggtgggtaaaattcttgcttacgccctcgatctggaaaatgaagtccacgaattcgaacggcgagcgaatggtgtccagcatgtacttccagtggtcgagcttttcggcttcggtcatggtcgccgggtcttggccgcgcatgcgggtggatttcgtccccaggaggagttcccaggcgttctgggtgtaactgatcagagaaatcttcatcagaaatcttccggaattggcgtgaaggtgaatttttctgtgagagcaagtgccaggccttgggcttgctccttacgaagtccatactgctccatctcttccttaagcagttcgcaggcctccagacgagactcatactcttcagcctcatgaactgacgagaagacggttccatcagaggttctgtatacgagttcaatagccatgatcgcctcagtagcagcggatgatttcggcgcggatatctcgacggtcgaggtagtgctcacgaatcttatcgcgggcgcgctcggcctcttctcgactgccgaacgacaggttgaacgaagtgaaaggcttatcgtccaggcgcccatcgccaatcaggtacaggatgcctaccagcacgaaagacggcgctgtctgtcgcgtttgcggcgggtcgatttgcatttctaggaaagacatgggaacctcttcaggatggtctggtgagtacatcaatagcgctcctgctgagcagctacggtttccggctcgtagatgagcatgtcaacgatttccgggcactggcctttcacccagtcgatggccgcgaccagtgtggtggaagcggagaaagagaaagtgcggtaagactcatggatgtacggcgaccccatcgaatcgcgctcggtcgtgcgagaaatgactgctttgatattaacgatccggcccatcttcggcctccactttagcgattatatctgacaggctcagcttctcgccattcaggaaataactggcgcgaaacttcctgtcaccctctggcccgacgatccgggccgttatggtgagactcccgccgccaagggcatcggtgtccctgaagaaagccagcagcgcccgcttgagcgctgcctcgcgaggatcgacggccattaacctaccacgttccagccgtgctgagcgcaccaaaccgcaccggcccctgcaggaaggctattcagaaggaatacaggggtcaggcggccatcctcggtcatgtggatgaagtagcgtgcactttcaccgagccattcggccttggcgatggcgcgttcaagattggccttggtggcgtaggtcttggtggtgtttttgtcggtggagaaggttacttcgcgggccattttgtcgattccttttggttgaagggtttcgcgtttcgatgagggaatactactctcacctgactcagaagtaaagcacttcgtgtcgattatttcacgaacatcttcttggccttctgataggacgaagaagtcatcaggcgctcgatgacatccatgtccgaaaccaggtcatccagaaggacgttgcgccaggtagcgaaccggccgagcgagaagatgccggcttcatgggtgaggttccagatcatggactcgcgctcgtcgcggccgagcggaacgattttgcctttggtctggatggtcggctcgccgtcctcgatgagatgccttttcctgatgccgaaggccgcgcaaacgtaatccatatcccagtcgctgtcccattcgatggtttcgattttaccatctaaagtctccactatccccttagtgatggattcgacgatcagagtatcaccggtgatggacgctcgaaacgttcccactttaggaccagggaaatacacggtctggaagacatcacaagggatggaaagcttgtatcgactcacgatgatggaggttccttcaccgaatgacgggtcgattcccaggtccagccctgccgcagccaggttggcgcggaatggcgcggtgctgatgacgttcacatggtcatcttgccggcgaagatactggaagaaagaggcgtcgaaaggacggctccaagtgatacgattcgcaagcttagccaccagctgctcatagtagtcggccggtgcgatccaacgcttttcagtcgccagattccagatggaccggtccgacaggccgcccgttactttcctggagtacatgttgcagtggtcgatgcgcggctgggaaatgaactcgccgtcgatgtagatagctttgtgtacagtgacttcgcggaacgggatgccggtgagttggccaatcactggcgagcggaatcgcagaagtgcgttgtggcgctccttattctccggcgtcgccgcgtcgatgatttgggcttgaggaaagcgatgcgcggcgatcagtccagcgagtccggcacctacgatgattactttctgatcaggaatcatgatatgttccttatgagtgtacaaaacttgagaggataaaaaagggacccattttcatgagtcccttgaagagctagacgattcaggctcagaggagcggcggcttactcctcctcaccttcggaaccatcggcgccctgatcttcaccgtcgtgctcctggccttcgtcatcggccttctcgtcatcgccctggccagcttcgtcttccttcgaagcgatggcaaccagatcgacccagcccatgatttccagcttgctcagatagctgcgaaccgaggtgccgtacagcaggtgggccaccttctcgccgaaggattcgatttcgaccggctcaccaacggtgcagtgctcgttgatgtaagcaaacaccttgccgcgagtcgagaaggcctgcggggttccatggccgtcgccggtcgggatgaagtgagtggcgcgggggcgacgcgagccgttggacttcaggtcttcgcggcgggcttcggccttcgcgcggcgctcttcctgctcttccttgcggcgctgcttctcggcttcgcgctctgccttcttctgctcggccaggcgcttgcgctcttcttcgcgtgcggctttctgggcttcctgcgcggccttcttctcttcggccttcttggcgcgctcggcttccttctcggccttcttctgctcgcgctcggcttccttggccttcgccttctcggcctgctcggcttccttcgccttggccttttcagcgcgctcggcttccttggcggcggccttttccttcgccttctcggcgcgctcggcttctttcttctcgcgctcggctttgcgcttctcttcgcgctcggctttcttctgctcggcttccttggccttggcttcggccttctcggcgcgctcgcgctctttacgttggcgctcagcggccttctcggccttgcgcagggcagcggcttgttccttggtcagctcttcgccttgggtctgttcgttctggtccttctgttccatgttcttactccgggaatgtttaaagggatggcttattggcctgtgaggggattatctctaaactaattgaagaagggaatacccttagcctgaactttcctaaatattttctttcgggaaagtccaaactctagggaacttatttatgttcgagaagttcctagcttttacgcaagaacagtaagtattcgattgcgcgagttatcccagtatacatcaactgactataagggatggacggcaagttttcttctaacatggcaacccgtttccattctgaaccctgcgacttgtggaacgtcatcgcccagccgaagtcgaatccgccaatagccttctgcgcctccagccgcacgtcttcctcggccgaaaagctcaaaggattgaacttcacccagcgctcatagttcgtgccgataatgcgaactttggcgaacaacatttcgtccggctcgtcatcatcctcttggccttcggggaccggcttgagttcgagcaggatggcttgctcgccgttcataatgccatattcgtgctggttcccggtgcaaaccagcttctcgccgatttccggttgtccacccttgtagccgaggatgcggcgcgccctggcgttcaaacggcggcgagtattgttgtaggcgcaaaggatcacgccatcatcgtccaagaacgtccgcatttcgtcgtccgacatgtcgaatccggcccgtaccagaatgtcgtcatactcgcggcagggtaggcgcttgccctggcggacgaacatcgacgcccgaacgatattgccggcgttgcgctcgatttcggtcatgatggtgtcacagctgttctcatggaaaatctggacgccgcgcacaggaggaacttggccaaagtcgccaatctccagaaccggaattcggtgcgacagcaagcgctcttcatcccactcgccgatcatggacgactcgtcgagcacgaccaacttcggcttctcgtcgagcgagtctttgttggcaaacatgatttcgccgtcttcatcttcgccaatcggccgatagatgaagctgtggagggtccgggcattggtgcaacccttctcgcgaagccgcgctgctgctttcccggttggcgcgacgaagaccgtccagtccatcgagcagcaaagttcggcgatgatcttcgcgatggaggtcttaccagttccggcgaaaccagcgagtcgatagacctggcggcggtgcgctcgatcacaccaaccgcgataccagtccacaacggaattgatcgcgtcgatctgctgactgtttggtcgaaagccgaatcgctcttcgatctgatcgacggtgaagttagatgctgacatatttgcgttctccaacgctaggtttaattgaatcgaggctcagtttaagcacgccgtccacagaccagccagtatcacgacgatacttgcggccttgcggatcgacatagaagttcttcgtgcgccgcagcagaacataatgccaagcagctccaagcgcgtggacccttcctttatacgggaaagccttcgcctgctctgcggcctctttggccccagggagccagcggacggtagaaaggaccaggaccgcacccttaatagcctgggaagcggcgcggccgtcctgtgggctatagcgatgtctatcgaagtctacccagtggtggttgccgcgccggagcttgaccgttcgggatcgcccctcgaacaccaccgtgccttcgtgagtaaaaatatgttccgccatcgaatgttcctttataacgtacagttatgctttacctctgcgcaggaagagtatactatcagctgactcgccaaagcgagcgaatttaatccaactttacttcggcaggaaagtggccgatactagcgccgccgcctgtactgccctccaaaacagaggatacattaaatgcaagaatgcaagatttcccgcgaccaactcccggtcggtaatccgaatcccaatgtcgacaagacccgcgacccgaacctgaagcccggtttcctgcgtcgcagccgcgagctggaaccggcgctggcagttcgcattcgtcgcgagctgatccacgccgaagcgtccgacttggccaaggccggatgggtcaattcacagtccagcctctatggatcgaaagccttcccgcgccattccgtcgttcgcgttaccggagttccggaagatggagctttcatcggcatgctgatcggcttcatcgagcatcgcgagcatggcgaatgggcggtcatggaagccggaacgaaagaaggcggcgcagtcatcatcccggtcaatcacatcacgcgagcgtcattcgccgaagccgaagagttcgccgaaaagtgggagcggaacttgggctggcgcctcctgcgacagctccgcgagtgcggcgccctggccgggactgaagacgagttcctgcggcggatcatcaatcgatacgttcgtgatcgcacgatcctcgatcaccacaaagtcggcgcggacaaaatctatactgatgcagtactcaaaagcatcggcgaaacatggccgaagattccttcggggaaattcgtcggacaccgagtcgcgcagctcctgatcggccacaagctaggtcgagcggggaccattctgaatgacctggtggacttcctggagaagttcgcggccgggcgcgataaaattctcaacatcgccatctgtaattgaggtgaatgaaatggttgacttggaaaagctgagtccaaagctgagtcctcggcagcatgccgttctactggagatgtacaggcatcctgagcatccagttcacagatcgccaacgaatttaactcttaaggctttgagacgaagggggcttgtcgagctatcctggaaggattccgtggctggatatatgttcggtcgccaaccttgctggaaaataactgatgccggcataaggcgaatcctgggagtgctggggaataatatggaaaaagaacaaagcgaagatcgcccaagcatccctgagtttgagaagaccgacgccaacaaactctatgatgctctggagacgatttcgctgctggagaagaagttggacgaatccgaaaagcgcgggagcgagctggccgcgagctattgtgacggcgtagtcggcgatgaatacggccatccttattgccgttataaagtggaacgcgacgccgccttggccgaagtagagcgcctgcgagaatcaaaaggcgatccctctggcagcttcgacaggtgtatgaagatgatgtacgagcgcgacgagaatgcaaaacgactcgacgccgccttggccagggtcgcggagctggaagggaagttgacggactgggtgcacgaagggttccggctcaacgaggcgctagcggtcgccaaggctcaacccagcgtgccggaaatatctggcatcggtcgcgatgccgaacatcccagagctgtagtgctgtatctgcgtaacgaacccagcgatgaagatatgcgagcaattcagaactttttgcgcgccatggccgcccccgctcagcacagcgtgccgaaagcatggctcgacgttcaggcagagcgccgccggcaggtcgaggcccaggcgctaaggcaggaagtcgcagcactgcgcgcaagggcggatgttgtgccggaggtattcgggcttgagcggtaccgcgtagaaaaaactgggaagggtttctggccatactgcgtgcgtgcgggggatggaacgcgtgaactgttcgtcggccacttgaagcagtgtcagcgggtagcgaccgaattggctacggcgtttgaagatgggaagtttatcgccgcgcccggcagctcggctcagcacagcgtgccggaggggtggaagctcgtaccgatggacccgacatcgcagatgacctatgtcggtcagtccctgcgttatgacgcggtaaacagcatcggcgagatttaccggcaaatgctcgccgtagctccctcacccatcgatccggccgcgcatcctcagccgtgccagcaaccacaggcccatcctgcccgctgcgggtgcgagcggtaagtgccaagtaaggaattcatgtaatggaacagaagaaaccttcaccagtagatggagtcatcatgaccagcctcgacgttctccggaaagcacagcccgaagcccaggacgagtatgccgtgtccatgttcgcaacggcgatccgccagaaaatgcagcgctcccgcgataaaggccgaggcggctggatcgactgcgacgaagatattctgatcaacggattcgccgaacatgcgctgaagggaaatgagaacaacctcttggacctggcgacgttcctgatgttcatgtgggtgcgcggcatcgacgatgcgaagattcccccggcgctcgaaaaggcgcggcagcacaagatcatggaagcatggagtcgggtccacgaagatggactaaactccgccagaaaggcgagtgctgcgcgacagttcgtggaagtgcctcgacgcaaggggcgcccggagcgacttgcatgaagcctcacgaaataagactggcacaggccgaagagttcctgcgcgaactcggccgagggattccggacgacgaacgggtgatggtcggctacgctgaagaggccacagtccaaaccgacgagaacggtcgcaagctcaacgccggctggtggcctgtgccctggaaggaagggaaatacatcaactcccgatccaacgcctacgcctgtatatcgtcgtccatcaagacgcccaacccgaagaccggccagatgcgatactggcgcggcgaagcctctttcggccacggcctagcgttgatggttgatgacatcggctccggcaaagggtcaaagggcgacttcgaccgcgacgagttccgcgagcgacttgagccgaccgcgattgtggagacttcgccgaacaactaccagttctggtatttcttcaaagagccgatgtcccacatgctccagttcaaggcgctgctctattcgttcgtggaccaggtgctaaagaaaggcggcgacaacaccgtcaaggacgtcagccgttacggccggatgcccttcggcttcaacaacaagcgcgggaaagacggcaagttcaaatatgccgacgaaaacggcaagcccgaactcgtgcgactgttcagcgccgactattccaagcgctactcgccagaagagatcgcccaggcattcggcgtccgcatcatcatgccacagatgaagaaggtggagataaaccgcgacgattgggtgtatgaccaagtatggctgaagtatgccgagcacatctgcacgaaatacaagatgggcgaagcggcaggcggccaggtccagcagaatatgtccggcaaataccgcatccgctgcccgtggggagacgagcacaccaacggcgatccattcggcgcctactttcgcggaccgatccctggagccgagcacgaatatgtgttcggctgcggccacgatacttgccgcaaagagcatcgccggacgtgggcggccttcacggatgaagtcgtgctaccctatatcgtcgaacaattggaaagaatcaaccgccgtcatatcggtgaggagtagacaatatgcaaaacgatcctggaatcctgattaccgccatcggcttgctgttcctcggccttatcatcttcttcgaaggcctaaagggatggaaaatacaagtcgcaaacttcctcgcgtcgcttctgtgcttcttcttcggcctttctgctttgacgttctggttcgtcgttgcgtttgacgtattttaatcgacgaacggtacagaaattttcggatggggacggaacttattagctatgccggtttaggtaggagataatagccgtccctttcgcctcaatgtgtagaggcaatgttgaatccgatcatgtaaagcagaaggcggcaaacctaacatgattatcgacgaagataatatttttgatgatggcgaatcagggtccagtgagtttgatctcacgcagatagaagatgctggaatggaccctttgatgaccgccgcgagcaaggcggccgatgatgcgattgcgaggaacgaaacgcatcgcgcgcaaaaggcggcaagatacgccgaggcgtatgctgaaccagacttgaggaagcgagcgcggttgttgatgctcgaccaggcgttcgatcttccggtcagccgggtggtgaaagggccgttcgatgacttcatcacgaaatacagctcgacgtcagacagcaactacctcgcggtctatgatacgttgttctgtaagggcgacggaaccgtcccacacccgcacttcgacgagtttcgcggccggctggtggaccatcgcggcgtggcgttcaacaacaagaccctcgatccgattgacctgatgggcgccctcgcggctgcggccttggacgatccctcgattaagaagacgattgagacttgctgcgtgtgggctcgtcgatatcgccgcaactctctgatcgagacgttcgagaagaagataccggagtgggatggtgaagagcgaatcgacacgctgctgatcgacttgttcaaaccgttcgacaccgaactcaaccggatggtgagcaagtatttctggctgagcttgtactgccgcatcaactaccctggaatctcggcgccgatctcgttggcgttgattggtgggcaggatgcggggaaatcatatttcggcttgctgatctgtaaggaactgtccggtgggcgcgatctggctccagttcagctcgacctgagccgacacgaccagacgccgttcctgcgcaacatcaccggcaactcggttattgcgaacgtcggcgaaatgtccggcttcaaaaagggcgacatggaacgcatcaaagaattcctggtgcgatcttcggatacattcgatcagaagtttgagcctggcgaaacgatcaagcgacaatggatcaccatcatggacggcaacggatacgatggactccagcgggacgactccggcaaccgtcgattctatccgatgttcgtggcacaacttcccgacgaagatggaaagccgaactgggttaagccgggcgatggtaatgaaccgttcaaggtggacttcacagacttcggccgcaagttctggcaggctatggctgagtgccgcgcctggatcgaagagcatggcgtcgatggatacctgaatatggtgtcggaagctaaccgcgaagtgcagaacttctctatttcggaaatggagaatgcgcgtggcgtggttcgtgatgatacgattgacatgtatctgatcaacgttctgataagttgcgagttcgaagagatcaagccgggcaagaattccaagaatcctgggtggagggctgacaccgtcaccattctgaaatggttcgatattctcgccaggaagaagccgatttctcgccacttaactccgcacctgaaggcgctggggttcgtcccgaacaagaacggcctggctggttggtgcctgcccgtcgataaggttgcgcctggatggacgaatagtatgcaaaccacgctgccgccgttcaatgatgcgcttgtgtacttgctgaggaagggcgacccggatatcactgatgaggctgcaatggcaaagattcgggcagtccgggccgagcgagccaagattttgggcgaggatttctgatgtagtggtggagtgtacttggattaggccgccttcgggcggtctttttctttggtgcggcgtacattagattccggcgttgggcgggattggtagaagtgaatacagtaatttggaccagtttcgagcgcgaataatggaaagtcgatagattttcggtatcggtttagcgtgtatggtggatggattttgcgtgaaatgttgagaaattgcgtgtttgaggtggacttttcgtgggaaatagccgcaaattactgtatagcgattctgagcggtaatttgggaagcctactgccgcgtgggttagcgggccaatttcctaatttccggtttttcgagcatgggttaaaactattctacagcgaaaat

SEQ ID NO: 36 - DNA, 1083 bp, Sphingomonas sp.
  source 1..1083: mol_type = genomic DNA
atgcaccccttcgatcaagcggtcgtgaaggatccgaccgcgtcctacgtggacgtcaaggcgcggcggacgttcctgcagagcggccaactggacgatcgcctcaaggcggcgctgccgaaagaatatgactgcaccaccgaagcgacccccaatccgcagcaaggggaaatggtcatcccgcggcgctatctgtcggggaaccatggcccggtcaatccggattacgagccggtggtgaccctctaccgcgacttcgagaagatcagcgcgacgctgggcaacctctacgtggcgaccggcaaacccgtctatgccacctgcctgctgaatatgctcgacaaatgggccaaagcggatgccctgctcaattatgatccgaaaagccaaagctggtatcaggtcgagtggtcggcggcgaccgcggcgttcgccctgagcacgatgatggcggaacccaacgtcgacaccgcccaacgcgaacgggtcgtgaagtggctcaaccgggtcgcgcggcaccaaacgtcgttcccgggcggggacacgtcgtgctgcaacaatcacagctattggcgggggcaagaggcgacgatcatcggcgtgatctccaaagacgatgaactgttccgctgggggctcggccggtatgtccaagccatggggctgatcaacgaggatggcagcttcgtccatgaaatgacgcgccacgagcagtcgctccattatcaaaactatgccatgctccccctcacgatgatcgccgagaccgcgtcgcgccagggcatcgacctctatgcgtacaaggaaaacgggcgggacatccatagcgcccgcaaattcgtcttcgccgccgtgaaaaatccggacctgatcaaaaaatacgcctccgaaccgcaggatacgcgggcgttcaagcccgggcggggcgacctcaattggatcgaatatcaacgggcccgcttcgggttcgcggatgagctgggcttcatgaccgtgcccatcttcgatccgcggaccggcgggtcgggcacgctgctggcgtataaaccccaaggagcggcagcccaggcccccgtcagctga

SEQ ID NO: 37 - DNA, 66632 bp, synthetic construct
  source 1..66632: mol_type = other DNA
aatcctaatagaaaaaatctatcacggacgttacctatctttaaaattaataaaattaatagtaatttggtaatttggtaaactttagtatttgaaagcctcgcggcactaagcttgtacatatcccgtcaagtttccgattccagccagctcgcggcagggtcgccggaaacttccggacttccaatccatgggtcgcggcaacaccacggcggactaagcggcaagtgccaaaactcgacgaacggaaccggaaatttgggagcgcgatagaatcgctcagctggacatatttctaacattcgatttaacactcaacccaaacactcaccaccaccatcgcccgccaccagccaatccgatcctcacccaccagcagaccgcccatataacatcctataacaccacctaacactcattcatcatcaaacccacccagacctacagcccacccacaagcagcccatagacgcgatccctggccccatagtacaatcgcgccatactcagtgtcgcgacagagcaccaggccccatccaccaaccgagccaccgcgacgactccagaatcgaactcagggacgcagcaccaaatgaccaaattctacagccccgacgatctagtcacgccacaggaattcgcagacccgcatttcgcggcgatcaaccaaaagcgattcgacctgtacatcgacctgcgcgtccaaggttacagctcctggcgggtcttccgggccatctggggcgaggagcatatggacggtcccgcgcaggcccgcatcttcgcgatggagtccaacccgtactatcgcaagcagttcaaggccaagttgaacgcgaccaaaacgtccgatttgtggaatccaaagacggcgctccacgaactcctccaaatggttcgtgaccccaccgtcaaggactccagccgtctgtcggccatcaaggaattgaacgttctggctgaaatcacgttcgtggacgagtcgggcaagacccggatcggtcgcggtttggccgatttctacgcatcagaagccgaggctcagaccgcgaccgtcgctgctgcggccgaagccaatggctatgttccggaaggcgaagagggcgatttcccgtccccgacgccggaaccgaccgaggaagatcgcgccaaccccatttagacataaaataacggctaaggatttaaggtaaggaggtttatttatgcaccccttcgatcaagcggtcgtgaaggatccgaccgcgtcctacgtggacgtcaaggcgcggcggacgttcctgcagagcggccaactggacgatcgcctcaaggcggcgctgccgaaagaatatgactgcaccaccgaagcgacccccaatccgcagcaaggggaaatggtcatcccgcggcgctatctgtcggggaaccatggcccggtcaatccggattacgagccggtggtgaccctctaccgcgacttcgagaagatcagcgcgacgctgggcaacctctacgtggcgaccggcaaacccgtctatgccacctgcctgctgaatatgctcgacaaatgggccaaagcggatgccctgctcaattatgatccgaaaagccaaagctggtatcaggtcgagtggtcggcggcgaccgcggcgttcgccctgagcacgatgatggcggaacccaacgtcgacaccgcccaacgcgaacgggtcgtgaagtggctcaaccgggtcgcgcggcaccaaacgtcgttcccgggcggggacacgtcgtgctgcaacaatcacagctattggcgggggcaagaggcgacgatcatcggcgtgatctccaaagacgatgaactgttccgctgggggctcggccggtatgtccaagccatggggctgatcaacgaggatggcagcttcgtccatgaaatgacgcgccacgagcagtcgctccattatcaaaactatgccatgctccccctcacgatgatcgccgagaccgcgtcgcgccagggcatcgacctctatgcgtacaaggaaaacgggcgggacatccatagcgcccgcaaattcgtcttcgccgccgtgaaaaatccggacctgatcaaaaaatacgcctccgaaccgcaggatacgcgggcgttcaagcccgggcggggcgacctcaattggatcgaatatcaacgggcccgcttcgggttcgcggatgagctgggcttcatgaccgtgcccatcttcgatccgcggaccggcgggtcgggcacgctgctggcgtataaaccccaaggagcggcagcccaggcccccgtcagctgatgattattcgccagcttcgatgatttcgaagttgtatttgacgccttcgtgctcgaaagtcatcttgccagccgccttcagctgcatgcggaagcggatatgtttcgaagaaggcaggccgaactcgatgaatgctgcgttggtggaccggaactcgccgcgcttgcctttgacagtcacagccacgccatggcgctgagtgcgtttcttggaaacttccgggtctttccaggagttggcgatggctgccgacaggtctttggactctttggctttctccggagcgttcttggcctcttcgcgcatcttccggatttcttccagcgcttcctcttcggtgatctcttcttcaggcttcagattctcttcctcggccttctcttcttccttcttcttcttggaagtgcgggttttgtagactttggccggggcttcctcttcctgaaaggcttcttcctcggccggcagagcattcaggatggcgaggcagcgacgctcagcagtcttgcggtcagagaaacgcttgacggtcgcatcggcgttgtgagcgttgtagaaggcgaccagttctttcatttctgcgttctggatgtcgccgaaggttttgatggagttggtcattttgcgatcctctgttttggaagatttcgttcgggcttcggtttgtcgccccgttgaaagagattatgcctaggtcgatgctgcgtgtctacatttatttcatcagattgatcgcaaagccgacgaacggttgtctgatgtgaaaacaccgcagagcaggttgcggtgtttggtgggcgagggcgatggtcagaaagtcgggactgtgatcggctcgattggcgggtcgccgggcctgtcgttgtccgatgcgggcgccgggctggaagggatcgcacccgaccgaagcgccagcgattccgactgcctgcttacctgcggagctggaggcgcttttggcgcatgaggcgcgggcggaaccggcaggcctggaggagccatcggcgccctgggcggctccggaagatcgggcagatcaggaagactcggcgctatgccgccaaaggaccgctgcgaccgctgcgacggattgtcgccgaacatttcggcggatcggttgtccttgatgacttgacctatggcagtcttgtcgccacccggttctgctggatcgaagcccgtgaatggagtggtcacgcagcgcatgttcggatgggtcggcagattgttcaggacgatggagtccgcccagacatacgggtttttgtggttgccgggtccgtggctgatgatctcggcaggaatatggccgttcatggtgagccattccgccatcccttgccgagtcagcgggcttaccacgatctgaccagtggactcttcggcgacggcgaacagatcaccgagcttgaatccgatgatcatatagttggacctggactcgccgacgaaagccagagtttcgatgttgtggtggatatcttggtcttcccagatgtatagcatgatgtactcctcaataaggctgcttgttgtgctcgaccagagacataccggccggaactttgaagcggatgtactcgatcatcatcgccgtgcgacgccgattcgtgccagactcgtcattgacgaagagttcgcactgatgcggaatgactcgcgtcaccaggtcttcgcctttcgagccgtagaacttgatgtaggctgcgacgcctcgcgtcatgttcagatgaatcgtttcgcagagtcgctgcgcggccgacgcgctagacagatcggtcggactgaccgtcacccagtaatggccattttgttctttatcggacatcaactgccctccattgataaagccccctgccgatccgcagaggctggttgttgttagtcgcgcttcaacagaacgactttgtcatatgcgcgatatttaccgcgccagtcttcccagtgttcgccggccgggcagacaagctccagagtgatttcgtcgcgccagcattcgacggaaaggacaatcgccttgttcctggctgcggaatctgctctgagcttaatcagaatttcgtcgcccgttttcagttcatcgactcttaccactttggccatcatacactcctatgagaaggcgcggccaggacgatcccagccgcgccgatggattaacgtttgtgaaggatggacactgcgtccacgtcgaggatgctgatggtacggcgacggcgcggattgctgcgttcatggatgcgaatcaggtcagcggatggagcttcgtccaccacccatacatcttccggcttctgcgtccggagcaggaccgttacttctgtgttctgggcgaggccgttgcagatgaacaagaatttggacgagggagttctgtacatgtcgagattcctttttggacttcgggtccggcttttcagtcggtgaagagattatgcctgatcatcaccgtcgagtaaagcacttatggaccaattctccagttaaatggaaccacagcgcggtatcgctgatcgctacgctcccacgccatggcccttcttgcttacatacttcgaaccacaagctgatttccatccttgccaggactcggccgaaggattcgagccggcgccggctagccaggatgtcgacattcaaccgccgattgatttcgtatcggcgaccgtttatgacgaagaccagccgcagggtttgtccgtcaagacactcccagtatctggtttcatatcggagccaatagcgcttgccagccgggcctaccatggccatttaatcgatgctcctggccgcgccacgcggtccggtcggcgggacgggatcgaaccgacccaggatgtagtcgggccggcgcgcttcctgaggacacacggcgagaaggcgccatcctgcgtccagggcagactggagttcgtccgtgcagcagtcttccttgagcagcagacggttgacgttctggagattcggaccaggtatggccgatcctgtgagtgagttccaaccctcgattccactcaccatctccggttggttgatgtagcttacggacataccggccaaccggctcgcggccagctccagacgctccagcatgggtcgcagagcagcttccgggtcaatgtcgtcccagagaaggaccaggctgatgatggtatacggatagtccttgtccagatcccaggctgaagcggtcaggcggcccaggccgatttcattacacataacgggaacgtcgctgttccaggtggacggctcccagttccgctcaccaggattcccgattgttacgccttccaggttccccaggagaacgtggagcttgctgacatattccgcttccaaggctttccgctcttcgtcggtctggttgtggcgatagaaggatggagggctgacttttgcatgatagagtttcataactgttcctcggttttggaaggcttgaacgttagagaattgtgtcgcagtatttctcgaaaggactctgacgcttcttctcgcagatcgcacaggtgatttccaggtcgggcagctcgctgtaagtcttgccgagatacaaccagcgcttgcacagactgcggccgtccgacgtgaagaagtggactttgcgagcattgccgggttgcgcccagccgcttggtgccggcttcctgctcataccatcaccacgtcaatttcgtcggcgaagaagttaaagccaactccatctgcgtagccagtgtaacgcagacgagtcgtcccatcaatgtgggcttcctcgacgccgatgacttccagggtggtatcgttgcagtacagcttgacgaacatcttgatgccggagccaatcgccgcgaaggcgatctgcttgtacaggtcttgcttgatcatgctttacgctcctgtttgcggatgtattctgccctgacttcggcttcgaacttcgcccagagcgcgttgtctactggaccccagggaccggtctgagttccgtccaccggcgcgaacttgccaccggcgcgacgatacttggacagcgttctcaggctgatgattttctcttcttgggaatcgaattggacgatcacttgacatacttcccgaagtagcaggtgtggagtatttccaggcctttggagatagccttcagcttgatgccgaaattcttgatcgcccagtccagatcgtggtgatagaactcgatgatgttgacgatttgaccggcgctgtagtggatgacgcgaaccttgccgttccagcggaaatcttcgcggctgtttacggcctcgactgcgatggtgtcgtttctgccgatgttccatttggagctagtcatgtcgcaatcctctttttggagtgtttcgcgttcgatgaggtaactatacctcagccccctcatcgagtaaagcattttcttcagattatctgaaaccttttgaagacaggaattgccgccagagccagtcgatgtgttcgttgcagtaacgctcgccatcggacgacatagataaggcgccatcattgatgccgaagtgggccgcagcgagacattcgaactcgaactggagcgttcctgggcgagggatatgggacatggcgtatttctgcacggtcagtgatcctcagaaggtttagcgtttgcgatagccgctactttctgcataccgaggcgatagaaatcggcttctttcctggcttttgtaagctgctccatggcgtcgcacgccgtcttgtgctgggcattggcgttcttgatgctgccttccaggctcttgtccagctcttcccggagcgccttctgcgatgctagctctgcctccaaatcctggattctgagctggagctggcgatttgtctcgccaacctggttttcgctggcgatggagttctgaaggcattcgtcaaggcgagtgttttcgcgcaccagctgatgcttttcgactttcgcctttctgcacgtctctcgcatttctgaaagctcaatcgcatgcagatcgtcatccgggtctttacgctcttccttcgactccatccgcaggtagtactggccggctgcgaaggcgagcactgcctggtcggcatacgccgcggcatcggtcatgtatctggatttgtagcgaggcagaaacttgcactcctctggatcccagaggagactatcggcaataggccagaatttgcggaagccatcaggatcgacttctacattgaccatttgcagctggccggcctccacttcgacttccagaggaacctgaatggcgccggtgatgtactggaagtacactatgctagacataacacaatcctcataagaagtcgcggccgggaccatcccagccgcatcgtaatcactcttcgccttcgtccgcgctcagccactcttcgaaggcgaaatttaccttagactcgacccaatcttgaagctcatcggcgaactcgtcactgtcgatgtccatcggaatgcccagagtctcttcgttccacagttcggcattcagttcgaactggatagccggttcgccatccacattcagcaggatgcggtctgcgacttcatattcgtcgacatcgaagaggaaaccgccgctgatgatgtgctggatgaaagcttcgtcgaagttgctgacgccgatattgatctgcttagtcattttttctggccccttatttggcgagtttgtgctgagctttgagggtggtcagcttagctttcagggcgatcatagcctggccgcgcaggccttccatttctgcctcgctgatggcgatcttggcggagcggatttgatcgttgatctgggatttggtcatttctgcgttcctctgttttggagtgtttcgcgttcgatgaagagattatgacgctattcagaatggaagtaaagcagaattgtgaaatatttctcaaagtggacgaacggtatgccccgtcaggaatatttcctcccatggaaggcatttccgcatcagaatgttgattaggtatcccaaagcgcgcagtggcgaatgtgagtccgcacgtacatagggctgtattgtgcgaagtgctcgacggtcgcatccaaggctctgctattgccgcacccttccgctttgcgagccaggaagaatgcttctatttgctggtttgcgttcatcgtcttaccctccaggtgtttgttcgtttcgatgaagagattatgccgttggtcagaatggaagtaaagtgtattaacaataaaattatgttcaccgacgaacggttgtgctcgaccgtctgttgcggcgtcgatatactcgacctattgctgacaccggattgattagaatgtacaaactcaaccctgcactgcgagcggtctggcgaactcgcgcccgttacaaagtcatttatggcggccgggcgtcttcgaagtcacacgacgcaggcggtatcgccgtttacctcgcggccaactatagactcaagttcctctgtgctcgccagtttcagaaccgcatcagcgaatcggtctacacgttgatcaaggacaagattgagaattctgagtacaacggcgagttcattttcacgaagaactcgatcaagcacaagaggaccggatcagaattcctattctatgggatcgcccgtaacctgtcggaaatcaagtctaccgaaggcatcgacattctctggcttgaggaagctcattacctgacccaggagcagtgggaagtcatcgagccgaccatccggaaagagaactcagaaatctggatcatcttcaatccgaacgaagtgacagacttcgtgtatcagaacttcgtggtgaagccacccaaagacgccttcgtcaagatgatcaactggaacgaaaatccgtttctcagtgagacgatgctcaaggtcatccacgaagcttatgagcgcgacaaggaccaggccgagcacatatatggagggattccgaagactggcggcgacaaatccgtcatcaatctcaagttcattcttgcggccatcgacgcccacaagaaactcggctgggagccggccggatcgaagcgcatcggcttcgacgttgcggacgacggcgaggatgcgaacgcaactacgctcatgcacggcaacgtcattatggaagtggacgaatgggacggcctggaagatgaactgctcaagtcgtccagccgcgtttacaacctggcgaagatgaaaggcgcctcggtcacttatgactccatcggtgtcggcgctcacgtcggatcgaagttcgccgagttgaacgatgccagtcccgacttcaaactgatctatgatccattcaacgcgggcggcgctgtcgataagcctgatgatatctacatgaagctgccgcacacgacgatcaagaacaaagaccacttcagcaacatcaaggcgcagaagtgggaagaagtcgcgacccgattccggaagacttatgaagcggttgagcatggaaaggtttatcccttcgacgaattgatttcgatcaactctgaaacgattcacccggacaaactaaatcaactgtgtatcgaactttcgtcgccgcgcaaagacctggacatgaacggccggttcaaagtcgagtccaagaaggatatgcgcgagaaacgcaagatcaagtcgccgaacatcgctgactcggtgattatgtcggccattctgccgatccggaagcccaaaggtttcttcgacttctaaacacagaaagcccggatcgctccgggcttcgggtcttactcggtgtggttcctggcgctgagtgtcgacgcaacggcctcgccgactcccagggcttcctggccggccgcgagcgcttcggcttccgactcgacgatgaaatcatcaccttggccatcgcctggcggaacctcgaccagcacggcttcttcgccttcgaaccgcaggtcataggtcttttcgacggacagaccgtaacgagcgttgagcgcgtcccagagctgggcctcataggtccgcaggtcttgcagagctttctggtggctgagcatggccatgtcaacggcccgttgcagggtttcgtccaggacgttgaatcgcatgcgaagagaacgaatccgctcgaccacttccgcatccactacatgcctttcgatcatcgcttttcacctttgctgaatgtaacgttgtagccgttgtcggccaggtaggtcagggcgccttcgaaggaagttccgacgaggtgctttagcttcatttcgcgttgcgcggccagccagaatgcagttccggagaactcggcgcggccttcggccaagaccctgccatcaggcccggcgatacgtacatggacggaagatagcttgatcggcatcagtgaatacctccactggcttgcgacggcatgctttcggcgcgcgcgcggcttcgcagtccgggcagggacatgcttggcggacgcgctccagctcgtcggcatccatgacatagagcttcccatcggcagtgtcgtgcgccatggcgatgttcgggaagtcggtggcgctcaggccggcgacagcgcggatttcgtcccaaagcaccagatgctcggcattcagtcgggcggcgagcgcttcgtgctctttagcgacgcgcgccatgaactcgtccatccggaatgcgaattccgcatcgatggcacgggccgaggccatggagctgagtcgaatcggttctttcttcatgatgattctcttttggttggtggttgttcgctgctcaggcctattacagtctgagaagcatgatgaagatgaacgcaaggaacgcaaacggcacaagtatgccggacatcagctttgacaggcgctgcatctcagcgtatttctcggttgacattccgtgctgcgccgcctcagccgcgaagcgggctttcgcctcgataacttccgggcgcagcgacaggacatattctaaggcctcttcccgcgctttttcggcctcgaccagcctagggtcgcgggccgagacttcgctgtaccctggccttgcgggatgggcctgcagcgatggaggaagttcggcggccacgactccatagtcggcgcaggcccaagcgatcccgatgaggatcgcgaggatggactggacgattcgcagcatcactttgtcgctaggaaagcccatggttaatcctccaccgaccgaatgatttccatgttgcgaccggcattggtcccggcagtgtaggcgcgccgaccgtcactgtcgtccagacgcaggagtttggtaacattcgacttcttgtaacccggatcgccgaaatgttcgtggaccgcagcttccttaaccaccaccagagacgttccggcagaagataccagctccatacgcttcctggttatggactgaaggcgatagctgatttcctgggtcgcggccagtttgaattgcgcggcaacctttacgttgaaacgttcgtacccttgcgccttctgatactcccgacacagacgatcaatggcctcgaccagggagttgaacatgttcaccgccagctcaacgtccgacttgtagcctttgaagcgtacggcatgaccccagcgcttggtagtgcttccgtcgcgggcgctcctggatgccttagccgatgctctgtggttgttgatgccaccggcgaaatccatgatgcagtcattgtacgtcgccacggccactgagaaaaacttcatccagttcgggattgcggaatagtaacgagtggcaatttgctcatcgaactcttcgcgaatctcgccggtagcttcgaagtcgtgaaggtcatatttgtccttcaacttcttcacacgctcggctgcgatggccgcttcgtgcggactggaagagtcggctgccatggcggtcagtttgcggatgcggtctttcgccttctcgatggcttcaggggtgaattcgttctggtcggtcatggtcggttccttttgtctgaagggtttcgcatttcaatggagctattctgccttcattcagaatggaagtaaagcactttcttccactatttcggcatcgactggaagaaattccagatccaatcacctgctaccagcaagaggatgagggcggcaaagaacaagacagcggccgcgagctgtgcgcccggcttcagtttgggatggctgagcttgggctctacgggaacggccggagcgctagcgctgcaaccggcgtctcctgggccgtagccgatgccgcgttcacacgcctggaacgacaccagggatttaagatactcggtctgcttttgcgactcttcgtagatgccggcgacggcgaaccagagggcgaacactacggacgtacacacaacccaggcgccggtcagcaggagggccagcgggccgatgacgaagacggtagcagccaggacgattgcgccgccccagatgatgaagccggccagaccattagtgatgtcgacacagaactttttcattttcagattccttcggttacgggatggaggggatttgaaactctgcgccgccgagaacatcaatgacgacttcccagagcgtcggaacagaccactggtaacggtcgaagtcggtttcaggatcgacgcccagcgtcacataggaagtggcaggccatttatgaacactgcctttccgcatgagagtcgccacgcggccgtcaccgagcggattcgtcctgtgcggaacgtacgcagacatcgaatattgctgcccggcgtcgataacaaatctttgcctctggcgcagacatacagagcccacaggattccagccgcgaccgccgcaagcctggcgagccgaagaatgctcataaccttcgtgagtcatttcgccgaggcaagccgagcgatcctcgtaatagttgatgttctccatcgatccaaccagcaccagagactcgaaatcgaatcgatgatcgtggatggccgagtgattgaagcaaagccgacgcggcagctccgggtgccaaacatggaggcgaccggccggaagttggacctgaatgaaccccaggccgtgcagagtgatcttgtccttcatcgggtcatggacggtgctcatggataatcctcagtagcagaaatgtattgtgagagttacgattgataagccggtcgcccatagaagggcgaaccaggccatggctttgatggtcgtgtagatcatccgaagaattttccggcacagatcgggccaatgcccatttcgatggatgcgtggttggtcaactcgcgaccgcagcaggagcactgaccagtcttccgaccgtaggcgactgccgattccatcggcttttcgaacatcttcagaacgtcgtcgtgctcagtatcggtgcagtcgcgactcttgatgaatttgccatcggtgatccggccgaggtagatgtcgcccaggacgtacaggctaccggcgttccggctgtgagcgctagcctctttcacaacaacgatgagcggctcctcgccttcgccagctaggcggattttcgggcgcttgataccagactctttcgccttctcaaacgctttctcgatgccggaaatgtccagagtcggcgcagcagcttcctgcgcggccactttctcgcgatacttggcgaggttttcgatggcgcgcttcgcagcagcgatctgattttccgtcaaggagccgtatttatacaacgactcctgaaggctctgagcgaagctgaaggaatttccagtccaccactcgatgatatccgggtgcgcggcttcgaaagccttaattttgaggtcgcgttcttgcgcagcgctacagattttctcggcgcgcttttctgccgccttggcacggctcttggcgcgctgctccgggctggttttgtactctttgtatccgacaccgccgcaggcaaagcaggcgcgaccataagatgaagggccacggtacaggccggtgcctgcgcatttggtgcacttgtcgcgatacagcttcacttccttccgggagttcgggcgggcgcccatggacacatcttccagcgtcttcggagcttcgtcagtgatcgctacggtagcgaagtcatcgcccaggtcttcgaagccggtgaacagattctctgctgcgttcatgtcgattctcctgtttggaaagttcgtttcgatgagttgactatacgccagaaatggaaaaacggtagcgttttctcactaccgttcgtcgggtcgaagacaatcaataaatgtcgctattgatcttgaacccatgctcagcgccgtcgttgtagtcgtactcaacataactgtcgcagtagtcgttcaaatgctgaatgatgcctagaacgtcgttcgcggccttgtgccttttcgcggcgatggtcttggcgatgctgtcgccgacttccagggcttcggccgtccggcgatggatcagcaggcgactccaaagatagagccggacgcgacgaatgatgtcgcgatggcgctccagtcgtccgtgcaactcttcaatttcgtgctcgcgagattttaatactcgtcgaagctgttgaacttccaactccaaatcggccttagtagccatgttaacctcagaaaggaaaatcgtctgagactccaggaagctcgacgattattgttgagcctgatcggtctagaatgcatccgaccgagccagccctgtgtggatagggtctacacgaactataacaggtgacttccctgactattcgccaggtcgatcctccacaccatctgcaaattggcgggcgcttcgacttcagttttcgttcgtccaggacggcgcgtctgtcgcaggaaaggcagcgtgccttaaccgacgtaaccattggtatagtcgatcattcggatgagctcatcatcctctgattctctcgacttcagaccgcccaaagagtccgactggccgtcgcatttcgcatcgatatccatcgaagacaggaatcctgccgatactgcggtgatatcaactttgtcgccggccttcttgaagccttcgcactcagcatcgagggccacaattgcactcgcggccatgttcacatgactgatgaggtcggggaagatcacaggaacttcacgcgacatgccacggaccgtcagcttcaggactacatacttcatactcactatcccttttgtatgtgaggaaagaacttgctgttttccggatggtgaaaacgctcggtcgcaggcggtctttcttccggacattgaatcgtcgaaggcgggaaaaccgcgccggcgataatcgccgcgaggagtgcagcggatgtcgacatccagagggcggtttccaggctcacccgaacttccggacggcgcggcttcattcgctccaccctcttcctggctcataggatggcagaccgccgccgcgaatccaattgtcccacatacggttcagaccagtcggcggctggggcggcggactgtagaatccgggagtctcagtgctgctcaggaaataaggcgtgcaaacggcctggacgaccaattggtgccgctcccacatcttatcaatcgctcttagcatgacgtcttcgcactgagccttactgtcgaaccgtctgctagtatggtccggcatctggacgcagccgtctccagtgcaaaggaaagcagtagcaatccatacggtgatactcgccatttcgtcaccctctttagttgatgagcagagtctattccatctgctcgccaggagtaaagcgcttttcgtcgggataaatgccgatgatgtctgcgtcgagcatccaaatctccacggacggatcgtcgctgctgatttggtacaggttgtacagctcccgtccgccgacagcgcgctcgcctcgcggctcaaccgccagaaccttgccgtgcccttctccgtgctcgtccaggtatatgacgtgatcgccgacttcatagctttctttcgtgacgaggcgtgaacgcgagctgttctgcgattccactacccaggaatccagcacgccgcctttcatgtcgcgaaacaatcttgccgatttgtcgcaatcgaatacgcccagaacttcgccgtctttcaacacgatatgtacgattggcaaaagagtattcatgtttaatctccattggttgataattagagtctaatctgccgaaaagttcccgtaaagaattattttctcataactgattagttgcaactgttaatctgatgtatatgtttgaatctcttttgaacgtttgatgtttcccctataataagcgcacacagccaacaaccacgtggaactacaatgtttaaactttcctggatattcgggcgcaaaaaggataatgctgcctgttctgaatcggcgccggagaaagtcgcaaaaatccctcaacacgatccgctcgacccaatgatcaagctgggaaggattcgcggctggaacgtcgagccggagaaagccccggtaattcgtagcgtgaaagatttcctggagccgggcctatctgtagcaatggatagtgcgtatggtgatggaccaactccggccgcgaaggctgctgcgggcggccagaatccctatgtcgtcccgactatgttgcaggactggtacaattcccaagggttcatcggataccaagcttgcgcaatcatttcccaacactggttggtggacaaagcttgttccatgtctggggaagacgcagcacggaacggatgggaactcaaatcggacggcaggaagctatccgatgaacaaagcgcgctgatcgcccggcgcgacatggagtttcgcgtcaaagacaaccttgtcgaactcaacagattcaagaacgttttcggcgttcgtatcgcgctgttcgttgtggagtctgacgatccggactactacgaaaagccgttcaatccggatggaatcacgcccggctcctacaagggaatctcccagatcgatccatactgggcaatgccgcagctcactgctggctcgacggcagatccgtcttccgaacatttctatgagccggatttctggattatcagcggtaaaaaatatcaccgcagccacctagtggtggttcgtggaccgcagccgccagatatcctgaagcctacatacatcttcggcggtatcccgctcacccagagaatctatgagcgcgtgtatgcagcggaacggacggcgaacgaagccccgctgcttgccatgtcgaagcgaaccagcaccatccacgttgacgtggagaaggccatcgcgaacgaagaggccttcaacgctcgcctggcgttctggatcgccaaccgtgataaccacggcgtgaaagttctgggaattgacgaagacatggagcagttcgacacgaacctggccgacttcgacagcatcatcatgaaccaatatcagctggtcgcggccatcgccaagactccagccacgaagctcctcggcacttctccaaaaggattcaatgccactggtgagcacgaaacgatttcttatcacgaagaactggagtccattcaagagcacatattcgacccacttcttgaacgccactatttgcttctggcgaagtcggaagaaattgatgtgcagctggaaatcgtctggaatcctgtggactccacgtccagccagcaacaagccgaattgaacaataagaaagccgcgaccgatgaaatctacatcaactctggcgttgtgtctccggatgaagttcgcgagcgtctgcgtgacgatccgcgttccggctacaaccgactcaccgacgatcaggcggaaaccgaaccgggcatgtctccggaaaacctggccgaattcgagaaggccggtgcacagtcggccaaggcgaaaggcgaagccgagcgagccgaagcccaggcgggcgccgtagagggcgcaggcggcccggttcccgccgctccacgcgggactaagcctctcgcgaaagcgtccgaggaaggggccagcgaggccgctgaaccgccgtcgaggccggaccccaaggccgagctgcggaacttgttggtcgatcttttgtcgaagctccaagacctggacgacattaaggcgccggacggcgtagacatagagcacaatgatgcgcctggcttaaagcgcacatccaaacctggcgtgtctggtatggagccttcggtgttttcgtccaaccgcatcgtcgggcctcgtgatcattcggaactccagagaatcaaggtgaatggaataaccaccttgatcgaaaatccgcgcggaagcattcgacaaggcaaggatgggagttggcgagttcagatgaaacaccactacgggttcatcaagggaacgaaaggcgctgatggggatgaagtcgattgcttcgtcggtccgaatctgggatccaaacgggtcttcgtcgtcaaccaagtgaacaaggaaggtcagtttgacgagcacaagtgtatgctcggcttcaacaacatcaacgatgcgaagtctggatatctgtcctgcttccgtccgggctgggatggtctcggctccatccatgaagttgacctgcccgctttccgtcgctggctggcgaacggcgacaccaccaaaccgttcgggggcgagtgatggcattcaaggcctccaaaaagcgcgagcgccgggcacctcttccagtcggaagagggaagcccataattccatcggcaggaatcgaggcctggtatcgaaagcagatgaaggatatgtccaagctcatgatctccgactatcgaaacgagattgagaaggcgctgtcccagcctgcggccgaacgtttcttcgccagagacgaatccgttaacgtcctgttcaagatgacccttcgaagcctacagcagcgatggagccgcatttttgaaggtttcgcggccaagatcgccccggagttcgtcaaccggaccgaagaagccgctaccgccgcgacccttcacagcttgtcggtggccggcgtcgatcagccacgagctgcgtataatgagagcgtcaggaacaccctggaggccgcaaccacttacaatcatactctcatcaccaagatccaagaggaagtccacgagaagatttacacatcagtaatgctgtctctgacttccccgaatccggaagagcaaggaacttccggcataactaacgcacttcgcaaagtcgggaagttttctgaagatcgaatcgaactcatcgcaagagatcaaacaagcaagctttacagttctctgagcgatgagagaatggcggaaaatggagtcgaggagttcgagtggctacactcttctgccggcaagactcctcgccacacccacctggagaaagatgggaagaggttcaagctgaatgaccccagactttgggagggtccgaaagcagaccaggggccgccaggatgggcgattaactgtagatgcagaaagataccagtcatttgacatcgataggagcgctatatgccgttagttcatggcacttccaatgaggctcgttctgaaaacatcaagcgggaaatcgaagccggtaaagacccaaagcaggctgcggccatcgcttattccatccagcgcagtgagaaagggaagacggcgaaagattgttcgcctgagctcgtcgccgatcttcgcgccctggtggacgctctgtcgaggctcgtgaaatgaaccgcaagacgtgccggcgccgactcgtggtcgatgtaatcagggccaatattcacggcggattcttcagcctgaagtttgccgccatcgatttggcaatcatcggcgtcgccatcttgatggcttttggccgatgatgctgagaaaaatctggattctgactaaaaattctagtccggatagccgcaagttaccgtttacggaaaatagcagtaatttggaaatcctactgccgcgaggctttaacagagccagttcctaatttccgatttagccgcatgcttcaaaagtatatagcctgggaaattagaagtaacgttccaatagaattcatctataagtaacgttataatataacgtcaatctatatgctctagacgtattgaaattcaatttttaatcggtaaattggtaatttgaattagtttaggagttgaaagcctcgcggcagtaggcttagacaaatcccgtcaagtttccgagaccaaattaccggattttcgcggctgaggaaactggtaattagatcacaatacaaattataatgtaagttaacagtcacggctacatctaattattgttccgcttatttacccttagatgtactgcgtatataatacagccatagtccacgactcttcgaattaacgatggcaaagtcgaaaagaaaaattgacgaaaatggatatatgaccatagagggctgcccgatcagctcttatggcgttttccaatattctgctggtcaactcggtcttccgggcgatccgacgcggattgtcaacgtatatcgcccggagtctgccgtcagcgatccggagtacatcgaatctctgaagaatctcccgttgatcgacgagcatgagatgctgtcgggattcgacgatgatgacgatagcgtggcccccgaagacaaaggggtggagggcatcatcacctccaacgcttactacgaagccccatgggctcgcggcgatatccgcatctattcccgcaacatgcagaatcagctggaaaggggcaaagaagacctgtccctaggctatagttgccgctacactgagcaacccggaatctggaacgggacgccttatgaagtcgtccaggacaagatgcgcggcaaccacatcgccctggtaaaagagggtcgtgtgccgggggccagagtattggatggtctgtgttttgaccatctcagttttgatttcagaccatccgatgagggtaatgaaatgagtctcaagaaagccaagcggaagccccctgtccagcgcgtagggcaagctgctgactcggcggtcgaagagttgcgcgccctgtggccgaagctatctgcgtctgtccagaagttcctgggcgaagaagagcaggagccggagcatcaggaaggcgcagctccggccgaaccgaccgacagcgagcacctgaccgagcatccgactctggaaggtgctcagaaggatgacgaagagcaggaagaggagccttccgttgtcgatccggccgtggccgccgtcgagccggagcatcaagaaagcgccgcatccgaaatgtccggtgaaggcgaagtcgccgaactgatctctcaggtcaaagccattctggctcgactggagggcacggtagccgaaggggcggacgaagagcatggcgaaggtcaagatgtcgtcgagggcttggaagagcagagcagcctcagcggcgcgcaaaccgccagcgacgatggtggtgagggcaaggataacagcgaggaacttcctgaaatggcacagaagaacgcgcaagatgctgcaattcgcggtctctatcgcgacattgctgctaaagatcgcctctacaagcgtcttagctccgtggttggtgcgttcgatcaccgagctatggactcggctgaagtcgctgtttacggcgtgaagaagctgaatatcagctgcgcgaagggccaggaagcactggcgctcgacatgtacctgaaaggtgtcgaagccgcgcgcggcgcggccagccgtcaatcgaaagcccaggattcggccggttctgctccgcagtgcgccgagctggacagctacctgaagggggagtaactcatgttccagaaacaagtttaccgccagtacactcctggttttccgggcgatctgatcgaggacggcccgaagcgggcgcggccgggtcgaatcatgtctctgtctgccgtaaatccggctgccaccgccaccggccccaaccgcatcagtcgcgctttcggttacgccggtgacgtcagctccctcggcgaaggtcagccgaagactatcgcggctcgcgcttctgaagtcgtgatcggcggcgccaacttctttggtgtcctcggtcatccgaagcactatgcgctgttcggttcggccggagactccctggctcccagctatgatctgcccgatggcgccgaaggcgagttcttcgacatggccaccggcctggtcgtcgaaattttcaacggcgccgcaaccgccctggacctggactatggtgacctggtcgcctatgtaccaaacaacctgcctaccgccgacaacgcgcttggcctgccggccggcgccctggttggcttcaaggctggctccatgccgaccggcttggtccagattcccaacgcacgcatcgttaacgccatcagtctgccggcccagtcggcggggaatctggttgctggcgttaccatcgtccagctcacgcagtaaggaggcgtcatgagccagatcagcaagacccattcgcgcctcgcaggccgcaatgcgaaacctttcgacctgaaaaacatcaccaatgacgccgtggcgtctctgcgccgcatcggcctggtattcgatcacgccgtcgtccaggaccagatcaaggccttggcgaaggccggcgcgttccgctccggctcggccatggacagcaacttcaccgccccggtgaccacgccgtccatcccgactcccatccagttcctgcagacctggttgccgggcttcgtgaaggtcatgaccgctgcacggaagatcgacgaaatcatcggcatcgataccgttggctcctgggaagatcaagaaatcgtccagggcatcgtggagccggccggcactgcggtggaatacggcgaccacaccaacatcccgctgaccagctggaacgccaacttcgaacgtcgcaccatcgttcgtggcgagctgggtatgatggtgggcaccctggaagagggtcgtgcctcggccatccggctgaacagcgccgaaaccaaacgccaacaggcggccatcggtctggaaatcttccgcaacgccatcggcttttatggctggcagagcggcctgggcaaccgcacctatggtttcctgaacgatcccaacctgccggcattccagaccccgccgagccagggctggtccactgccgactgggcaggcatcatcggcgacatccgcgaggccgttcgccagctgcgtattcagagccaagatcagatcgatccgaaggcggaaaagatcactctggccctggccaccagcaaggtggactacctgtcggtaaccacgccttacggcatttcggtttcggactggatcgaacagacctatccgaaaatgaggatcgtgtcggctccggaattgtccggcgtccagatgaaaaaccaagagccggaagatgctctggtgctcttcgtcgaagacgtgaacgcggccgtcgatggcagcaccgatggcggcagcgtgttcagccagctggtacagagcaagttcatcaccctgggtgtcgaaaagcgggcgaagtcgtacgtggaagacttctccaacggcaccgccggtgcgctatgcaagcgtccgtgggctgtggtgcgctacctcggcatctaacagatgcctattcaccaaaggccgggcttccggcctttgttcactctgactctaactcggttgtaggggccggttagggcataattactaggactacgccaatgactgtttatatcgtttcctccatgactcaatcggtgtcttacaatgcgtatgacacctctgatccgtccaatcctcgcctccagcgaaagattctgattcgcggccgcgcaggcatcgcatccgaaacttccggcttcggcgacatgatttccgacgaggcaggacgtccgatctggaccccacagggcgattgcactgccgtgagcgattcggatttcgagctgcttcaggccaataagattttcatgcgtcacatggagaagggttatctgcgagtcgtgaagaccgacatcaccagtgaccaccagcggatttccaaagagactcgcaccatggagcgcgatggattccagcctctggatgctactcgcctgcagcagaaaatcaaggtgaccacagccagcgcttcccaggaacaagagttccggatttaaccgagggtttcggtatggtgattttcgacgaacataagtttcgcacgctgtttccggagtttgctgatccagccgcttatccggacgtgcgcctgcagatgtacttcgacattgcgtgcgaattcatttctgatcgcgattcgccataccggattctcaatggtaaagccctggaagcctgtctgtatcttctgaccgcccacctcctgtcgctgtccacgatgcaagttcagggcgcggctggaggtggcgtcactgccggtgggacccagggcggtttcatcaccagcgctactgtcggcgaggtcagcgtggccaagctcgcgcccccggccaagaatggttggcagtggtggctttccgggacgccttatggtcaagagttgtgggcgctcctcagcgtcaaagcggtgggcggattctacatcggcggtcttccagagcgccgaggcttccggaaggttggagggacgttctggtgatccctggtgcgaatcttctgcgaatggccttcggggtcatcggtactcaaattgtgaaatatcgcaagtttgagcagcgagtgaagaatgatcaagctcagtacgtttccatgttcgaggagcctttcgacctggcagcgtctgttcagcgagtccgacgcgatcagtatgtccagtttaatctggagttccaacggaattacgttatgatcttcgccaactttgagatggttgacttggatcgcgatgtggccggtgaccagttcctctggaccggaagagtctttcagctggagtctcaaggctcctggttttatcaagacggctggggagtttgcctggccgtggatatcggtgcggccaagctcactgatgacgggaaaccgactttctaggtgatgtatgtttgacggcgaactgatagcgaaaatggttgtcgagctgaatgcggcgatgacatctgctcaagaggctttgcagttcccggattttgaagtcgtccagaaagctcagccgacccaacagggaacgtcaaccaggccgaccatctttttccagaaactgtttgacattcctcgcggctggcctgccaccgattggcacctggacaacacggctcgcaaatatgtagaaataactcgacagcatgtagagacgactttccagattagttcccttcattggcagaatcctgaaataactcacgtggttacggcttctgatatcgccaactatgtgagggcttatttccaagctcgatccacgattgagcgcgtaaaggaactggacttcctcattcttcgcgtgtctcaaatttccaacgaagcatttgagaacgacaatcaccagttcgaattccacccaagttttgacatggttgtaacttacaaccaatatattcgcctgtacgaaaacgcagcatattcggccgatggggtattaataggcatatgagtctgaggcgcgattcagagctaatcgccgcgcacctccagatgttaagagccatgcgcggcaggtccgtttcagccggatggtattccacggctcgatatcctgacaaggcaggcggatcggtcggaatacaagtcgcgagaatcgcacgtctcaatgagtacggcggaactatcgaccatccgggcgggaccaggtatattagggacgccattgttcggggtcggtttgttggcgttcggttcgtcagaaacgactttccgggagaaaccgaggtaactaagcctcacagaattaccatcccggctagaccgtttatgcgatatgcttggaacttgttttccgcagatcgcgccgcaatccagaaccggatagccatgaggctggccagaggacagatcactccagatcaagctcttgcccagatcggcctggcgttggaaggatacatagccagaagcatcaggaccgggccatgggtggctaactcagcatctacggtcaggagaaagggattcaacagaccgctggtcgatacggcgcacatgcttcaatcgattagcagcagagtaacataaccaggagatcatccagtgatcagtcagagccgttatatccggatcatttcgggcgtaggcgcaggcgctccggtcgcaggccgaaagctgattctgcgcgtcatgactaccaacaacgtcatcccgcccggaatcgtcatcgagttcgacaacgccaacgcagtcatgtcatacttcggcgcgcagtcggaagagtatcagcgggctgcggcttatttcaaattcatcagtaaaagcgtgaattcgccgtccagcatcagcttcgctcgctgggtaaacaccgccatcgcgccgatggttgttggtgacaatttgccgaagaccatcgccgatttcgccggcttctcagcaggggttctgaccatcatggtcggcgcggccgaacagaacatcaccgccatcgatacgtccgcagcgacttctatggacaacgtggcgtcgatcatccagaccgaaatccgcaagaacgccgacccgcagctggcccaggctaccgttacctggaatcagaacaccaaccagttcaccttggtcggcgccaccatcggcaccggcgtcctggctgtggcgaaatctgccgatccccaggacatgtccactgccctcggctggtccacctccaacgtcgtcaacgtcgccggccaggctgccgatcttcccgacgcggccgttgccaagagcaccaatgtcagcaacaacttcggttcgttcctgttcgccggtgcgccgctcgacaatgaccagatcaaggccgtgtcggcctggaacgcggctcagaacaaccagttcatctacacggtcgctacttccctggcgaacctcggcactcttttcaccttggtgaatggcaacgccgggaccgccctgaacgtgctgtcggcgactgctgccaacgacttcgtggagcagtgccccagcgagattctggccgccaccaactacgatgagccgggcgcttcgcaaaactacatgtactaccaattccctggccgcaacatcaccgtttccgacgataccgttgcgaacaccgtcgacaagagccggggcaactacatcggcgtcacccaggccaatggccagcaactcgcgttctaccagcgcggcattctgtgcggcggtccgaccgatgcggtggatatgaacgtctatgccaacgaaatctggctgaagtcggctatcgctcaagcgctcctggacctgttcctgaacgtcaatgcggttccggcgagcagcactggcgaggcgatgaccctggcggtgctgcagccggttctggacaaggcgactgccaacggcacgttcacctacggcaaggaaatcagcgccgtccagcagcagtacatcacccaagtcaccggtgatcgccgcgcctggcgtcaagtccaaaccctgggttactggatcaacatcaccttctccagctataccaacagcaacactggcttgaccgagtggaaggccaactacacgctgatctattcgaagggcgatgccatccgcttcgtcgaaggatcggacgtgatgatctaatggtttgcggcggactcgatccgccgctaccttccataaatggagtgaggaataagcaatgatcaacatttctgcgttcggctcgatctgccagttcacggcaagcagaactttcccgaacggattcaccgtcaccgagttcgccgacgatgccgatcccatcgacagcccgccgttcaccgctgccgataccggcgtcggtctcaacggtgacatggtagtttggaaccgggcgaacatcctggaagtagtcgtcaacgtcattccgaataccgagggcgagcgcaacctggcagtcctgctggatgccaaccgcaccggaaaggacaagtcgggcgctcgtgatgtcgtcggtttggtcgtggcgatgccggacggcagcaaaatcacctgcaccaacggcaccccaatcgacggcgttctgatcaacgcggtggcaagcgtcggccgtctgaagaccaagccgtatcggttccgatttgaaaaagtgatcaaagccggtactagctgatgaagaaaattccgctgacagcagtccccaatcaagcgatctcatttaatgccggtagcagctattggaagattcgcctgtaccagaacatggacatgatgaatgccgatatcagccgcgacggcgtgatcgtttgccatggggtccgctgcttcggcgggattcctcttctccaatacagccatcagtaccgacctgactatggcaatttcgtcttcgaccgcgacgccgattggacattgttcggcgacggcatcaacctgttctatctggacggcgccgaattcgccgagtatcaggcgcttgccacgaggaaagaatgagcacatcaacgatcagaaccgggacgaacaacgatatccttttggacgacaatggaaacatggttatcctcagggatgtcgaagcgtgcgcccaggacgttcgggcggcgatgctcatgcgcaccggcgaaaacattttcgatgtgaactccggtgtgggatatttcgaatacatcttctcgccgcagaaaagctatgatgacgctcgcaaatccatcgcggatgcaattttatcctcaccggatgtgaccggcatcgagcagcttgacatcgacataaccggggaagtcttcggcgtcgatgcgaaagtcatcaccatccacgggcctgttaccgcaggagtttgaaatgagtaccatccgcatccaatacgccaacggcacccaactgttcctggacggcaaaaatccgccgcccctggacccgctgccctcgtttaacccgtctgtcgaagatctggaaggcctggaccgcgaaaagaacaccgacaagggcgactcctcgccggccggtcttcccgttcccccggtaaacgtcgattccaatgtcgacaacggcggaaccatcccggctccggtatcgaccgacgctgctgcgaccgaatcggccccggaaggcgcccaggaagctcctgcagcaggccaaggcgacgagaaaggcgccgaggaagccccgactacagccccggtagaaaaggccgaggaaacggcctcgccggccgctgaagaggaaaccccggctcccgccaaggccacctctcgcaaaaccaccagcaagtaaggactcgacatgatcaacgtcagcggcttcggcacaggaattgtaatagtttccgcctcatcgttcccgatggggttttccttgtcgaagttcgctgatgatgagagtccgatatcctccaaagagctggagccgttcggatatgagatgctttatgacggtggcctattcgcctttgacaaggctgctcctctggaagtatctgtatccgtcatcgcagggagcgaggatgatattaaccttcgcatccttctcaattccaaaaagggatcattcagatttcttccgggaatcatcccggacatgacgactctcgtggccactcttcctgatggcggccgcaccgttctgtccaatgggactatcatcaagggtccggccatcgacaccatacagaacaccggacgacgcaaaggcaacacgtacacttttgttttcggtagctatcttggcgcccagactgcgcgtcaagccatttctaacgttatccaatcggtactggaggtggtctgatgttagggattttcaccagcctcctaagttcgcgatctttttcgattgtggaccaaaacacaaaccagctagttgctgcggatttgaggataagccgggtcaacacccggttttcttctgtagggcaacgccacatgctggaagatggtacgaccaagatggattccagaacgatccaccctatggaaatcatcgtcgaagtattttgcccttcaattgatgtcgtcgatcagatcaatcaattgctcctggatcgcgacacactgtacaaagtcatcactcgcggcatggtattcgaacggatgatgtgtaccagcgaagcgctcaatcagactccggatatgatatcggcgactcctgcgcggctgacattctcccaagttctcgtccagaatcccaagcctataatgttcagaaatgcaggggactcttctatgatcgaccgagggctggccctagctgaagacgtggttggctcggccggcgatctgttcgactacgcagtgaacggcgtccagaacgccgcagacttgttctgaggtgccaattgaactctttcctcaagtctattctcaacacgcctactctcaccatacgcgatgatgtcaccaaacttcctgtctggaagagtcttcaagtcaagaaagtggaaatttactcgccggcttccgtagtgtcgaaacctctggcgacgaaagaccagacggaagctcaagtgtacaccgaagctctggacattgatgtgaagaatggaaagatcatccaaccggtgcgactccgcatcaatgctatctgtccggacctgtccaccgttgaaagtatcatgaacgccttcaatgataacacctcgactttcgctatcacttctaagtcgatattggccgataaaatggccatcatggcgctcgatgtagatcagtctccagacatgttgaacgcggctgagatcaatatggaattcgagcaggttgagcctccagtattgaataaattcgattctgcgttccctcaagatagtccgacttatggggtacagattcaatctctttctgatgctaatttgctggatttgggcgccatcggcgattcgatatcttcggccgcaaaatcgctatataatcgcgtgaccagctacttctgaggatgtatcatgcttgaaatcaatcttcccgatggccgtcaaactcgcgtacaaatcgaggcgtggtcggcattggatggctgggaactccagcgccgtttcgtcgaattcgctgtcagccaagattccgacttccgccgctctttcaccatggaaatcctgggctatgcgaaagtgctgcttggcgacgatgacaccggcattccgctgaccaccgcggcagtcatcaacaaccacctcggccactggaagaacgtggaactggttttcaactctgttctcaagcacaatggcatcgacccggccacgcacgccgaccggccggactattgggaacaagtcggatcgcagatggccatcgcatttctggccgaggcgtccaagctcattggtccagcaatgaagatcgccgaaggactcgccaacaagccggagtgattcatgtctagtgatttggatgaattcatacttcggtatgaggccgatactgccagagccgagcgcaatctggagcgcctccagaaccagatcaggcgcgtgaacagcgcatcgacgagtggccttcaggatttgcgccacttcgcagacggcgcggccactgaactcggccgagtcgttccgcagatcgattctgtgacgagcgcgattcgcgggatgaacgcgcaactggcgataggcgccactggcgtggccctggtcgcggccggcgtcaaggcgttcatgaacaccagggaccagtacaatcagcagcgcatccaggcgatggacatcggcatcgccccggcacgcttggaagagtaccagagaaaattcgttcgccagtccggtggaaccatcagccgcgagcagggcgcggagatgaccaaaaatctggcagacactttccggcgagcctatcgcgatatcgggcgagtcggcccagaggcgcggattttgcgaatggccggcgtcgatgtcgggagcttccagaagggcatgcggccgctcaacgacatcattactgatctggccacgaaaatggccaagctgaagccggacgaaatttctgcctacgctgatgcccttggcgtctcgcgagactacctgagcaccctggctaagatcggcccggccatgggaaaagtcaccgagatgacgactgcggaactccagtccagggtccagggcgagtccaacattcagaaattcaacgatgctctggcgaatctcaaccagacgttcaccaccctggaaaaccgagtcggcgaaaagctcgcgcctgcgttcaccaagctgatcgaaatcatcgacaagatagtccaggctattcccaatgaagtggaaagcttcgcgaaggacaccaaatcccgttgggaagatggagtgctcgggaaggcgaccgttggcagtgatatcttatccctcctcagccccggcgccctgctcggtcgcctggcagcgtgggggactcgtcgcggcatggaagaatcagggctcatcgacaaggacaaggttcccggcgctcaaaccagcgaagacctggccaagaaacaagaagaccaggacaaggctactaagtccatgaaagagctagagaagctggctgaccagaccacgaagtctaccaatgattttgcggtggcgatcaacatgttcagtggcgcggtatcgtcgttcgcgaatgccgttgacgagcgccaagcttgggcagcctgggcgggggaaattggtcgggcggtcggtatgggaagcaccgcgccgacttcgcgggcaaccggcgtctatccgcacgcgatctatgatcagtcgaagagtggcgcggccggacaagtcttcggcgagccaatcggcgcccagtctcttcgcaatcgcatgttctcgccgcagcgcaaggccgaaccggtcaccgttccatcgtacatcaacgacatcatcaaagatgcgtcgaagatgtacaacattcctgagctggacatcaagaaactcatatacaccgaaagccgattcaacgccagggctaccagcgaagccggagcgaaaggcctcatgcagctgatgccggaaatcgccaaggcgtatggtataactgacgtatatgaccctcgccagaacatcctcggcggaacgcgtctattgcgggaaaacctggatcgagccaatggcgacatgcggctggccttgacctactatcacggcggcctcgatccgaagaactggggaccaaggactcgcgcatatccgggtttggtgatgagcgctccaatcgagctgatggaagaggcgcagcgcaagcagaaggctgcggccatgaccgccgccaacgagacgttcgctccggaaggcggcgacatggacattcgcccctatgatggcggacgattggaaactccagaccagggcaagaaggaagatgagcgccgcgaagcccgtcgatatgacgacagggttgtgcgaccggaaattcgcatcatcgaccgcatgccagaccgcagcgacggcgaaatcctcaagatgtctagacgtcaagaggccgaccgggcagattctggattccggaagttcccgaatcaagttcgcggcgagaccaagcagaacatccaggctcaactcactgcaggagccatcgcgcaagtgatcggcgttaaccccaaccagatcatgcgccgcgaaatcagccgttctgacttgctgttcggatacaaccaagccatcctgggcaagcaacaggagatcaaggccgccgcgaccgaagccaacaacgtattcctgtctccagccaagcttgccgaagccacggccaaggtgaacgccgcatcgcgagaaatggatattctcaggacatacggcgagcaacttctgaagagcgctccagagcgcggccaggagctgaccatcggtcgaatcgacatgttggtcaacgtcaccggcgcgaattctccggaagaggctcgcgagatattcagtaagcagactgcagaccagctgactacggcaatccaggacgctcaaaacgattccgcaactaagatactctactgatgaaaaagagaattctgcgagtaacattcaacatgccttatggacccgaagtcatccgcgaagatctggatgttcgggtccggattatgaaggctgcgttgcggattcagaaccgggcgacgatggaaattttcggcctcaccactcagctgcgcgagtctcttctgtcgcagttcaccgcgtggaagcaccggcaacgtcaagtgggcagggaagatgaattgatgatcaaggtgtcggtggaagccggctactctgaccaggggcgcgagcaagtttccagagtctttgtcggcgaagttgccattgtcgatatcatttctccgccaccggacattggaatccgcatccagtgctataccaggcaaatcgacaggacgaagaccattcggaatatgccgcccgccaacacgacgtttgtcaagttcgtcgagtggggcgcgaacgaaatgggattgaacttcatctgcgataccagttacaacgatcaagttctgaagaatccgggccggtctatcactgtcgcgtcggcaatcctggcgtcgattcaggatatgtacatgccggacgtggccgcgttcgtcgatgatgacatattgatcgtgaaggaccgcgataaagtcattcgtccggatgaggtgaccaacgtcaactcgtttgttggaattccatcttggtctgaatggggcgtggaattccagtgtctgtttgagccatcgattcgtgtggctggaggcgtagcggtcgaatctctcatgaatccaagtgttaatggtaactatgtaataactgctctggaatacgatttggccagtcgggatcggccgttctatatcaaagtcatggggagtccagcagcataatggccagggaaatcaaatcattcaacatgttcggagttcactatacttcgcggcaattctctgccgtcgatgggctcagcatgatgtcggaaattcagagcgtgccgccagaagaattgctcaagggtactgatgtattggcgcatccggaagaccatccggaaggcatctggcttccattgactgctgcgaacatcaatctttatgtcgttgatcgagcgaaagtaatagctcccgtacaagttcttgcacttctgtccgaagtggtaatcgactggaattttggttttctcaaagactggaccggagtcaagattccatccagatttgtcgaagatatcaaaagcgtgaagacggcacattcaccttctgtagttgcgagtttggtggcgaacggttcggcctctatgcgcgagttggaagagtattattcgactcaagatgcctttaagatgatagatatcatgacggcgaagagcgtgaacgaggccttggcgtccgaagcatcgcacaacagaatcaaaaagggataattcctaaccgggcctgggaaggctatactagacctgccaaatcagaggctttcccatgtccaatatttctctaacatccgcaaaagctcccgacaggacgcgactgatcgccgctcttgacgctcggtcgcggcgggatgctctagatttcgaagtaatgataccggctcaggttgttcaatatgaccgggccgagaatatcgcgacgattcaacctctcatcacctgggttgacacggaacacaacgccgtccaaaggcatcagctggttgatattcctgtaatttccatgggggctggcggcttccacataagtttcccgattcagcaaggtgacataggctggatttatgcggccgaccgcgacacatctcagttcctggagtcgttgtcaatgtcgaagccgaacaccggccgcatccataagttcgagcatggcctgttcatcccggacgtattccgtcgatacaccatcaattccgaagattcggccgctatggtcatacaatcgacttccggagcgaccagaatttcgattcgcggcgacaacatcaagatcactgcgccgtcgaatgtcaccgtggatactccgcaggcgaatttcactggtgatgtgactatcgctaacactctggttgtaaacggtatcaacgtgaacaaccacggccacctcgaaaacaacccgcctgatgcccggacgaagggcggcatgattgcttaaggagaatttcatggcaagttttgatttttctgatttaacagcgggggggggttgtaatggctaactacaactacatcgtcgatactggtgtgatagtcgcagataccgccgacgttctgagcgacgttgaggccgagttccgcgccgccctcggtgccaatatcaacttggccgcgagcactccgcagggatcgcttgtcgcggccgaggccatcgcccgttccagtgtcatgcggaatgaagcgcgaattgccaataccataaacccgaacgtttcattcggaacgttcctggacgcgatctgtgccttgatggggatcgagcgcggttctgacctgtcaaccttcggctatggagttcaagtcaccggccgcagccaaacccgcatttccaccgggtctagggtccagactccggccggcgcgatcttcacagtgatgagtgatgtcacgattcctgctggtggtgtcgcgaccatcgatatcaaatcgcaggagtatggcaacattcctctgccggtcgggaatctcatcatcatcgacggaacaattggctggtccggagcgaaggtcatcgcctccactcgcgtcgatccgggcagccgccaaatgagcgatgcagagttgaagaatgcccgcgttaatcgattggccatccaaggccgcaactcgactatggccatcaaggcgtatgtgagcgccgttccaaacgtcacgtcggtgaacgtaatcgagaacaacaccggcgccgttcaagtggtgaatggagtctcgtttacccttccgtatgctgtttgggtctgcgtcgccggaaacccggataaacaagcagtcgccgatgcgttgtgggccgcccataacggcggaactccatgggactatggtgcgacgaacaacggcgtcccggtggacggtccgaatggcgttcctgtgcgcgatccggcgtccggtcgaaagtatgtcgtgaagtggaccactccaattatgtacgatggatatgttaacgtaacagtccagcaaggttcctcctctgtagctccggaagccattcagaacgcagtggtcaattacgcccaggggaaagtggaaggggaagaggggctggtggtgggcgcgagcctgtcggcattcgaagttgccggcgccatcgctcgcgaaattcccggcatctacatcaaactctgccaggtcgcgtgcgtcgcggctggctcgccggctccggctccgggcgatttcacttcggaatacgtcatgagcgcattcggccaggctaccatttccgttggtaacgttcgggtgactttcgtatgactctgcctgcgtacaattcggacatccaacaagctctgaaatggctccataaccaggcgcctggaatcaccggcctgatccagagaaaggcgcaatggtatgacagattcagccgccaattctgggccaactgggagcgcgacgttttccacttgaaaactgccaacccgttcggccttatggtttggtgcatcatcctcggcacgccttcgaaagggttcggcctttatccaaagaacagttcttgggcattcggtcggctacgccagaacttcatttatagcggtacacaagtcccgccaccggcagacgcatcgcctggaggcaacttctacggtggcggcaatgccgaaattctcaacttggacgaaatcaggaaagtgcttcagctaagatatgtagcgctgatttcgaacggctcgattgcatatatcaatcgcatgcttcgttacatattcaatgatgatgagccatgggacgaggcgaccggtctgtacttctatctcatggactcaaccggcgagaatggccctgtggagaacttggcagtatatcggaaagattgggaaggtatggtgttgttgtccagttcgcccagaacgaaccacgtgctgacatcgacccctgccagcgacgccgattggccaggagtcgatccggccgcgagcggtcttccggtaacggtcgaaacggcgtccgctacggccccggacggctccgctacggtgtgcaagcttactaagccggccgggagtaccgcttacgtctccgcgccgatagatgggccgctggggtccggtagcactgtaacgttctcgttcttcgcgaaagccggctccacccgtttcattgcaattcagtcggctgccgatttccccagtcgagccgatgccgttttcgacctggattccgggaacgtgatcagcgatcagatgttggacagcagcgtggtaagcgcccgaatgattcgtctggagaatggctggtggcgttgcgttctcacgaccaagaccgtcagctcttcgttccgcgcggcttacatcgctccggcagaaaccaacttcagctggattgattcgaattccagcgcggcgattgatgtgcttatctggggcactcagatcgaactgggtgatactccaaccggatacttggagactaccggaacgcccgtaaccatcaccgattacgttctgcagagcgcccagaccggaacggtcaagttcacacagcctcttccgaccggagtagaagcgtattggactggagactggaaaggtgggtctgcgaccgagccggccagattcgcagtaggggatgggactcaagatacattcaatctgtccagccctgcatacatcggcctacccactagtggggcgttcaagctagaatacagagttggtccggcgcttaatttgtcgccgcaattgatcaacctcatgaatgaccgggcggtcggcatcatgccgacttgcgccggttgcgatgtaaaagtcattcaggagtaatgacgtgatcacacccgaactgatacccagtccgtttgccgctcagggcgataaagacccgattccacaaacctcctccactggcttcgcaaaccttcgcgacggctatacgccggactacgaaatcagcctggcgtcgaacaacccgcaggccaaagcggtcgagcggaaaattcaaaaccaactcttcttcatcgcgacccagaacgcacaggcgtggcagcgacaaatggcgccgccgtggtttcagggcatgcctggcggctacgaacagaatgcagaagtcgtgcgcgtcggaaatgacggcataatgcggcgttatcgttccatggtgaatgccaatgcgagcgaccctctcagcagcacgacttgggaagaacaacccgcatggtcggcgatgcgctccaacatcccgatgccggccggaggcccaggcctatcttctggcggagaagtcatcacgaccggccgcaacttcaacgacctgttaaatgggacgtgggagttcttctctgattcagtggttatcgcttctcagaatgcccccgtatatccggcttccgctggtgccgctgctggcatgttggaggcgaaatcttgggtgtccggagccaatacgttctgcgtccaacgctacactgatcgcgtcgggaacgtcgctgtgcgcgggcttaatgccggagcgtggaccaactggatgtatgcggtaaacgtcatggcccttcaacaaggtcgggtcacctatggagtcgcggccggatcggcgaacgcttacacgttgacgctagttccgcagctccaaggcggcctggtggatggcatgattcttcgggtcaagttcaacaccatgaacaccggcgcctccaccatcaacgtctccggactcggcgccaaagccatcgtcggcgcggccaacttccctctcaccggcggcgaacttggccaaggactcatcgctgagcttgtcttcgacgcagcaggcgaccgctggagaatcctcgcaggcgcgccacgcatccaagttggcaacgccgatcaagattaccaggcccccagctggaaacaggtgaaggattacgtcgcgtcccaaaagctgactgaagtggactgggctgacgtcgtcaacaagccgaacgtcgctatccaagacactacgccgtggttcgccaatctggagttgtctgacgctcggcctttcatcgatttccacttcaacaacaaccgcgccaaagacttcgactatcgctttatctctgaagctgatgggtcgatggcgttctactctcgccaggggtcagctggtcctacccaggatatcctgttcagcaggtcgaatgttacattcctccagccgcgactggatgttgcgaaaaacctcgcgtacatcgcgaactctggtcccctttggcagaacacaactgccgatcagcctggttggaaattcaccttcgcacaaggtgtggacgccaacaacaacgcggttatcgcagtcaataccaccaatccggacggctcctatcgctcacagatcatgcgatgggactgggcgtccacgaacgtcatattcaacaatcgtccgctctttgccggtcaatacactccttgggattctggaaactttaatccgaacaccaagttgactgtgaatgtcacgaaccaaatcgccggcccgaccgggattcggaatacaaacggcaacaccggcaacatgaacacatggggctccagttccacgacggcttcatacggaaacgctgctcttcaaatcttcgggaaaggtggtggcgagcctgccgcgctttatttcgacaactcccagacaggatggtatctggggatggacaaggatggacagctcaagcgggccggctggtcgctcggcaataacgcctacgtgattaccgacgaatccaacattcgtttccacgtgaattccatggctggcactcctgtttggggcggaaacgaattctgggggccgtggaactttaatccgaacaccaagctgaccatcaaagccggcacccaggaaactagcagcactgcgatattcagcggaactatgccattcgctccaatcgcatcgctgtccgattattctcaggcccctttgacggtttacaacgcgccaaccggtccgtctgcaaaaccggccgtcatcgcgttcattcgtcctggcaactggggcgcgttcttcggcatcgataccgacaacaagctgaaatggggcggcggatcgctcggcaacagttccagggaaatcgccgattccagcaacatcatgaatctttgggcggccaacccgaccgcgccgtcctggaacggccaaaccgtttggcgatccggaaactttgatccggcgacgaaagtggatttgaacgccgcgaacgccaccaacggcaacatgatcttcaaccgcatcgccggaactggtagcggcatagcttcgtccggccgagttggcgccatcaacctgcagaacggggcgcattcggggcaagcggccgcagtcactttcgagcgtggtggaagtatcttcgtcaacttcggcctggataccgacaacgttctcaaagtaggtggcggaaacctgggggcaaatgcctatccggtcatccacgccgggaactacaataactacatcaaccaggcgctggttcaggtcggtctgggcggggtcggttcctatggcattttcgctgttctggataatgcctctccggttgcaactgttcaacccggagtggtcgtggacggttccattctcatctactcgtcttgcgccgcaaactacaatagcggtcgaaggcctgccggaacttggcgctgcatgggatatgtagtcaaccgggatgccaacactcctgactccgcgacccttttccagcgagtgacgtaaaatgaaatggacgcggatcagaaaccctcgttggctggatgaaacaaacatccacgccatggtgactttcgatgggatcggggaagttcctttcaccgccaatccgcacgacgtggaggcccacggaagggccatccacgctgcaatcctatccggggcgcacggacctatcgccccggtcgatgcgaagcgggagcaggccttgcaggacgctatacgggccagggaaaagcgggctatccttcgtgatacccgctggcccatagatcgtcacgacgagcagaggcggctgggtatcgaaaccacggacggacctgggttgatagcagcccttgttcactggaggcagcagattcgcgattggaatagcggggatcggccgcgacttcccatggctttgaaaacaatgttcaaaaatcaggagtactgatgaaaatcacgaaggatgttctgatcaccggaaccggttgcaccacggatcgggcgatcaagtggctggatgatgtacaggcggccatggacaagttccacatcgagtcaccgcgagccatcgcggcctacctcgccaacatcggcgtcgagtccggcggactggtaagtctggtggagaatctcaactacagcgcccaaggattggccaacacctggccgcgccggtacgcagtagacccgcgagtccgcccgtatgtccctaatgctctggcgaaccgacttgcccgtaacccggttgccatcgccaacaacgtgtacgcggatcgtatgggtaatggctgtgagcaggatggcgacggttggaagtatcgcgggcgcggcctgatccagctgaccggaaagtcgaactattcactgttcgccgaagactccggtatggacgttctggagaagccggagctgctggaaactccggccggcgcgtcgatgtcttcggcctggttcttctggcgcaatcgctgcatccccatggcggaatccaacaacttctccatggtcgtgaaaaccatcaacggcgccgcgccgaacgatgcgaaccatggccagctccggatcaaccgttatgtgaagaccatcgccgcgatcaatcaaggctcctgatattcgcccaaaagaaaaggccgcttattcagcggcctttttgctttccggctttgcctcttcaaccatcttgacttcaaccggcgcggcggactcttcctgagtgaccgaatccacatagttccctagtgaactcagaacgccgattaacagcgctcttaccaccttgtccttgactgtctcgcctatgatcttggtcagaacggatattaactcttcccggagtctggggctgattcttggccgaaagcgcttgcgatgctctttgcgtttcatgtttagtcctctgtctgcggtcttctcctcaccccgataatggcttggggatgcgctgtgttaatcggaaggttcgggcgctattataactcgtcgaaaatgctcgcgcttaactgtttaacgatacgcaccgcgatattaaatcgccttctttctggccaaggaactctggcggccgggtccggtctaaggcctaatttgtcgacattaaaacgagaaaacccggatcgcctgtagggcaaggcgtccgggtttatttctatctagtgtacgctaggatcagtgacttccgccccacccgtccagccagcaatcgaagacggcgtgcctcggcttgtccttggcgccatgggagaagtgcttgaaccggatgacctggcccttgagatactccctgtcattccagcggcgctgtttctcgtcgtgggtcaggctggaggccgacacgttgaaggtgactccaggccacagacgttcgttgcggcagacgaacgcaccgaccattccggacggcgacaggttttctgcgtggctggagcgggccgtgtggccaagttcattgatgaaagcttcattgttgttgtgcatcaactcttccacgtcgatgatctcagcttcatcgtagtcgtatcgcttgactttcacacagtgcccttccttggcagtcgagcgaccgaacttgtacagtccatcagcgcgcttgcccatggaaccttcgaatcccagcattgtgtggcggcgctcgacttcgctgaactgttcgatggaagtcaccagttcctgctcgaccaggtgaatcctctcatagccgaggcagtgacgaaggaagttcacgcgctcggccgccctggctaggcgatcttcggtcggtgcgcgaggatcggtgaaatcatcgaacacatggaaagaccagtccggctcaccgctgtggcggcgaagatcgccggacgacttctggaaaactttcgggtcgctgatgtcgccgcagaccagctcgccgtccaggccgttgaacagtttatcgctgaggtattcgtagatcgattgattgttctgccgcttgagttgacgagtcagcgcctcgccttcgaatacgaagcagcgaaatccatcgatcttcggcgagaaatacatcggcagttggccttccagcagcttcgggtcaaaattcgatgcgagcatgggtttcatacagttctccagaaaagaagcccggcgaaccgggctaaatggcggtaagccggctcagatggtttcgttggcatagttcagttcggccatgatcgacgcatagcgctcgtccgactccttaatgaaaacgccgtcgtacatgacgcctttgcgatccttgatggtgtcgtaggctgcagcgtagcagtcgagcatggtggtgtcgtgctcttccgtcacgtcgaacagagtcatggcggccgataccaggctcttgatggccaacccatgatttccacgtgccagagcgcctgccagatcgccgaggcgctgcaaatcgtcgccgtaggtgggatgtacttcgccgctctcgatgaaggccgacagatgatcgaacagattttcgccgagttgcgcggccatgatcgtggcaaccaccattacgtcgccgatgccatctttcacatcgaccgggttgttctgaacccaggcttcgcatacttctgcgaactcttcgaccaacttcaggaattgatctttcgcagacgagcctttgatcaggttacggtcggaagcccatttaaccaccaggtcgtgaagttcgcggctcatgatttgttcgatgttcattctttcgattccttctgtatttgggatttgactgcattgatgatggacgccgtgctctggcgcgatccatccttggtggtaccgaagtagaaggccattaccgacttcagctcggcgaaccaatagccgatgatggtgccgatggcgaccgaggatgtcgggtccatcagagcctcgcggccgaatgtgaagattgcgatgatgatgagaatggagcctgtcagaagagcgaatgtaatcgccgggcgaacgaaatcgttctgctgcgcagcaagcctcctcgccgaatccctgtctgccgcctctgcggcgaactggctaagctcggcctggagctggttctgctcagactgaaggcgattttgttcggcttgaatcgcaagctcctggagacgaacgcgctcggcgctctggagttcggcgagacgcgctagagcttccggattcgcgtctagagcgctagcgaccgaggctgggtcggccttcgaccccagcgccgtcgcgacgatagcgccaacggcggcgcctgcaggcccacccaggagcgaccccagagccggggcagccgcgccgatcttactacctatgtctttccagtccatttcgactcctcaaaagaaaggcgccattacagcgcctttctccggccggtgatttagaactcttcggcttcggtcgcatcgccgacgccaccggcgtcactgcgaggctgttcctgcttgctgtagtccaccttcacctcgccgcctacgaacgacttgtacaggtcggccgcagccttgaagtgatccgggttcttcaccaggccttccagctcgaactggacgccggaccagctgcccttgtcgttcgacatgcctacggtggtcatacggaccaggttggcgaaagtcggcggggtgcgcaggccctgcggggtctgaacctttttctgggacagcgcggtcatgagcttcttcgaggccttgatctgcgaagacgacagggagatcagagcctggccgaaatcgccggtgtccggatcgatgacgatgacgtaatgaccacgggtgtcggcgaagtagtcagacttcttgtcgctgaccgaaccgtcttcgttcggcgcgtacaggcgtccttcgacttccttcaccttggccgggtctttcatcatttccttgaagtcttcgacgctgatggcacccttgaaaccgccctcggcctcgcgaccggcccagcggatgaactcgcggcggtacgcggccggaatgatcagcaggccggtcttgccgtcgtaaaccttgccggtgacggtgttcaggaacatgccggccttcgcgccttcgatgtacttcgggtcatcttcatcgacctggggagacatcttctgcaaaacctggatgaaggggatggcataggactcggcatcggcgccttcgaagcctgcgccgtcatacgatcccaaatccatgaagtcgggaacttctgtagtcgcgacggcgccgccaccggtggcaattgctacggccttggtttcttcggttgcttcggaagtttcggttttcttaccagccatgttaggctccttgtttgtcgaatttcagttatcgctaactgtgggtttataataacggaagttgcaactaagtaaagcaaattacatatcaagatttgctctttttcaccttcggtttcgtgatcttggcctctttgtattcgtgtacgccgatgaaatctggcagctcttcgcccttctccaggtactcgcgaccgaacgcctggagggtctggtaatggacatcgcggttgatggtggcgtcatagccggcttcgatgatggcctcggccgccttcttcgcatcttccatttcgccgcgaccgaattcggccagaaccttggtcttgatgatgccgtcgttgtcggtgtcttccagccacttccagaacttcgatttgttctcttccttgacggaaatgatggccttcggctctacttttacagtgcgaccgtccgccagagtagtggtcttctgaccaagctcctccaacagctccggaatggtgttacgcttgagggtcttcagctcctcttccttttcggccagcgccttttgaagatcgaggatttcgccgtccagctgcgaagccttgtccaccaagttcagcagtcgatggccgatgtcggtggcttccaccgccatttcatccatgacgccaaaatagtcgatttcgcccggcgcgttctctttcaagtattccgggatttcaagctcttgctctttcatgtccgcctccaacttagtgatgttcccttacttgaaccaagtattgagtagatattatgccgcatcttccttgatacggctactgatttacatattaaatttcgtcgcgagtgctaacgtcagcctcaaacacgccatcaacgacataacttgccaggttgcgtttccactccaagctgacctggattttctcgtcgatggaatccagacagatcaggtcgaagtacagaaccgagttgacggtgccgattcgatgatttcggtcttcggactgcatccgcagctcgttgtcttcgtcggtcgtgtagtagatggccacgtctgcggctgtgagcgtgatcccgatccctgctgcggccgggttgcccaggaacacctggacgcgcttggcctggaaatcgtcgatcaatttttcccgctcggcctctttggtctcgccgtagtaggtgccaaacgaaatcccttgggcctccaaatacgccttgatctggtcgatttcctgaatgcgcatggcccagacgatgatggaacgctccgggtcttcctccagcagaccctccagaagatcagtaaacacggcgaatcgcgggttgtcttcgggcggcaggatcaccggctcaccatagacgttgatatagccggacgccacttgcttgagcttcgagcgcgctgccgcagcatcgaaagatacatccagcatgaaatcttcgttctggagaacgaagtgatagtcttcttccacgcgctgataaacctttcgttgctccggcgacatttcgaagtatatgcgcttgtacaccttgtccggcaggaatggcaatgcttccttcttcgtgacccggaagctgtgcggctcgatcagggatcgcagcttgtccaggttccggaataccgggcgcccataatcgtctttttcgacgagttgcggcggcatggtttgcttcccttccagcttgcgcatgatagcgatcattcgaggatcgtcactgggcaccaagacggaaaattcggccacaaacgcccgataggatttagtccccagaattccattccgcaagaattggaactgcatgaacaaatcggtcggcgcccgcgtcagaggagttccggaaaggatgcgacgggccacggccttctcgcccagctttacgatctttttcgcacgcttggcttgtgggtttttgatcctcgttgactcgtccacaattgcgcaaactttgaatgtatcaaggaatcgctcgacctcatcatagccagcctggtggttgattgcgtcaacgttgatggcgaagacgcgaagaactttttcatctgcgaacgtctcggaatacagacggtccaagcgcgccctggcctttttggaagtcggtcggccgcgccaatccacgctcaaagtcttgatcgcgacgtgggtgggaatctcgcgcagaatccagttggtgtggacgcctttgggggcgacgatgagcagcgcgtccacgcgcccctgtaggaagaggcgaacggcatcggccaaagtcgtccaagtcttcccggtgccctgctccatcaggtatgcgaagttccgtttgttcagggacgctgccagggcattgaattggtgctgcatggcctcggtcttcatgcccttgacgggatatgttttggctttcatttgttctccaaatcggcgaggaactgaacaatgttatccagtccttctgcatagctcgcaacttccaccaagtcgcggctgttaagctcgaacaaatcgaacataggattcagcagcagccaatcggttccgatcttggccaggacgaagccccggccaccccagccgatccgctcccgaagaaaagggatttgcccaggttcgaaacatctggccattgggcaggtggaagcgcgtttcggccactcctccaaagccttgaactcgacccagaactggacacctcgacgattcaggcagatcgaatcggacatgccagaccgccgcgtctccagaaagtcgatcaggattcggccgagcgagcgctgcttaaacgcattcgccgctttcgtttcgcgatcattcatcaccttcgccctctttggaaactttctctgcttgtgctgccaactttgacttctcgcgctcggtcaatatccgcttgacggccttcacgatgaacatgtcgatgccgctgagcctccatcctttgatcaggaaccaagcgccggtcggcgtcccttcagcaatctgctttccgtattgcagatatttttcaggccgaattctgaaacgtatcggctgatcaaccgagtcatcaacgcacatgatgtcgagaaactgcgactggcccttgtacaccgggtttttcccttgatcagccctcttcttctggcgaatcggttcgttctcatcagacagaacttttttcaccatcttgacaatgaccagaccatcatctccatcgcggatatcccgaatgttctgaatggggtttccggaagttactccaaccagctccggattgtcataagcatgaccccagagcgtgtgagcttcgttcaaatctgcgaattgaacttcagaattcgacagactcgcggcgactttctcccaatcctgaagcgtcttcaggtgggtgcctgccagctctttatattgagccttcagctccttaagatcggccttcaactccttcagatcggccttcaacagtttctccagttctttgtcttggctgattttcgccgaaagaatctgggcttccagagctgctacatcagcagccttgtcctcaacatcctgtgccgatatcgggcaattggccagggcgatcctcgcggccttgacttcctcacgaagacgcaggaaccgctcggccttcgccgggccgaagcctttggcgttcatgatgccgccgatcaggcgcccgtccgccaccacccagttgagttcggaatgctccgggtccagggccgtatattctacgccttctttggccaattcgcgaaggatagacacagtttgctggtcgtccttcgccgcccgaaggcacgcggccgcgtattccaggcgatgataccgcttcatgtagcaagtccagtatgtcaccacggcatagcttaccgagtgggagcggttgaatccccaggcgccgaatgtcaccatttcctgccaaactcggtgagcgtcttccggggcgacgcctatggtcttggcgccctcgatgaacaattcccggcgcttgttgaaaaattcttcgccctttcgcgccgacatcgctttccggatcgccgacgtttgttcccagtcgaactgaccaatgtccttaacaattgacatgatctgttcttggtacaggaacacgccatacgtccccgacaaatactgctcgacctgcggaatggtataggtcacaggctcgcggccggccacgcgctcgatatacttggttgccataccagaagacaacggacccggacgggcgagcgccgtgatgtggtcgatgttctcgaacgcggtgatgttgatcgcgtttgctaccgagcgaacggcctgcccttcgaactggaagatgccggacattttgtcttcattgagaatgtccagaaccgccttgtcgttcaaaggcaagtcgtacaactcttgcgcggtcacgcagttcgcgtcctggatgactcccaaagttcgaaggccgagcgcatcaattttgagaagattcagatattccgaatcgggcttgtcgagctgcgcgacgccttcagaagttaccgtacagaagttgatgacttcatcgttgcagaccaggatgcctgccgcgtggacgccagagtgggatgggtgaatttcgaggtcgcccatgcaggcggacgcgatctcatacttttcgcggaagtcgcggccgggctgagttttttcgaaagtgtcctccaatccttttccatatcgttcgtccgccgatgtatattcgatgatcgagtttttgatgttgtcggtgtcgtggaatggaatgccgaagcgttttccgacgtgagcgataaccgacgcggccttgagtgtgttgatgttacccaacttcacaacgttccaagtgccatacttctgctggagatattcgaacactagatagcgatgggtatcggcgaagtcgatatctatatcgggaagatcggaccgggaaatgtcgataaagcgctgaaagaggaggcgatgcgggagcgggtcaacctctgtaatgccaaggagatagcagaccaaagagccggccgaagagccgcgagctggaccgaccagcatgtgcttcttggcaaacgcgaccagatctgccacgaccaggaagtagctgtcgaaatctttcagctgaatctgcttgatctcttcttggaatcgatcctcatactcctgggtccattccttgatgtggccgcgactgaggcggtaggcttgcccctcgcgagccagagcgacgatatcaccatccaagtggatcatcggcgccttcgccagtttcacatccgccaaccgctcgactaccgcacgagtattggctgcggcagtatcgaactcttcgcgagtcatgatgtggcgtaaacggctccacagctcctcttcggtggcgatgtggcgaaggccgaccgattcccgcaccttccaggccgacgcgaaatcagcatggtcgatggatggcatgtcgttgtaagaggtaattaccaccggctttccgaatgccctggccgtctccatagcgccgtgcgcggcgaccatcgacgcgggattgatgtcaatgtagtcgattccggccagatccagatgggcataggcctcgccagcgaatttgatgacgccgtcagcttcctggaattcttgcggagtcaatccttgattctggaccgacttggaagtcaagcggtagaacttcttggtgtccttggcgagcacccaggctttgagcttcagctctttctcgccatcgtcggcgcatttgatcgggatttccatgccgaatccgcgaggcagttctgccttggcagcggcttgttcccaacggacgtggccccatgttccatcatcgacgatggcgacgaatggggattcgatctctttggcgcgctcgatgatctccgggaatcgaccatatgcggcgccgtaggagtaaccagagcgaacgcggagctgagggaaagacatcatgcggcctccattgcttgatacgcccgatacactcccatgcgcttgcagacttcgtggagcagccgcacgtcgtcgagcgcccggtgtttctgtacatatgggccgcagtagtgctcataaagatgttgcaaccgcatgcggtggccgaacaacggcgccgactcttccacagtacagatatcgagtgatgggaaattgacttcttccaggccgagctttccgcgagccaaatcgcaggtaagcatgaacttatcgaatggcaggttgtgggcaatattcgcgtcggctctggaaaagaagtcgcgaactttctggcgctgatcgaggaaagatgggtgcttgaccaggtcttcgttcttcaacccggtgatcttggtgatgatttcctcgataacgattccaggattgcagatgaactctacttcatccaaaatcttttcgccatcagttatcacgccggcgaattcgatgattctcggctgctttctcagactcaccctttggtggaacgggagccctgtggtctcagtatcccatacagcgaatatcatgtttgttccctcttatgtcgaaaggccggctgctttcgcgaccggcctgaggagtataccgcgacggctgaagatttacgccttctgtccgtctttcggcgtgatgcggccggagcgcatggtggcgtgaacaaacgccgaatagttgatcgagtccaaggccgaatcggcatccttgaacccgctattcgccaggcgagtgagtttacccaccatgtgcatcacgaacatggcgagtcgatgatcatcggcggtcttcgccaccaggccgttcgggaagaggatttccatgatctttccgtacatcaggtcattgcgaccataggtgctctggcgggcgcggaagacttctgctgcggcgtacagattgttgagaacatcttccgcgaaatcatctggatgggaatcatcttcgcccggccagacggattccatggcgaacggcgcggcgtcttcggtcgggttttcggactgagccgtttcagcgagcggagacggggctttcgcaaacgcctcgtcgagggtaggggcggagttcggggcggccgggaacggctcgcctgcaatgtcgttgggcgcgctatcggggtcgctatcggccgcgacggcgaagaacggcgcatcgcaaccttccaggttcaggatgtaggagtcgatccccaggctattgtaggcatcgatgatgtcctggcgatcatcgaacgccgcgacgatcttggtgacgccttcgattttcttcaggatgtcgagcgcgactgcccgcttgaactgaggcgccggctcggtgttaccatacggccgcatgatgagttcatactcgcgatgttcggcgatgccgagttcgcggtggagcttggccctggtctggaaaaagtggttgtcggttcggccggtgacgaagaaaatcatgaggtcggcgtcgatggcattcctgatgcgacctacagcgtgcgggttgagagtgtccttgtcgagacgagaatgatactcgtcccattgccgttccaaggcgaagctcttgcggtggctatcgtcgaatacgcagccgtccaggtcgaagatgatgatgccattcttgggtttgcgttccatattcagatttccttgatggttgctttctgggtgacggttttatcgatgaacgtcccatcagaagtgagtcggaaaacttcgcagttctgagtgaaatcgaacgattgcacgttcatcgtgatgcgaatggattcgctgccgttggtcacttcgacttgtgcgatgtcgccaactttctcgacaatgatcttcatgttacatggacttcccgttgacggccacagggttggcctcttgtttttccgatccccagaaatcgcggcgcagttcttcctgctcggccgagcgatccatccaggggcgatagaacttgcactggtagataggttccaacggaacatcaaccacaggaatctggccgggcttcgtctccagagcggccatgaaccggtcataggatttctgctggatttcctcttcattcatcaccttcgacccatagcgcgggaaggcgcaggagccggtggcgacgcagtgcggctggagtaggctgtcgaacatcggatagacttccagaaccagccggcgcatctcgcggaacacttcctggtattcgccctgggtccgaacgcacaggcgaaccttcgccatgtcgctgagagtccgcagattgaacttggccgcgatcttcgtttccatgttggaagggatgatggcacgagcgtcctggagcgacgcgccggcctccagcagcttctggtagctggtttgcgcgtcggcaatggcgtcatgccacagacggttcagctcttcgcggacatggtaggtcgggtcaggctcgccatttaccgtagccggttcgtcgaattcccagcggaaagcttctggctgaacgacggcgctgatttccagagcgcgactggtttcctgctggtaagccccggtccgcgtccgaacgagttgatgggtgaagttcttgctcacgccctcgatctggaaaatgaagtctacgaactcgaacggcgagcggatggtgtccagcatgtacttccagtggtcgagcttttcggcctcggtcatggtcgccgggtcttggccgcgcatgcgggtggacttcgtgcccaagagcaattcccaggcgttctgggtgtaactaatcagagaaatcttcatcagaaatcttccggaattggcgtgaagtggaatttttcggtgagagccagggccaggccttgggcttgctccctgttaaggccatactgctctatctcttccttgagcagttcgcaggcctccaggcgcgcctcatactcttcagcctcatggacggatgagaagacggctccatcagaggttcggtacacaagttcgatcgccatggtgacctcagtagcagcggatgatttcggcgcggatatctcgacggtcgaggtagtgctcacgaatcttatcgcgggcgcgctcggcctcttcgcggctgccgaatgacaggttgaacgacgtgaaaggcttatcgtccagttcagcgccggtctgatacaggatgcctaccagaacgaaagacggcgcggtcttcggctgctggtcggcttgcatttcgaggaaggacataggaacctcttcagaatgatctggtgcgtaaattaatagcgctcctgctgagcagctacggtttccggctcgtagatgagcatgtcaacgatttccgggcactggcctttcacccagtcgatggccgcgaccagtgtggtggaagcggagaaagagaaagtgcggtaagactcatggatgtacggcgaccccatggaatcgcgctcggtcgtgcgcgaaatgactgctttgatattaacgatccggcccatcttcggcctccactttagcgattatatcggacaggcttaacttctcgccattcaggaaataactggcgcgaaacttcctgtcgccctctggcccgacgattcgggccgttatggtgagactcccgccgccaagggcatcggtgtcccggaagaaagctagcagcgcccgcttgagcgctgcttcgcgaggatcgacggccattaacctaccacgttccagccgtgctgagcgcaccacacggcaccggcccctgcaggaagactattcagaaggaacacaggagtcaggcggccgtcctcggtcatatggatgaagtagcgggcgccttcaccgagccattcggccttggcgatagcgcgttcgagattggccttggtggcgtaggttttggtgtggttcttgtcggtggagaaggttacttcgcgggccatttgtcgattccttttggttgaagggtttcgcgtttcgatgagggaatattacgcccacctgatccagaagtaaagcacttttgtaaattacttcacgaacatcttcttggccttctgataagacgaagaagtcatcaggcgctcgatgacgtccatgtcagaaaccagatcatccagaaggacattgcgccaggtagcgaaccggccgagcgagaagatgccagcctcatgggtgagattccagatcatggattcgcgctcgtcgcgaccgagcggaatgattttgcctttggtctggatggtcggctcgccatcttcgatgagatgccttttcctgatgccgaaggccgcgcaaacgtaatccatatcccagtcgctgtcccattcgatggtttcgattttaccatctaaagtctccactatccccttagtgatggattcgacgatcagagtatcaccggtgatggacgctcgaaacgttcccactttaggaccagggaaatacacggtctggaagacatcacaggggatggaaagcttgtatcgactcacgatgatggaggttccttcaccgaatgacgggtcgattcccaggtccagccctgccgcagccagattggcgcggaacggcgcggtgctgatgatattcacgtggtcatcttgccggcgaagatactggaagaaagaggcgtcgaaaggacggctccaagtgatacgattcgcaagcttagccaccagctgctcatagtagtcggccggtgcgatccaacgcttttcagtcgccagattccagatggaccggtccgacaggccgcccgttactttcctggagtacatgttgcagtggtcgatgcgcggctgggaaatgaactcgccgtcgatgtagatagctttgtgtacagtgacttcgcggaacgggatgccggtgagttggccaatcactggcgagcggaatcgcagaagtgcgttgtggcgctccttattctccggcgtcgccgcgtcgatgatttgggcttgaggaaagcgatgcgcggcgatcagtccggcgagtccggcgcccacgatgataactttctgatcaggaatcatgatgtgtcccttatgagtgtacaaaacttgagaggataaaaaagggacccattctcatgagtcccttgaagagctagacgattcaggctcagaagagcggcggcttactcttcatcaccttcggaaccatcggcgccctgatcttcaccgtcgtgctcctggccttcgtcatcggccttctcgtcatcgccctggccagcttcgtcttccttcgaagcgatggcaaccagatcgacccagcccatgatttccagcttgctcaggtagctgcggaccgaagtgccatagagcagatgggccaccttctcgccgaaggcttcgatttcgaccggctcaccaacggtgcagtgctcgttgatgtaagcgaacaccttgccgcgagtcgagaaggcctgcggagtgccatggccgtcgccggtcgggatgaagtgggtggcgcgggggcgacgcgagccattggacttcaggtcttcgcggcgggcttcggccttcttacggcgctcttcctgctcttccttgcggcgctgcttctcggcttcgcgctcggccttcttctgctcggccaggcgcttgcgctcttcttcgcgagcgactttctgggcttcctgggcggccttcttctcttcggcctttttggcgcgctcggcttccttctcggccttcttctgctcgcgctcggcttccttggccttcgccttctcggcctgctcggcttccttcaacttggccttttcagcacgctcggcttccttggcggcggccttttccttcgccttttcagcacgctcggcttccttcttctcacgctcggccttgcgcttctcttcgcgctcggctttcttctgctcgcgctcggcttccttggccttcgccttctcggcgcgctcgcgctctttacgttgacgctcagcggccttctctgccttgcgcagggcggctgcttgttccttggtcagctcttcgccttgggcctggtcgttctggtctttctgttccatgttcttactccgggaatgtttaaagggatggcttattggcctgtgaggggattatctctaaactaattgaagaagggaataccttagcctgaactttcctaaatattttctttcgggaaaatccagactccagggaacttatttatgttcgcgaagtttcaactcttccgcaaaaacagcaagtattcaactgcacgagttatgccggtatacatcaactgactataaggaattgacggcaagttttcttccagcattgccacacgcttccattccgatccctgcgacttatggaacgtcatcgcccaaccgaagtcgaatccgccaatggccttctgcgcctccagccgcacatcttcctcggccgaaaagctcaaaggattgaacttcacccatcgctcatagttcgttccgataatgcgaactttggcgaacaacatttcatccggctcgtcatcatcttcttggccttcggggaccggcttgaagtccagcagaattgcttgctcgccgttcatgatgccatattcgtgctggttcccggtgcacaccagcttctcgccgatttccggttgtacacccttgtagccgaggatgcggcgcgccctggcgttcaaacggcgacgagtattgttgtaggcgcaaaggatcacgccgtcatcgtccaagaacgtccgcatttcgtcgtccgacatgtcgaatccggcccgtaccagaatgtcgtcatactcgcggcagggcaggcgcttgccctggcggacgaacatcgacgcccgaacgatattgccggcgttgcgctcgatttcggtcatgatggtgtcacagctgttctcatggaaaatctggacgccgcgcacaggaggaacttggccaaagtcgccaatttccagaaccggaattcggtgcgacagcaagcgctcttcatcccactcgccgatcatggacgactcgtcgagcacgaccaacttcggcttctcgtcgagcgagtctttgttggcaaacatgatttcgccgtcttcatcttcgccaatcggccgatagatgaagctgtggagggtccgggcattggtgcagcccttctcgcgaagccgcgctgctgctttcccggttggcgcgacgaagaccgtccagtccatcgagcagcaaagttcggcgatgatcttcgcgatggaagtcttaccagttccggcgaaaccagcgagtcgatagacctggcggcggtgcgctcgatcacaccaaccgcgataccagtccacaacggaattgatcgcgtcgatctgctgactgtttggtcgaaagccgaatcgctcttcgatctgatcgacggtgaagttagatgctgacatatttgcgttctccaacgctaggtttaattgaatcgaggctcagtttaagcacgccgtccacagaccagccagtatcacgacgatacttgcggccttgcgggtcgacatagaagttcttcgtgcgccgcagcagaacataatgccaagcagctccaagcgcgtggacccttcctttatacgggaaagccttcgcctgctctgcggcctctttggccccagggagccagcggacggtagaaaggaccaggaccgcacccttaatagcctgggaagcggcgcggccgtcctgtgggctatagcgatgtctatcgaagtctacccagtggcggttgccgcgccggagcttgaccgttcgggatcgcccctcgaacaccaccgtgccttcgtgagtaaaaatatgttccgccatcgaatgttcctttataacgtacagttatgctttacctctgcgcaggaagagtatactatcagctgactcgccaaagcgagcgaatttaatccaactttacttcggcaggaaagtggccgatactagcgccgccgcctgtactgccctccaaaacagaggatacattaaatgcaagaatgcaagatttcccgcgaccaactcccggtcggtaatccgaatcccaatgtcgacaagacccgcgacccgaacctgaagcccggtttcctgcgtcgcagccgcgagctggacccggcgctggccgttcgcattcgtcgcgagctgatccacgccgaagcgtccgatctggccaaggccggatgggtcaattcacagtccagcctttatggatcgaaagccttcccgcgccattccgtcgttcgcgtgaccggagttccggaagatggagctttcatcggcatgctgatcggcttcatcgagcatcgcgagcatggcgaatgggcggtcatggaagccggaacgaaagaaggcggcgccgtcattattccagtcgatcacatcatgcgagcgtcattcgccgaagccgaagagttcgccgaaaagtgggagcggaacttggggtggcgtctcctgcgccaactccgcgagtgcggcgccctggccgggactgaagacgagttcctgcggcggatcatcaatcgatacgttcgtgatcgcacgatcctcgatcaccacaaagtcggcgcggacaaaacctatactgatgcagtactcaaaagcatcggcgaaacatggccgaagattccttcggggaaattcgtcggacaccgagtcgcgcagctcctgatcggccacaagctaggtcgagcggggaccattctgaatgacctggtggacttcctggagaagttcgcggccgggcgcgataaagttctcaacatcgccatctgtaattgaggtgaagggatgaacaataaaccgacgctgaatcaccaccatcaaactgcattgttgtatctgtataacaatccaaatcagccggccttcacaggtcccaacaatcaggcgctcaatgaacttcggcagatggggtatgtaaaggcgaaagaattcgaaaactgggcaggcaccggccatcttaggatggaatggacgctcaccaaagccgggattgagcgcgtcgaagtcgggcttctggggaagtgcgacgcttgcaagggaatcggtcagactttgcttcgggggaagtgtactgtttgcaatggccgcggccaggggtggatcagcgaatggtcgcagaagccaatcgaagataatcctcaaattacccctaagttcgaaaagaccgatgcgaataggcttgcagacgccattgaagaaatcggccggctggaaaaggcactggccgaatccgaaaagcgcgggagcgagctggccgcgagctattgtgacggcgtagtcggcgatgaatacggccatccttattgtcgttataaagtggaacgcgacgccgccttggccgaagtcgagcgcctgcgagaatcaaaaggcgatccctctggcagcttcgacaggtgtatgaagatgatgtacgagcgcgacgagaatgcaaaacgactcgacgccgccttggccagggtcgcggagctggaagggaagttgacggactggttgcacgaagggttccggctcaacgaggcgctagcggtcgccaaggctcaacccagcgtgccggaaatatctggcatcggtcgcgatgccgaacatcccagagctgtagtgctgtatctgcgtaacgaacccagcgatgaagatatgcgagcaatacagaactttttgcgcgccatggccgcccccgctcagcacagcgtgccgaaagcatggctcgacgttcaggcagagcgccgccggcaggtcgaggcccaggcgctaaggcaggaagtcgcagcactgcgcgcaagggcggatgttttgccggaggtgttcgggcttgagcggtaccgcgtagaaaaaactgggaagggtttctggccatactgcgtgcgtgcgggggatggaacgcgtgaactgttcgtcggccacttgaagcagtgtcagcgggtagcgaccgaattggctacggcgtttgaagatgggaagtttatcgccgcgcccggcagctcggctcagcacagcgtgccggaggggtggaagctcgtaccgatggacccgacatcgcagatgacctatgtcggtcagtccctgcgttatgacgcggtaaacagcatcggcgagatttaccggcaaatgctcgccgtagctccctcacccatcgatccggccgcgcatcctcagccgtgccagcaaccacaggcccatcctgcccgctgcgggtgcgagcggtaagtgccaagtaaggaattcatgtaatggaacagaagaaaccttcaccagtagatggagtcatcgccatgaccagcctcgacgttctccggaaagcacagcccgaagcccaggacgagtatgccgtgtccatgttcgcaacggcgatccgccagaaaatgcagcgctcccgcgataaaggccgaggcggctggatcgactgcgacgaagatattctgatcaacggattcgccgaacatgcgctgaagggaaatgagaacaacctcttggacctggcgacattcctgatgttcatgtgggtgcgcggcatcgacgatgcgaagattcccccggcgctcgaaaaggcgcggcagcacaagatcatggaagcatggagtcgggtccacgaagatggactaaactccgccagaaaggcgagtgctgcgcgacagttcgtggaagtgcctcgacgcaaggggcgcccggagcgacttgcatgaagcctcacgaaataagactggcacaggccgaagagttcctgcgcgaactcggccgagggattccggacgacgaacgggtaatggttggctacgctgaagaggccacagtccaaaccgacgagaacggccgcaagctcaacgccggctggtggcctgtgccctggaaggaagggaaatacataaactcccgatccaacgcctacgcttgcatctcgtcatccatcaagacgcccaacccgaagaccggccagatgcgatactggcgcggcgaagcctctttcggccacggcctggcgttgatggtcgatgacatcggctccggcaaagggtccaaaggcgacttcgaccgcgacgaattccgcgagcgactggagccgaccgcgattgtggagacttcgccgaacaactaccagttctggtatttcttcaaagagcctatgtcacacatgctccagttcaaggcgctgctctattcgttcgtggaccaggtgctaaagaaaggcggcgacaacaccgtcaaggacgtcagccgttacggccggatgccattcggcttcaacaacaagcgcgggaaagacggcaagttcaaatatgccgacgaaaacggcaaacccgaactcgtgcgcctgtacagcgccgactattccaagcgctactcgccagaggagatcgcccaggcctttggcgtccgcatcatcatgccacagatgaagaaggtggagataaaccgcgacgattgggtgtatgaccaagtatggctgaagtatgccgagcacatctgcacgaaatacaagatgggcgaggcggcaggcggccaggtccagcagaatatgtccggcaaataccgcatccgctgtccctggggcgacgagcacaccaacggcgatcctttcggcgcatactttcgcggaccgatacctggcgccgagcacgaatatgtgttcggttgcgggcacgatacttgccgcaaagagcatcgacggacgtgggcggccttcactgatgaagtcgtcctgccgtatattgtcgaacaacttgaacgcatcaaccgccgtcatatcggcgaggagtagtaactatgcaaaatgatcctggaattctgatcacagccattggcttgctgttcctcggccttatcatcttcttcgaaggcctaaagggatggaaaatacaagtcgcaaacttcctcgcgtcgcttctgtgcttcttcttcggcctttctgctttgacgttctggttcgtcgttgcgtttgacgtattttaatcgacgaacggtacagaaattttcggatggggacggaacttattagctctgccggtttaggtaggagataatagccgtccctttcgcctcaatatgtagaggcagtgttatatccgatcatgtaaagcagaaggcggcaaacctaacatgattatcgacgacgataacattcttgatgatgacgaatcggggtccggtgagttcgatctcacgcaaatagaagatgctggaatggaccctttgatgaccgccgcaagtaaagcggccgatgatgcgattgcgaggaatgaaacgcaccgcgcacaaaaggcggcaagatacgccgaggcgtatgcggaaccagacttgagaaagcgagcgcgattgttgatgctcgaccaggcgttcgatcttccggtcagccgggtggtgaaaggtccgttcgatgacttcatcactaaatacagctcaacttccgacagcaactatctcgcggtctatgatacgttgttctgtaagggcgacggaaccgtcccgcatccgcacttcgatgagtttcgcggccggctggtggaccaccgaggcgtggcgttcaacaacaagaccctcgaccccattgacctgatgggcgccctcgcggctgcggccttggacgatccatcgattaagaagacgattgagacttgctgcgtttgggcgcgtcgatatcgccgcaactctttgatcgagacgtttgagaagaagataccggattgggacggcgaagagcgaattagcacgttgctgatcgatcttttcaagccgttcgacaccgagctcaaccgtatggtgagcaagtatttctggctgagcctgtactgccgcatcaactatccgggaatttcggcgccgatctcgttggcgttgattggtgggcaggatgcggggaaatcatatttcggcttgctgatctgtaaggaactgtccggtgggcgcgatctggctccagttcagctcgacctgagccgacacgaccagacgccgttcctgcgcaacatcaccggcaactcggttattgcgaacgtcggggaaatgtccggcttcaaaaagggcgacatggaacgcatcaaagaattcctggtgcgatcttcggatacattcgatcaaaaattcgagccgggcgaaacgatcaagcgacaatggatcaccatcatggacggcaacggatacgatggactccagcgggacgactccggcaaccgtcgattctatccgatgttcgtggcacaacttcccgacgaagatggaaagccgaactgggttaagccgggcgatggtaatgaaccgttcaaggtggacttcacagacttcggccgcaagttctggcaggctatggctgagtgccgcgcctggatcgaagagcatggcgtcgatggatacctgaatatggtgtcggaagctaaccgcgaagtgcagaacttctctatttcggaaatggagaatgcgcgtggcgtggttcgtgatgatacgattgacatgtatctgatcaacgttctgatgagttgcgagttcgaagaggttaagccgggcaggaattcaaagaatcctggatggagggctgacaccgtcaccattctgaaatggttcgatattctcgccaggaagaagccgatttctcgccacttaactccgcacctgaaggcgctggggttcgtcccgaacaagaacggcctggctggttggtgcctgcccgtcgataaggttgcgcctggatggacgaatagtatgcaaaccacgctgccgccgttcaatgatgcgcttgtgtacttgctgaggaagggcgacccggatatcactgatgaggccgccatggcaaagattcgggcagtccgggccgagcgagccaagattttgggcgaggatttctgatgtagtggttgagtgtacttggactaggccgccttcgggcggtcttttctttggtgcggcgtacattagattccggcgttgggcgggattggtagaagtgaatacagtaatttggaccagtttcgagcgcgaataatggaaagtcgatagattttcggtatcggtttagcgtgtatggtggacggattttgcgtgaaatgttgagaaattgcgtgtttgaggtggacttttcgtgggaaatagccgcaaattactgtatagcgattctgagcggtaatttgggaagcctactgccgcgtgggttagcgggccaatttcctaatttccggtttttcgagcatgggttaaaactattctacagcgaaaatcgattgcac

SEQ ID NO: 38 - DNA, 66406 bp, synthetic construct
  source 1..66406: mol_type = other DNA
aatcctaatagaaaaaatctatcacggacgttacctatctttaaaattaataaaattaatagtaatttggtaatttggtaaactttagtatttgaaagcctcgcggcactaagcttgtacatatcccgtcaagtttccgattccagccagctcgcggcagggtcgccggaaacttccggacttccaatccatgggtcgcggcaacaccacggcggactaagcggcaagtgccaaaactcgacgaacggaaccggaaatttgggagcgcgatagaatcgctcagctggacatatttctaacattcgatttaacactcaacccaaacactcaccaccaccatcgcccgccaccagccaatccgatcctcacccaccagcagaccgcccatataacatcctataacaccacctaacactcattcatcatcaaacccacccagacctacagcccacccacaagcagcccatagacgcgatccctggccccatagtacaatcgcgccatactcagtgtcgcgacagagcaccaggccccatccaccaaccgagccaccgcgacgactccagaatcgaactcagggacgcagcaccaaatgaccaaattctacagccccgacgatctagtcacgccacaggaattcgcagacccgcatttcgcggcgatcaaccaaaagcgattcgacctgtacatcgacctgcgcgtccaaggttacagctcctggcgggtcttccgggccatctggggcgaggagcatatggacggtcccgcgcaggcccgcatcttcgcgatggagtccaacccgtactatcgcaagcagttcaaggccaagttgaacgcgaccaaaacgtccgatttgtggaatccaaagacggcgctccacgaactcctccaaatggttcgtgaccccaccgtcaaggactccagccgtctgtcggccatcaaggaattgaacgttctggctgaaatcacgttcgtggacgagtcgggcaagacccggatcggtcgcggtttggccgatttctacgcatcagaagccgaggctcagaccgcgaccgtcgctgctgcggccgaagccaatggctatgttccggaaggcgaagagggcgatttcccgtccccgacgccggaaccgaccgaggaagatcgcgccaaccccatttagacataaaataacggctaaggatttaaggtaaggaggtttatttatgcaggataaaaagtctaaaagtaagactgccaagattgattggtctcactggacagtgacggtccctgaggagaacccggacaagccaggtaagccgtattcactgggttatccggagattctcaattatgcagaggacaaaatcgcgtcaaaatacatgtacgacgatccaaaggacaaaagtgtcgtgttctacgcattcccgtccggcgtgactaccgctaacacccattacagccggtcagagttacgggaaactatggagaccgggtcaaacaaagttaactggaccttcgctaagggtggcaaaatgcgtggtacttacgctatcgacgacatcagcaaagagccggatggtaagtattcccgcgtaattatcgcccaaatccacggcgtactgaccgacgagcaacgtgatcttattgggcaaaaggacaataatgcccctccgattctcaaggtgtactgggataaaggtaaaattcgggtaaaaacgaaagttttaaaggacctgaacgccccttacaaagagatgcttctggaacacgcttggggtgatgacgaaggccggaactttaaagagaagattgacttaaatacacggttcacattggaggttaaagtgagcgatgggcggatggaagtcattcttaacgacaccgaaagtttggtctatgacgacattcacatgaaaaaatggggcattttcgaaaactactttaaagcagggaactacttccagtctaaaactccgggcacttttgcaaaagttaaaatttattcacttcaggttacccactgaagaagcgacaaagccccggactctagttcagaatccggggctttcttttgggtttcttattcgccagcttcgatgatttcgaagttgtatttgacgccttcgtgctcgaaagtcatcttgccagccgccttcagctgcatgcggaagcggatatgtttcgaagaaggcaggccgaactcgatgaatgctgcgttggtggaccggaactcgccgcgcttgcctttgacagtcacagccacgccatggcgctgagtgcgtttcttggaaacttccgggtctttccaggagttggcgatggctgccgacaggtctttggactctttggctttctccggagcgttcttggcctcttcgcgcatcttccggatttcttccagcgcttcctcttcggtgatctcttcttcaggcttcagattctcttcctcggccttctcttcttccttcttcttcttggaagtgcgggttttgtagactttggccggggcttcctcttcctgaaaggcttcttcctcggccggcagagcattcaggatggcgaggcagcgacgctcagcagtcttgcggtcagagaaacgcttgacggtcgcatcggcgttgtgagcgttgtagaaggcgaccagttctttcatttctgcgttctggatgtcgccgaaggttttgatggagttggtcattttgcgatcctctgttttggaagatttcgttcgggcttcggtttgtcgccccgttgaaagagattatgcctaggtcgatgctgcgtgtctacatttatttcatcagattgatcgcaaagccgacgaacggttgtctgatgtgaaaacaccgcagagcaggttgcggtgtttggtgggcgagggcgatggtcagaaagtcgggactgtgatcggctcgattggcgggtcgccgggcctgtcgttgtccgatgcgggcgccgggctggaagggatcgcacccgaccgaagcgccagcgattccgactgcctgcttacctgcggagctggaggcgcttttggcgcatgaggcgcgggcggaaccggcaggcctggaggagccatcggcgccctgggcggctccggaagatcgggcagatcaggaagactcggcgctatgccgccaaaggaccgctgcgaccgctgcgacggattgtcgccgaacatttcggcggatcggttgtccttgatgacttgacctatggcagtcttgtcgccacccggttctgctggatcgaagcccgtgaatggagtggtcacgcagcgcatgttcggatgggtcggcagattgttcaggacgatggagtccgcccagacatacgggtttttgtggttgccgggtccgtggctgatgatctcggcaggaatatggccgttcatggtgagccattccgccatcccttgccgagtcagcgggcttaccacgatctgaccagtggactcttcggcgacggcgaacagatcaccgagcttgaatccgatgatcatatagttggacctggactcgccgacgaaagccagagtttcgatgttgtggtggatatcttggtcttcccagatgtatagcatgatgtactcctcaataaggctgcttgttgtgctcgaccagagacataccggccggaactttgaagcggatgtactcgatcatcatcgccgtgcgacgccgattcgtgccagactcgtcattgacgaagagttcgcactgatgcggaatgactcgcgtcaccaggtcttcgcctttcgagccgtagaacttgatgtaggctgcgacgcctcgcgtcatgttcagatgaatcgtttcgcagagtcgctgcgcggccgacgcgctagacagatcggtcggactgaccgtcacccagtaatggccattttgttctttatcggacatcaactgccctccattgataaagccccctgccgatccgcagaggctggttgttgttagtcgcgcttcaacagaacgactttgtcatatgcgcgatatttaccgcgccagtcttcccagtgttcgccggccgggcagacaagctccagagtgatttcgtcgcgccagcattcgacggaaaggacaatcgccttgttcctggctgcggaatctgctctgagcttaatcagaatttcgtcgcccgttttcagttcatcgactcttaccactttggccatcatacactcctatgagaaggcgcggccaggacgatcccagccgcgccgatggattaacgtttgtgaaggatggacactgcgtccacgtcgaggatgctgatggtacggcgacggcgcggattgctgcgttcatggatgcgaatcaggtcagcggatggagcttcgtccaccacccatacatcttccggcttctgcgtccggagcaggaccgttacttctgtgttctgggcgaggccgttgcagatgaacaagaatttggacgagggagttctgtacatgtcgagattcctttttggacttcgggtccggcttttcagtcggtgaagagattatgcctgatcatcaccgtcgagtaaagcacttatggaccaattctccagttaaatggaaccacagcgcggtatcgctgatcgctacgctcccacgccatggcccttcttgcttacatacttcgaaccacaagctgatttccatccttgccaggactcggccgaaggattcgagccggcgccggctagccaggatgtcgacattcaaccgccgattgatttcgtatcggcgaccgtttatgacgaagaccagccgcagggtttgtccgtcaagacactcccagtatctggtttcatatcggagccaatagcgcttgccagccgggcctaccatggccatttaatcgatgctcctggccgcgccacgcggtccggtcggcgggacgggatcgaaccgacccaggatgtagtcgggccggcgcgcttcctgaggacacacggcgagaaggcgccatcctgcgtccagggcagactggagttcgtccgtgcagcagtcttccttgagcagcagacggttgacgttctggagattcggaccaggtatggccgatcctgtgagtgagttccaaccctcgattccactcaccatctccggttggttgatgtagcttacggacataccggccaaccggctcgcggccagctccagacgctccagcatgggtcgcagagcagcttccgggtcaatgtcgtcccagagaaggaccaggctgatgatggtatacggatagtccttgtccagatcccaggctgaagcggtcaggcggcccaggccgatttcattacacataacgggaacgtcgctgttccaggtggacggctcccagttccgctcaccaggattcccgattgttacgccttccaggttccccaggagaacgtggagcttgctgacatattccgcttccaaggctttccgctcttcgtcggtctggttgtggcgatagaaggatggagggctgacttttgcatgatagagtttcataactgttcctcggttttggaaggcttgaacgttagagaattgtgtcgcagtatttctcgaaaggactctgacgcttcttctcgcagatcgcacaggtgatttccaggtcgggcagctcgctgtaagtcttgccgagatacaaccagcgcttgcacagactgcggccgtccgacgtgaagaagtggactttgcgagcattgccgggttgcgcccagccgcttggtgccggcttcctgctcataccatcaccacgtcaatttcgtcggcgaagaagttaaagccaactccatctgcgtagccagtgtaacgcagacgagtcgtcccatcaatgtgggcttcctcgacgccgatgacttccagggtggtatcgttgcagtacagcttgacgaacatcttgatgccggagccaatcgccgcgaaggcgatctgcttgtacaggtcttgcttgatcatgctttacgctcctgtttgcggatgtattctgccctgacttcggcttcgaacttcgcccagagcgcgttgtctactggaccccagggaccggtctgagttccgtccaccggcgcgaacttgccaccggcgcgacgatacttggacagcgttctcaggctgatgattttctcttcttgggaatcgaattggacgatcacttgacatacttcccgaagtagcaggtgtggagtatttccaggcctttggagatagccttcagcttgatgccgaaattcttgatcgcccagtccagatcgtggtgatagaactcgatgatgttgacgatttgaccggcgctgtagtggatgacgcgaaccttgccgttccagcggaaatcttcgcggctgtttacggcctcgactgcgatggtgtcgtttctgccgatgttccatttggagctagtcatgtcgcaatcctctttttggagtgtttcgcgttcgatgaggtaactatacctcagccccctcatcgagtaaagcattttcttcagattatctgaaaccttttgaagacaggaattgccgccagagccagtcgatgtgttcgttgcagtaacgctcgccatcggacgacatagataaggcgccatcattgatgccgaagtgggccgcagcgagacattcgaactcgaactggagcgttcctgggcgagggatatgggacatggcgtatttctgcacggtcagtgatcctcagaaggtttagcgtttgcgatagccgctactttctgcataccgaggcgatagaaatcggcttctttcctggcttttgtaagctgctccatggcgtcgcacgccgtcttgtgctgggcattggcgttcttgatgctgccttccaggctcttgtccagctcttcccggagcgccttctgcgatgctagctctgcctccaaatcctggattctgagctggagctggcgatttgtctcgccaacctggttttcgctggcgatggagttctgaaggcattcgtcaaggcgagtgttttcgcgcaccagctgatgcttttcgactttcgcctttctgcacgtctctcgcatttctgaaagctcaatcgcatgcagatcgtcatccgggtctttacgctcttccttcgactccatccgcaggtagtactggccggctgcgaaggcgagcactgcctggtcggcatacgccgcggcatcggtcatgtatctggatttgtagcgaggcagaaacttgcactcctctggatcccagaggagactatcggcaataggccagaatttgcggaagccatcaggatcgacttctacattgaccatttgcagctggccggcctccacttcgacttccagaggaacctgaatggcgccggtgatgtactggaagtacactatgctagacataacacaatcctcataagaagtcgcggccgggaccatcccagccgcatcgtaatcactcttcgccttcgtccgcgctcagccactcttcgaaggcgaaatttaccttagactcgacccaatcttgaagctcatcggcgaactcgtcactgtcgatgtccatcggaatgcccagagtctcttcgttccacagttcggcattcagttcgaactggatagccggttcgccatccacattcagcaggatgcggtctgcgacttcatattcgtcgacatcgaagaggaaaccgccgctgatgatgtgctggatgaaagcttcgtcgaagttgctgacgccgatattgatctgcttagtcattttttctggccccttatttggcgagtttgtgctgagctttgagggtggtcagcttagctttcagggcgatcatagcctggccgcgcaggccttccatttctgcctcgctgatggcgatcttggcggagcggatttgatcgttgatctgggatttggtcatttctgcgttcctctgttttggagtgtttcgcgttcgatgaagagattatgacgctattcagaatggaagtaaagcagaattgtgaaatatttctcaaagtggacgaacggtatgccccgtcaggaatatttcctcccatggaaggcatttccgcatcagaatgttgattaggtatcccaaagcgcgcagtggcgaatgtgagtccgcacgtacatagggctgtattgtgcgaagtgctcgacggtcgcatccaaggctctgctattgccgcacccttccgctttgcgagccaggaagaatgcttctatttgctggtttgcgttcatcgtcttaccctccaggtgtttgttcgtttcgatgaagagattatgccgttggtcagaatggaagtaaagtgtattaacaataaaattatgttcaccgacgaacggttgtgctcgaccgtctgttgcggcgtcgatatactcgacctattgctgacaccggattgattagaatgtacaaactcaaccctgcactgcgagcggtctggcgaactcgcgcccgttacaaagtcatttatggcggccgggcgtcttcgaagtcacacgacgcaggcggtatcgccgtttacctcgcggccaactatagactcaagttcctctgtgctcgccagtttcagaaccgcatcagcgaatcggtctacacgttgatcaaggacaagattgagaattctgagtacaacggcgagttcattttcacgaagaactcgatcaagcacaagaggaccggatcagaattcctattctatgggatcgcccgtaacctgtcggaaatcaagtctaccgaaggcatcgacattctctggcttgaggaagctcattacctgacccaggagcagtgggaagtcatcgagccgaccatccggaaagagaactcagaaatctggatcatcttcaatccgaacgaagtgacagacttcgtgtatcagaacttcgtggtgaagccacccaaagacgccttcgtcaagatgatcaactggaacgaaaatccgtttctcagtgagacgatgctcaaggtcatccacgaagcttatgagcgcgacaaggaccaggccgagcacatatatggagggattccgaagactggcggcgacaaatccgtcatcaatctcaagttcattcttgcggccatcgacgcccacaagaaactcggctgggagccggccggatcgaagcgcatcggcttcgacgttgcggacgacggcgaggatgcgaacgcaactacgctcatgcacggcaacgtcattatggaagtggacgaatgggacggcctggaagatgaactgctcaagtcgtccagccgcgtttacaacctggcgaagatgaaaggcgcctcggtcacttatgactccatcggtgtcggcgctcacgtcggatcgaagttcgccgagttgaacgatgccagtcccgacttcaaactgatctatgatccattcaacgcgggcggcgctgtcgataagcctgatgatatctacatgaagctgccgcacacgacgatcaagaacaaagaccacttcagcaacatcaaggcgcagaagtgggaagaagtcgcgacccgattccggaagacttatgaagcggttgagcatggaaaggtttatcccttcgacgaattgatttcgatcaactctgaaacgattcacccggacaaactaaatcaactgtgtatcgaactttcgtcgccgcgcaaagacctggacatgaacggccggttcaaagtcgagtccaagaaggatatgcgcgagaaacgcaagatcaagtcgccgaacatcgctgactcggtgattatgtcggccattctgccgatccggaagcccaaaggtttcttcgacttctaaacacagaaagcccggatcgctccgggcttcgggtcttactcggtgtggttcctggcgctgagtgtcgacgcaacggcctcgccgactcccagggcttcctggccggccgcgagcgcttcggcttccgactcgacgatgaaatcatcaccttggccatcgcctggcggaacctcgaccagcacggcttcttcgccttcgaaccgcaggtcataggtcttttcgacggacagaccgtaacgagcgttgagcgcgtcccagagctgggcctcataggtccgcaggtcttgcagagctttctggtggctgagcatggccatgtcaacggcccgttgcagggtttcgtccaggacgttgaatcgcatgcgaagagaacgaatccgctcgaccacttccgcatccactacatgcctttcgatcatcgcttttcacctttgctgaatgtaacgttgtagccgttgtcggccaggtaggtcagggcgccttcgaaggaagttccgacgaggtgctttagcttcatttcgcgttgcgcggccagccagaatgcagttccggagaactcggcgcggccttcggccaagaccctgccatcaggcccggcgatacgtacatggacggaagatagcttgatcggcatcagtgaatacctccactggcttgcgacggcatgctttcggcgcgcgcgcggcttcgcagtccgggcagggacatgcttggcggacgcgctccagctcgtcggcatccatgacatagagcttcccatcggcagtgtcgtgcgccatggcgatgttcgggaagtcggtggcgctcaggccggcgacagcgcggatttcgtcccaaagcaccagatgctcggcattcagtcgggcggcgagcgcttcgtgctctttagcgacgcgcgccatgaactcgtccatccggaatgcgaattccgcatcgatggcacgggccgaggccatggagctgagtcgaatcggttctttcttcatgatgattctcttttggttggtggttgttcgctgctcaggcctattacagtctgagaagcatgatgaagatgaacgcaaggaacgcaaacggcacaagtatgccggacatcagctttgacaggcgctgcatctcagcgtatttctcggttgacattccgtgctgcgccgcctcagccgcgaagcgggctttcgcctcgataacttccgggcgcagcgacaggacatattctaaggcctcttcccgcgctttttcggcctcgaccagcctagggtcgcgggccgagacttcgctgtaccctggccttgcgggatgggcctgcagcgatggaggaagttcggcggccacgactccatagtcggcgcaggcccaagcgatcccgatgaggatcgcgaggatggactggacgattcgcagcatcactttgtcgctaggaaagcccatggttaatcctccaccgaccgaatgatttccatgttgcgaccggcattggtcccggcagtgtaggcgcgccgaccgtcactgtcgtccagacgcaggagtttggtaacattcgacttcttgtaacccggatcgccgaaatgttcgtggaccgcagcttccttaaccaccaccagagacgttccggcagaagataccagctccatacgcttcctggttatggactgaaggcgatagctgatttcctgggtcgcggccagtttgaattgcgcggcaacctttacgttgaaacgttcgtacccttgcgccttctgatactcccgacacagacgatcaatggcctcgaccagggagttgaacatgttcaccgccagctcaacgtccgacttgtagcctttgaagcgtacggcatgaccccagcgcttggtagtgcttccgtcgcgggcgctcctggatgccttagccgatgctctgtggttgttgatgccaccggcgaaatccatgatgcagtcattgtacgtcgccacggccactgagaaaaacttcatccagttcgggattgcggaatagtaacgagtggcaatttgctcatcgaactcttcgcgaatctcgccggtagcttcgaagtcgtgaaggtcatatttgtccttcaacttcttcacacgctcggctgcgatggccgcttcgtgcggactggaagagtcggctgccatggcggtcagtttgcggatgcggtctttcgccttctcgatggcttcaggggtgaattcgttctggtcggtcatggtcggttccttttgtctgaagggtttcgcatttcaatggagctattctgccttcattcagaatggaagtaaagcactttcttccactatttcggcatcgactggaagaaattccagatccaatcacctgctaccagcaagaggatgagggcggcaaagaacaagacagcggccgcgagctgtgcgcccggcttcagtttgggatggctgagcttgggctctacgggaacggccggagcgctagcgctgcaaccggcgtctcctgggccgtagccgatgccgcgttcacacgcctggaacgacaccagggatttaagatactcggtctgcttttgcgactcttcgtagatgccggcgacggcgaaccagagggcgaacactacggacgtacacacaacccaggcgccggtcagcaggagggccagcgggccgatgacgaagacggtagcagccaggacgattgcgccgccccagatgatgaagccggccagaccattagtgatgtcgacacagaactttttcattttcagattccttcggttacgggatggaggggatttgaaactctgcgccgccgagaacatcaatgacgacttcccagagcgtcggaacagaccactggtaacggtcgaagtcggtttcaggatcgacgcccagcgtcacataggaagtggcaggccatttatgaacactgcctttccgcatgagagtcgccacgcggccgtcaccgagcggattcgtcctgtgcggaacgtacgcagacatcgaatattgctgcccggcgtcgataacaaatctttgcctctggcgcagacatacagagcccacaggattccagccgcgaccgccgcaagcctggcgagccgaagaatgctcataaccttcgtgagtcatttcgccgaggcaagccgagcgatcctcgtaatagttgatgttctccatcgatccaaccagcaccagagactcgaaatcgaatcgatgatcgtggatggccgagtgattgaagcaaagccgacgcggcagctccgggtgccaaacatggaggcgaccggccggaagttggacctgaatgaaccccaggccgtgcagagtgatcttgtccttcatcgggtcatggacggtgctcatggataatcctcagtagcagaaatgtattgtgagagttacgattgataagccggtcgcccatagaagggcgaaccaggccatggctttgatggtcgtgtagatcatccgaagaattttccggcacagatcgggccaatgcccatttcgatggatgcgtggttggtcaactcgcgaccgcagcaggagcactgaccagtcttccgaccgtaggcgactgccgattccatcggcttttcgaacatcttcagaacgtcgtcgtgctcagtatcggtgcagtcgcgactcttgatgaatttgccatcggtgatccggccgaggtagatgtcgcccaggacgtacaggctaccggcgttccggctgtgagcgctagcctctttcacaacaacgatgagcggctcctcgccttcgccagctaggcggattttcgggcgcttgataccagactctttcgccttctcaaacgctttctcgatgccggaaatgtccagagtcggcgcagcagcttcctgcgcggccactttctcgcgatacttggcgaggttttcgatggcgcgcttcgcagcagcgatctgattttccgtcaaggagccgtatttatacaacgactcctgaaggctctgagcgaagctgaaggaatttccagtccaccactcgatgatatccgggtgcgcggcttcgaaagccttaattttgaggtcgcgttcttgcgcagcgctacagattttctcggcgcgcttttctgccgccttggcacggctcttggcgcgctgctccgggctggttttgtactctttgtatccgacaccgccgcaggcaaagcaggcgcgaccataagatgaagggccacggtacaggccggtgcctgcgcatttggtgcacttgtcgcgatacagcttcacttccttccgggagttcgggcgggcgcccatggacacatcttccagcgtcttcggagcttcgtcagtgatcgctacggtagcgaagtcatcgcccaggtcttcgaagccggtgaacagattctctgctgcgttcatgtcgattctcctgtttggaaagttcgtttcgatgagttgactatacgccagaaatggaaaaacggtagcgttttctcactaccgttcgtcgggtcgaagacaatcaataaatgtcgctattgatcttgaacccatgctcagcgccgtcgttgtagtcgtactcaacataactgtcgcagtagtcgttcaaatgctgaatgatgcctagaacgtcgttcgcggccttgtgccttttcgcggcgatggtcttggcgatgctgtcgccgacttccagggcttcggccgtccggcgatggatcagcaggcgactccaaagatagagccggacgcgacgaatgatgtcgcgatggcgctccagtcgtccgtgcaactcttcaatttcgtgctcgcgagattttaatactcgtcgaagctgttgaacttccaactccaaatcggccttagtagccatgttaacctcagaaaggaaaatcgtctgagactccaggaagctcgacgattattgttgagcctgatcggtctagaatgcatccgaccgagccagccctgtgtggatagggtctacacgaactataacaggtgacttccctgactattcgccaggtcgatcctccacaccatctgcaaattggcgggcgcttcgacttcagttttcgttcgtccaggacggcgcgtctgtcgcaggaaaggcagcgtgccttaaccgacgtaaccattggtatagtcgatcattcggatgagctcatcatcctctgattctctcgacttcagaccgcccaaagagtccgactggccgtcgcatttcgcatcgatatccatcgaagacaggaatcctgccgatactgcggtgatatcaactttgtcgccggccttcttgaagccttcgcactcagcatcgagggccacaattgcactcgcggccatgttcacatgactgatgaggtcggggaagatcacaggaacttcacgcgacatgccacggaccgtcagcttcaggactacatacttcatactcactatcccttttgtatgtgaggaaagaacttgctgttttccggatggtgaaaacgctcggtcgcaggcggtctttcttccggacattgaatcgtcgaaggcgggaaaaccgcgccggcgataatcgccgcgaggagtgcagcggatgtcgacatccagagggcggtttccaggctcacccgaacttccggacggcgcggcttcattcgctccaccctcttcctggctcataggatggcagaccgccgccgcgaatccaattgtcccacatacggttcagaccagtcggcggctggggcggcggactgtagaatccgggagtctcagtgctgctcaggaaataaggcgtgcaaacggcctggacgaccaattggtgccgctcccacatcttatcaatcgctcttagcatgacgtcttcgcactgagccttactgtcgaaccgtctgctagtatggtccggcatctggacgcagccgtctccagtgcaaaggaaagcagtagcaatccatacggtgatactcgccatttcgtcaccctctttagttgatgagcagagtctattccatctgctcgccaggagtaaagcgcttttcgtcgggataaatgccgatgatgtctgcgtcgagcatccaaatctccacggacggatcgtcgctgctgatttggtacaggttgtacagctcccgtccgccgacagcgcgctcgcctcgcggctcaaccgccagaaccttgccgtgcccttctccgtgctcgtccaggtatatgacgtgatcgccgacttcatagctttctttcgtgacgaggcgtgaacgcgagctgttctgcgattccactacccaggaatccagcacgccgcctttcatgtcgcgaaacaatcttgccgatttgtcgcaatcgaatacgcccagaacttcgccgtctttcaacacgatatgtacgattggcaaaagagtattcatgtttaatctccattggttgataattagagtctaatctgccgaaaagttcccgtaaagaattattttctcataactgattagttgcaactgttaatctgatgtatatgtttgaatctcttttgaacgtttgatgtttcccctataataagcgcacacagccaacaaccacgtggaactacaatgtttaaactttcctggatattcgggcgcaaaaaggataatgctgcctgttctgaatcggcgccggagaaagtcgcaaaaatccctcaacacgatccgctcgacccaatgatcaagctgggaaggattcgcggctggaacgtcgagccggagaaagccccggtaattcgtagcgtgaaagatttcctggagccgggcctatctgtagcaatggatagtgcgtatggtgatggaccaactccggccgcgaaggctgctgcgggcggccagaatccctatgtcgtcccgactatgttgcaggactggtacaattcccaagggttcatcggataccaagcttgcgcaatcatttcccaacactggttggtggacaaagcttgttccatgtctggggaagacgcagcacggaacggatgggaactcaaatcggacggcaggaagctatccgatgaacaaagcgcgctgatcgcccggcgcgacatggagtttcgcgtcaaagacaaccttgtcgaactcaacagattcaagaacgttttcggcgttcgtatcgcgctgttcgttgtggagtctgacgatccggactactacgaaaagccgttcaatccggatggaatcacgcccggctcctacaagggaatctcccagatcgatccatactgggcaatgccgcagctcactgctggctcgacggcagatccgtcttccgaacatttctatgagccggatttctggattatcagcggtaaaaaatatcaccgcagccacctagtggtggttcgtggaccgcagccgccagatatcctgaagcctacatacatcttcggcggtatcccgctcacccagagaatctatgagcgcgtgtatgcagcggaacggacggcgaacgaagccccgctgcttgccatgtcgaagcgaaccagcaccatccacgttgacgtggagaaggccatcgcgaacgaagaggccttcaacgctcgcctggcgttctggatcgccaaccgtgataaccacggcgtgaaagttctgggaattgacgaagacatggagcagttcgacacgaacctggccgacttcgacagcatcatcatgaaccaatatcagctggtcgcggccatcgccaagactccagccacgaagctcctcggcacttctccaaaaggattcaatgccactggtgagcacgaaacgatttcttatcacgaagaactggagtccattcaagagcacatattcgacccacttcttgaacgccactatttgcttctggcgaagtcggaagaaattgatgtgcagctggaaatcgtctggaatcctgtggactccacgtccagccagcaacaagccgaattgaacaataagaaagccgcgaccgatgaaatctacatcaactctggcgttgtgtctccggatgaagttcgcgagcgtctgcgtgacgatccgcgttccggctacaaccgactcaccgacgatcaggcggaaaccgaaccgggcatgtctccggaaaacctggccgaattcgagaaggccggtgcacagtcggccaaggcgaaaggcgaagccgagcgagccgaagcccaggcgggcgccgtagagggcgcaggcggcccggttcccgccgctccacgcgggactaagcctctcgcgaaagcgtccgaggaaggggccagcgaggccgctgaaccgccgtcgaggccggaccccaaggccgagctgcggaacttgttggtcgatcttttgtcgaagctccaagacctggacgacattaaggcgccggacggcgtagacatagagcacaatgatgcgcctggcttaaagcgcacatccaaacctggcgtgtctggtatggagccttcggtgttttcgtccaaccgcatcgtcgggcctcgtgatcattcggaactccagagaatcaaggtgaatggaataaccaccttgatcgaaaatccgcgcggaagcattcgacaaggcaaggatgggagttggcgagttcagatgaaacaccactacgggttcatcaagggaacgaaaggcgctgatggggatgaagtcgattgcttcgtcggtccgaatctgggatccaaacgggtcttcgtcgtcaaccaagtgaacaaggaaggtcagtttgacgagcacaagtgtatgctcggcttcaacaacatcaacgatgcgaagtctggatatctgtcctgcttccgtccgggctgggatggtctcggctccatccatgaagttgacctgcccgctttccgtcgctggctggcgaacggcgacaccaccaaaccgttcgggggcgagtgatggcattcaaggcctccaaaaagcgcgagcgccgggcacctcttccagtcggaagagggaagcccataattccatcggcaggaatcgaggcctggtatcgaaagcagatgaaggatatgtccaagctcatgatctccgactatcgaaacgagattgagaaggcgctgtcccagcctgcggccgaacgtttcttcgccagagacgaatccgttaacgtcctgttcaagatgacccttcgaagcctacagcagcgatggagccgcatttttgaaggtttcgcggccaagatcgccccggagttcgtcaaccggaccgaagaagccgctaccgccgcgacccttcacagcttgtcggtggccggcgtcgatcagccacgagctgcgtataatgagagcgtcaggaacaccctggaggccgcaaccacttacaatcatactctcatcaccaagatccaagaggaagtccacgagaagatttacacatcagtaatgctgtctctgacttccccgaatccggaagagcaaggaacttccggcataactaacgcacttcgcaaagtcgggaagttttctgaagatcgaatcgaactcatcgcaagagatcaaacaagcaagctttacagttctctgagcgatgagagaatggcggaaaatggagtcgaggagttcgagtggctacactcttctgccggcaagactcctcgccacacccacctggagaaagatgggaagaggttcaagctgaatgaccccagactttgggagggtccgaaagcagaccaggggccgccaggatgggcgattaactgtagatgcagaaagataccagtcatttgacatcgataggagcgctatatgccgttagttcatggcacttccaatgaggctcgttctgaaaacatcaagcgggaaatcgaagccggtaaagacccaaagcaggctgcggccatcgcttattccatccagcgcagtgagaaagggaagacggcgaaagattgttcgcctgagctcgtcgccgatcttcgcgccctggtggacgctctgtcgaggctcgtgaaatgaaccgcaagacgtgccggcgccgactcgtggtcgatgtaatcagggccaatattcacggcggattcttcagcctgaagtttgccgccatcgatttggcaatcatcggcgtcgccatcttgatggcttttggccgatgatgctgagaaaaatctggattctgactaaaaattctagtccggatagccgcaagttaccgtttacggaaaatagcagtaatttggaaatcctactgccgcgaggctttaacagagccagttcctaatttccgatttagccgcatgcttcaaaagtatatagcctgggaaattagaagtaacgttccaatagaattcatctataagtaacgttataatataacgtcaatctatatgctctagacgtattgaaattcaatttttaatcggtaaattggtaatttgaattagtttaggagttgaaagcctcgcggcagtaggcttagacaaatcccgtcaagtttccgagaccaaattaccggattttcgcggctgaggaaactggtaattagatcacaatacaaattataatgtaagttaacagtcacggctacatctaattattgttccgcttatttacccttagatgtactgcgtatataatacagccatagtccacgactcttcgaattaacgatggcaaagtcgaaaagaaaaattgacgaaaatggatatatgaccatagagggctgcccgatcagctcttatggcgttttccaatattctgctggtcaactcggtcttccgggcgatccgacgcggattgtcaacgtatatcgcccggagtctgccgtcagcgatccggagtacatcgaatctctgaagaatctcccgttgatcgacgagcatgagatgctgtcgggattcgacgatgatgacgatagcgtggcccccgaagacaaaggggtggagggcatcatcacctccaacgcttactacgaagccccatgggctcgcggcgatatccgcatctattcccgcaacatgcagaatcagctggaaaggggcaaagaagacctgtccctaggctatagttgccgctacactgagcaacccggaatctggaacgggacgccttatgaagtcgtccaggacaagatgcgcggcaaccacatcgccctggtaaaagagggtcgtgtgccgggggccagagtattggatggtctgtgttttgaccatctcagttttgatttcagaccatccgatgagggtaatgaaatgagtctcaagaaagccaagcggaagccccctgtccagcgcgtagggcaagctgctgactcggcggtcgaagagttgcgcgccctgtggccgaagctatctgcgtctgtccagaagttcctgggcgaagaagagcaggagccggagcatcaggaaggcgcagctccggccgaaccgaccgacagcgagcacctgaccgagcatccgactctggaaggtgctcagaaggatgacgaagagcaggaagaggagccttccgttgtcgatccggccgtggccgccgtcgagccggagcatcaagaaagcgccgcatccgaaatgtccggtgaaggcgaagtcgccgaactgatctctcaggtcaaagccattctggctcgactggagggcacggtagccgaaggggcggacgaagagcatggcgaaggtcaagatgtcgtcgagggcttggaagagcagagcagcctcagcggcgcgcaaaccgccagcgacgatggtggtgagggcaaggataacagcgaggaacttcctgaaatggcacagaagaacgcgcaagatgctgcaattcgcggtctctatcgcgacattgctgctaaagatcgcctctacaagcgtcttagctccgtggttggtgcgttcgatcaccgagctatggactcggctgaagtcgctgtttacggcgtgaagaagctgaatatcagctgcgcgaagggccaggaagcactggcgctcgacatgtacctgaaaggtgtcgaagccgcgcgcggcgcggccagccgtcaatcgaaagcccaggattcggccggttctgctccgcagtgcgccgagctggacagctacctgaagggggagtaactcatgttccagaaacaagtttaccgccagtacactcctggttttccgggcgatctgatcgaggacggcccgaagcgggcgcggccgggtcgaatcatgtctctgtctgccgtaaatccggctgccaccgccaccggccccaaccgcatcagtcgcgctttcggttacgccggtgacgtcagctccctcggcgaaggtcagccgaagactatcgcggctcgcgcttctgaagtcgtgatcggcggcgccaacttctttggtgtcctcggtcatccgaagcactatgcgctgttcggttcggccggagactccctggctcccagctatgatctgcccgatggcgccgaaggcgagttcttcgacatggccaccggcctggtcgtcgaaattttcaacggcgccgcaaccgccctggacctggactatggtgacctggtcgcctatgtaccaaacaacctgcctaccgccgacaacgcgcttggcctgccggccggcgccctggttggcttcaaggctggctccatgccgaccggcttggtccagattcccaacgcacgcatcgttaacgccatcagtctgccggcccagtcggcggggaatctggttgctggcgttaccatcgtccagctcacgcagtaaggaggcgtcatgagccagatcagcaagacccattcgcgcctcgcaggccgcaatgcgaaacctttcgacctgaaaaacatcaccaatgacgccgtggcgtctctgcgccgcatcggcctggtattcgatcacgccgtcgtccaggaccagatcaaggccttggcgaaggccggcgcgttccgctccggctcggccatggacagcaacttcaccgccccggtgaccacgccgtccatcccgactcccatccagttcctgcagacctggttgccgggcttcgtgaaggtcatgaccgctgcacggaagatcgacgaaatcatcggcatcgataccgttggctcctgggaagatcaagaaatcgtccagggcatcgtggagccggccggcactgcggtggaatacggcgaccacaccaacatcccgctgaccagctggaacgccaacttcgaacgtcgcaccatcgttcgtggcgagctgggtatgatggtgggcaccctggaagagggtcgtgcctcggccatccggctgaacagcgccgaaaccaaacgccaacaggcggccatcggtctggaaatcttccgcaacgccatcggcttttatggctggcagagcggcctgggcaaccgcacctatggtttcctgaacgatcccaacctgccggcattccagaccccgccgagccagggctggtccactgccgactgggcaggcatcatcggcgacatccgcgaggccgttcgccagctgcgtattcagagccaagatcagatcgatccgaaggcggaaaagatcactctggccctggccaccagcaaggtggactacctgtcggtaaccacgccttacggcatttcggtttcggactggatcgaacagacctatccgaaaatgaggatcgtgtcggctccggaattgtccggcgtccagatgaaaaaccaagagccggaagatgctctggtgctcttcgtcgaagacgtgaacgcggccgtcgatggcagcaccgatggcggcagcgtgttcagccagctggtacagagcaagttcatcaccctgggtgtcgaaaagcgggcgaagtcgtacgtggaagacttctccaacggcaccgccggtgcgctatgcaagcgtccgtgggctgtggtgcgctacctcggcatctaacagatgcctattcaccaaaggccgggcttccggcctttgttcactctgactctaactcggttgtaggggccggttagggcataattactaggactacgccaatgactgtttatatcgtttcctccatgactcaatcggtgtcttacaatgcgtatgacacctctgatccgtccaatcctcgcctccagcgaaagattctgattcgcggccgcgcaggcatcgcatccgaaacttccggcttcggcgacatgatttccgacgaggcaggacgtccgatctggaccccacagggcgattgcactgccgtgagcgattcggatttcgagctgcttcaggccaataagattttcatgcgtcacatggagaagggttatctgcgagtcgtgaagaccgacatcaccagtgaccaccagcggatttccaaagagactcgcaccatggagcgcgatggattccagcctctggatgctactcgcctgcagcagaaaatcaaggtgaccacagccagcgcttcccaggaacaagagttccggatttaaccgagggtttcggtatggtgattttcgacgaacataagtttcgcacgctgtttccggagtttgctgatccagccgcttatccggacgtgcgcctgcagatgtacttcgacattgcgtgcgaattcatttctgatcgcgattcgccataccggattctcaatggtaaagccctggaagcctgtctgtatcttctgaccgcccacctcctgtcgctgtccacgatgcaagttcagggcgcggctggaggtggcgtcactgccggtgggacccagggcggtttcatcaccagcgctactgtcggcgaggtcagcgtggccaagctcgcgcccccggccaagaatggttggcagtggtggctttccgggacgccttatggtcaagagttgtgggcgctcctcagcgtcaaagcggtgggcggattctacatcggcggtcttccagagcgccgaggcttccggaaggttggagggacgttctggtgatccctggtgcgaatcttctgcgaatggccttcggggtcatcggtactcaaattgtgaaatatcgcaagtttgagcagcgagtgaagaatgatcaagctcagtacgtttccatgttcgaggagcctttcgacctggcagcgtctgttcagcgagtccgacgcgatcagtatgtccagtttaatctggagttccaacggaattacgttatgatcttcgccaactttgagatggttgacttggatcgcgatgtggccggtgaccagttcctctggaccggaagagtctttcagctggagtctcaaggctcctggttttatcaagacggctggggagtttgcctggccgtggatatcggtgcggccaagctcactgatgacgggaaaccgactttctaggtgatgtatgtttgacggcgaactgatagcgaaaatggttgtcgagctgaatgcggcgatgacatctgctcaagaggctttgcagttcccggattttgaagtcgtccagaaagctcagccgacccaacagggaacgtcaaccaggccgaccatctttttccagaaactgtttgacattcctcgcggctggcctgccaccgattggcacctggacaacacggctcgcaaatatgtagaaataactcgacagcatgtagagacgactttccagattagttcccttcattggcagaatcctgaaataactcacgtggttacggcttctgatatcgccaactatgtgagggcttatttccaagctcgatccacgattgagcgcgtaaaggaactggacttcctcattcttcgcgtgtctcaaatttccaacgaagcatttgagaacgacaatcaccagttcgaattccacccaagttttgacatggttgtaacttacaaccaatatattcgcctgtacgaaaacgcagcatattcggccgatggggtattaataggcatatgagtctgaggcgcgattcagagctaatcgccgcgcacctccagatgttaagagccatgcgcggcaggtccgtttcagccggatggtattccacggctcgatatcctgacaaggcaggcggatcggtcggaatacaagtcgcgagaatcgcacgtctcaatgagtacggcggaactatcgaccatccgggcgggaccaggtatattagggacgccattgttcggggtcggtttgttggcgttcggttcgtcagaaacgactttccgggagaaaccgaggtaactaagcctcacagaattaccatcccggctagaccgtttatgcgatatgcttggaacttgttttccgcagatcgcgccgcaatccagaaccggatagccatgaggctggccagaggacagatcactccagatcaagctcttgcccagatcggcctggcgttggaaggatacatagccagaagcatcaggaccgggccatgggtggctaactcagcatctacggtcaggagaaagggattcaacagaccgctggtcgatacggcgcacatgcttcaatcgattagcagcagagtaacataaccaggagatcatccagtgatcagtcagagccgttatatccggatcatttcgggcgtaggcgcaggcgctccggtcgcaggccgaaagctgattctgcgcgtcatgactaccaacaacgtcatcccgcccggaatcgtcatcgagttcgacaacgccaacgcagtcatgtcatacttcggcgcgcagtcggaagagtatcagcgggctgcggcttatttcaaattcatcagtaaaagcgtgaattcgccgtccagcatcagcttcgctcgctgggtaaacaccgccatcgcgccgatggttgttggtgacaatttgccgaagaccatcgccgatttcgccggcttctcagcaggggttctgaccatcatggtcggcgcggccgaacagaacatcaccgccatcgatacgtccgcagcgacttctatggacaacgtggcgtcgatcatccagaccgaaatccgcaagaacgccgacccgcagctggcccaggctaccgttacctggaatcagaacaccaaccagttcaccttggtcggcgccaccatcggcaccggcgtcctggctgtggcgaaatctgccgatccccaggacatgtccactgccctcggctggtccacctccaacgtcgtcaacgtcgccggccaggctgccgatcttcccgacgcggccgttgccaagagcaccaatgtcagcaacaacttcggttcgttcctgttcgccggtgcgccgctcgacaatgaccagatcaaggccgtgtcggcctggaacgcggctcagaacaaccagttcatctacacggtcgctacttccctggcgaacctcggcactcttttcaccttggtgaatggcaacgccgggaccgccctgaacgtgctgtcggcgactgctgccaacgacttcgtggagcagtgccccagcgagattctggccgccaccaactacgatgagccgggcgcttcgcaaaactacatgtactaccaattccctggccgcaacatcaccgtttccgacgataccgttgcgaacaccgtcgacaagagccggggcaactacatcggcgtcacccaggccaatggccagcaactcgcgttctaccagcgcggcattctgtgcggcggtccgaccgatgcggtggatatgaacgtctatgccaacgaaatctggctgaagtcggctatcgctcaagcgctcctggacctgttcctgaacgtcaatgcggttccggcgagcagcactggcgaggcgatgaccctggcggtgctgcagccggttctggacaaggcgactgccaacggcacgttcacctacggcaaggaaatcagcgccgtccagcagcagtacatcacccaagtcaccggtgatcgccgcgcctggcgtcaagtccaaaccctgggttactggatcaacatcaccttctccagctataccaacagcaacactggcttgaccgagtggaaggccaactacacgctgatctattcgaagggcgatgccatccgcttcgtcgaaggatcggacgtgatgatctaatggtttgcggcggactcgatccgccgctaccttccataaatggagtgaggaataagcaatgatcaacatttctgcgttcggctcgatctgccagttcacggcaagcagaactttcccgaacggattcaccgtcaccgagttcgccgacgatgccgatcccatcgacagcccgccgttcaccgctgccgataccggcgtcggtctcaacggtgacatggtagtttggaaccgggcgaacatcctggaagtagtcgtcaacgtcattccgaataccgagggcgagcgcaacctggcagtcctgctggatgccaaccgcaccggaaaggacaagtcgggcgctcgtgatgtcgtcggtttggtcgtggcgatgccggacggcagcaaaatcacctgcaccaacggcaccccaatcgacggcgttctgatcaacgcggtggcaagcgtcggccgtctgaagaccaagccgtatcggttccgatttgaaaaagtgatcaaagccggtactagctgatgaagaaaattccgctgacagcagtccccaatcaagcgatctcatttaatgccggtagcagctattggaagattcgcctgtaccagaacatggacatgatgaatgccgatatcagccgcgacggcgtgatcgtttgccatggggtccgctgcttcggcgggattcctcttctccaatacagccatcagtaccgacctgactatggcaatttcgtcttcgaccgcgacgccgattggacattgttcggcgacggcatcaacctgttctatctggacggcgccgaattcgccgagtatcaggcgcttgccacgaggaaagaatgagcacatcaacgatcagaaccgggacgaacaacgatatccttttggacgacaatggaaacatggttatcctcagggatgtcgaagcgtgcgcccaggacgttcgggcggcgatgctcatgcgcaccggcgaaaacattttcgatgtgaactccggtgtgggatatttcgaatacatcttctcgccgcagaaaagctatgatgacgctcgcaaatccatcgcggatgcaattttatcctcaccggatgtgaccggcatcgagcagcttgacatcgacataaccggggaagtcttcggcgtcgatgcgaaagtcatcaccatccacgggcctgttaccgcaggagtttgaaatgagtaccatccgcatccaatacgccaacggcacccaactgttcctggacggcaaaaatccgccgcccctggacccgctgccctcgtttaacccgtctgtcgaagatctggaaggcctggaccgcgaaaagaacaccgacaagggcgactcctcgccggccggtcttcccgttcccccggtaaacgtcgattccaatgtcgacaacggcggaaccatcccggctccggtatcgaccgacgctgctgcgaccgaatcggccccggaaggcgcccaggaagctcctgcagcaggccaaggcgacgagaaaggcgccgaggaagccccgactacagccccggtagaaaaggccgaggaaacggcctcgccggccgctgaagaggaaaccccggctcccgccaaggccacctctcgcaaaaccaccagcaagtaaggactcgacatgatcaacgtcagcggcttcggcacaggaattgtaatagtttccgcctcatcgttcccgatggggttttccttgtcgaagttcgctgatgatgagagtccgatatcctccaaagagctggagccgttcggatatgagatgctttatgacggtggcctattcgcctttgacaaggctgctcctctggaagtatctgtatccgtcatcgcagggagcgaggatgatattaaccttcgcatccttctcaattccaaaaagggatcattcagatttcttccgggaatcatcccggacatgacgactctcgtggccactcttcctgatggcggccgcaccgttctgtccaatgggactatcatcaagggtccggccatcgacaccatacagaacaccggacgacgcaaaggcaacacgtacacttttgttttcggtagctatcttggcgcccagactgcgcgtcaagccatttctaacgttatccaatcggtactggaggtggtctgatgttagggattttcaccagcctcctaagttcgcgatctttttcgattgtggaccaaaacacaaaccagctagttgctgcggatttgaggataagccgggtcaacacccggttttcttctgtagggcaacgccacatgctggaagatggtacgaccaagatggattccagaacgatccaccctatggaaatcatcgtcgaagtattttgcccttcaattgatgtcgtcgatcagatcaatcaattgctcctggatcgcgacacactgtacaaagtcatcactcgcggcatggtattcgaacggatgatgtgtaccagcgaagcgctcaatcagactccggatatgatatcggcgactcctgcgcggctgacattctcccaagttctcgtccagaatcccaagcctataatgttcagaaatgcaggggactcttctatgatcgaccgagggctggccctagctgaagacgtggttggctcggccggcgatctgttcgactacgcagtgaacggcgtccagaacgccgcagacttgttctgaggtgccaattgaactctttcctcaagtctattctcaacacgcctactctcaccatacgcgatgatgtcaccaaacttcctgtctggaagagtcttcaagtcaagaaagtggaaatttactcgccggcttccgtagtgtcgaaacctctggcgacgaaagaccagacggaagctcaagtgtacaccgaagctctggacattgatgtgaagaatggaaagatcatccaaccggtgcgactccgcatcaatgctatctgtccggacctgtccaccgttgaaagtatcatgaacgccttcaatgataacacctcgactttcgctatcacttctaagtcgatattggccgataaaatggccatcatggcgctcgatgtagatcagtctccagacatgttgaacgcggctgagatcaatatggaattcgagcaggttgagcctccagtattgaataaattcgattctgcgttccctcaagatagtccgacttatggggtacagattcaatctctttctgatgctaatttgctggatttgggcgccatcggcgattcgatatcttcggccgcaaaatcgctatataatcgcgtgaccagctacttctgaggatgtatcatgcttgaaatcaatcttcccgatggccgtcaaactcgcgtacaaatcgaggcgtggtcggcattggatggctgggaactccagcgccgtttcgtcgaattcgctgtcagccaagattccgacttccgccgctctttcaccatggaaatcctgggctatgcgaaagtgctgcttggcgacgatgacaccggcattccgctgaccaccgcggcagtcatcaacaaccacctcggccactggaagaacgtggaactggttttcaactctgttctcaagcacaatggcatcgacccggccacgcacgccgaccggccggactattgggaacaagtcggatcgcagatggccatcgcatttctggccgaggcgtccaagctcattggtccagcaatgaagatcgccgaaggactcgccaacaagccggagtgattcatgtctagtgatttggatgaattcatacttcggtatgaggccgatactgccagagccgagcgcaatctggagcgcctccagaaccagatcaggcgcgtgaacagcgcatcgacgagtggccttcaggatttgcgccacttcgcagacggcgcggccactgaactcggccgagtcgttccgcagatcgattctgtgacgagcgcgattcgcgggatgaacgcgcaactggcgataggcgccactggcgtggccctggtcgcggccggcgtcaaggcgttcatgaacaccagggaccagtacaatcagcagcgcatccaggcgatggacatcggcatcgccccggcacgcttggaagagtaccagagaaaattcgttcgccagtccggtggaaccatcagccgcgagcagggcgcggagatgaccaaaaatctggcagacactttccggcgagcctatcgcgatatcgggcgagtcggcccagaggcgcggattttgcgaatggccggcgtcgatgtcgggagcttccagaagggcatgcggccgctcaacgacatcattactgatctggccacgaaaatggccaagctgaagccggacgaaatttctgcctacgctgatgcccttggcgtctcgcgagactacctgagcaccctggctaagatcggcccggccatgggaaaagtcaccgagatgacgactgcggaactccagtccagggtccagggcgagtccaacattcagaaattcaacgatgctctggcgaatctcaaccagacgttcaccaccctggaaaaccgagtcggcgaaaagctcgcgcctgcgttcaccaagctgatcgaaatcatcgacaagatagtccaggctattcccaatgaagtggaaagcttcgcgaaggacaccaaatcccgttgggaagatggagtgctcgggaaggcgaccgttggcagtgatatcttatccctcctcagccccggcgccctgctcggtcgcctggcagcgtgggggactcgtcgcggcatggaagaatcagggctcatcgacaaggacaaggttcccggcgctcaaaccagcgaagacctggccaagaaacaagaagaccaggacaaggctactaagtccatgaaagagctagagaagctggctgaccagaccacgaagtctaccaatgattttgcggtggcgatcaacatgttcagtggcgcggtatcgtcgttcgcgaatgccgttgacgagcgccaagcttgggcagcctgggcgggggaaattggtcgggcggtcggtatgggaagcaccgcgccgacttcgcgggcaaccggcgtctatccgcacgcgatctatgatcagtcgaagagtggcgcggccggacaagtcttcggcgagccaatcggcgcccagtctcttcgcaatcgcatgttctcgccgcagcgcaaggccgaaccggtcaccgttccatcgtacatcaacgacatcatcaaagatgcgtcgaagatgtacaacattcctgagctggacatcaagaaactcatatacaccgaaagccgattcaacgccagggctaccagcgaagccggagcgaaaggcctcatgcagctgatgccggaaatcgccaaggcgtatggtataactgacgtatatgaccctcgccagaacatcctcggcggaacgcgtctattgcgggaaaacctggatcgagccaatggcgacatgcggctggccttgacctactatcacggcggcctcgatccgaagaactggggaccaaggactcgcgcatatccgggtttggtgatgagcgctccaatcgagctgatggaagaggcgcagcgcaagcagaaggctgcggccatgaccgccgccaacgagacgttcgctccggaaggcggcgacatggacattcgcccctatgatggcggacgattggaaactccagaccagggcaagaaggaagatgagcgccgcgaagcccgtcgatatgacgacagggttgtgcgaccggaaattcgcatcatcgaccgcatgccagaccgcagcgacggcgaaatcctcaagatgtctagacgtcaagaggccgaccgggcagattctggattccggaagttcccgaatcaagttcgcggcgagaccaagcagaacatccaggctcaactcactgcaggagccatcgcgcaagtgatcggcgttaaccccaaccagatcatgcgccgcgaaatcagccgttctgacttgctgttcggatacaaccaagccatcctgggcaagcaacaggagatcaaggccgccgcgaccgaagccaacaacgtattcctgtctccagccaagcttgccgaagccacggccaaggtgaacgccgcatcgcgagaaatggatattctcaggacatacggcgagcaacttctgaagagcgctccagagcgcggccaggagctgaccatcggtcgaatcgacatgttggtcaacgtcaccggcgcgaattctccggaagaggctcgcgagatattcagtaagcagactgcagaccagctgactacggcaatccaggacgctcaaaacgattccgcaactaagatactctactgatgaaaaagagaattctgcgagtaacattcaacatgccttatggacccgaagtcatccgcgaagatctggatgttcgggtccggattatgaaggctgcgttgcggattcagaaccgggcgacgatggaaattttcggcctcaccactcagctgcgcgagtctcttctgtcgcagttcaccgcgtggaagcaccggcaacgtcaagtgggcagggaagatgaattgatgatcaaggtgtcggtggaagccggctactctgaccaggggcgcgagcaagtttccagagtctttgtcggcgaagttgccattgtcgatatcatttctccgccaccggacattggaatccgcatccagtgctataccaggcaaatcgacaggacgaagaccattcggaatatgccgcccgccaacacgacgtttgtcaagttcgtcgagtggggcgcgaacgaaatgggattgaacttcatctgcgataccagttacaacgatcaagttctgaagaatccgggccggtctatcactgtcgcgtcggcaatcctggcgtcgattcaggatatgtacatgccggacgtggccgcgttcgtcgatgatgacatattgatcgtgaaggaccgcgataaagtcattcgtccggatgaggtgaccaacgtcaactcgtttgttggaattccatcttggtctgaatggggcgtggaattccagtgtctgtttgagccatcgattcgtgtggctggaggcgtagcggtcgaatctctcatgaatccaagtgttaatggtaactatgtaataactgctctggaatacgatttggccagtcgggatcggccgttctatatcaaagtcatggggagtccagcagcataatggccagggaaatcaaatcattcaacatgttcggagttcactatacttcgcggcaattctctgccgtcgatgggctcagcatgatgtcggaaattcagagcgtgccgccagaagaattgctcaagggtactgatgtattggcgcatccggaagaccatccggaaggcatctggcttccattgactgctgcgaacatcaatctttatgtcgttgatcgagcgaaagtaatagctcccgtacaagttcttgcacttctgtccgaagtggtaatcgactggaattttggttttctcaaagactggaccggagtcaagattccatccagatttgtcgaagatatcaaaagcgtgaagacggcacattcaccttctgtagttgcgagtttggtggcgaacggttcggcctctatgcgcgagttggaagagtattattcgactcaagatgcctttaagatgatagatatcatgacggcgaagagcgtgaacgaggccttggcgtccgaagcatcgcacaacagaatcaaaaagggataattcctaaccgggcctgggaaggctatactagacctgccaaatcagaggctttcccatgtccaatatttctctaacatccgcaaaagctcccgacaggacgcgactgatcgccgctcttgacgctcggtcgcggcgggatgctctagatttcgaagtaatgataccggctcaggttgttcaatatgaccgggccgagaatatcgcgacgattcaacctctcatcacctgggttgacacggaacacaacgccgtccaaaggcatcagctggttgatattcctgtaatttccatgggggctggcggcttccacataagtttcccgattcagcaaggtgacataggctggatttatgcggccgaccgcgacacatctcagttcctggagtcgttgtcaatgtcgaagccgaacaccggccgcatccataagttcgagcatggcctgttcatcccggacgtattccgtcgatacaccatcaattccgaagattcggccgctatggtcatacaatcgacttccggagcgaccagaatttcgattcgcggcgacaacatcaagatcactgcgccgtcgaatgtcaccgtggatactccgcaggcgaatttcactggtgatgtgactatcgctaacactctggttgtaaacggtatcaacgtgaacaaccacggccacctcgaaaacaacccgcctgatgcccggacgaagggcggcatgattgcttaaggagaatttcatggcaagttttgatttttctgatttaacagcgggggggggttgtaatggctaactacaactacatcgtcgatactggtgtgatagtcgcagataccgccgacgttctgagcgacgttgaggccgagttccgcgccgccctcggtgccaatatcaacttggccgcgagcactccgcagggatcgcttgtcgcggccgaggccatcgcccgttccagtgtcatgcggaatgaagcgcgaattgccaataccataaacccgaacgtttcattcggaacgttcctggacgcgatctgtgccttgatggggatcgagcgcggttctgacctgtcaaccttcggctatggagttcaagtcaccggccgcagccaaacccgcatttccaccgggtctagggtccagactccggccggcgcgatcttcacagtgatgagtgatgtcacgattcctgctggtggtgtcgcgaccatcgatatcaaatcgcaggagtatggcaacattcctctgccggtcgggaatctcatcatcatcgacggaacaattggctggtccggagcgaaggtcatcgcctccactcgcgtcgatccgggcagccgccaaatgagcgatgcagagttgaagaatgcccgcgttaatcgattggccatccaaggccgcaactcgactatggccatcaaggcgtatgtgagcgccgttccaaacgtcacgtcggtgaacgtaatcgagaacaacaccggcgccgttcaagtggtgaatggagtctcgtttacccttccgtatgctgtttgggtctgcgtcgccggaaacccggataaacaagcagtcgccgatgcgttgtgggccgcccataacggcggaactccatgggactatggtgcgacgaacaacggcgtcccggtggacggtccgaatggcgttcctgtgcgcgatccggcgtccggtcgaaagtatgtcgtgaagtggaccactccaattatgtacgatggatatgttaacgtaacagtccagcaaggttcctcctctgtagctccggaagccattcagaacgcagtggtcaattacgcccaggggaaagtggaaggggaagaggggctggtggtgggcgcgagcctgtcggcattcgaagttgccggcgccatcgctcgcgaaattcccggcatctacatcaaactctgccaggtcgcgtgcgtcgcggctggctcgccggctccggctccgggcgatttcacttcggaatacgtcatgagcgcattcggccaggctaccatttccgttggtaacgttcgggtgactttcgtatgactctgcctgcgtacaattcggacatccaacaagctctgaaatggctccataaccaggcgcctggaatcaccggcctgatccagagaaaggcgcaatggtatgacagattcagccgccaattctgggccaactgggagcgcgacgttttccacttgaaaactgccaacccgttcggccttatggtttggtgcatcatcctcggcacgccttcgaaagggttcggcctttatccaaagaacagttcttgggcattcggtcggctacgccagaacttcatttatagcggtacacaagtcccgccaccggcagacgcatcgcctggaggcaacttctacggtggcggcaatgccgaaattctcaacttggacgaaatcaggaaagtgcttcagctaagatatgtagcgctgatttcgaacggctcgattgcatatatcaatcgcatgcttcgttacatattcaatgatgatgagccatgggacgaggcgaccggtctgtacttctatctcatggactcaaccggcgagaatggccctgtggagaacttggcagtatatcggaaagattgggaaggtatggtgttgttgtccagttcgcccagaacgaaccacgtgctgacatcgacccctgccagcgacgccgattggccaggagtcgatccggccgcgagcggtcttccggtaacggtcgaaacggcgtccgctacggccccggacggctccgctacggtgtgcaagcttactaagccggccgggagtaccgcttacgtctccgcgccgatagatgggccgctggggtccggtagcactgtaacgttctcgttcttcgcgaaagccggctccacccgtttcattgcaattcagtcggctgccgatttccccagtcgagccgatgccgttttcgacctggattccgggaacgtgatcagcgatcagatgttggacagcagcgtggtaagcgcccgaatgattcgtctggagaatggctggtggcgttgcgttctcacgaccaagaccgtcagctcttcgttccgcgcggcttacatcgctccggcagaaaccaacttcagctggattgattcgaattccagcgcggcgattgatgtgcttatctggggcactcagatcgaactgggtgatactccaaccggatacttggagactaccggaacgcccgtaaccatcaccgattacgttctgcagagcgcccagaccggaacggtcaagttcacacagcctcttccgaccggagtagaagcgtattggactggagactggaaaggtgggtctgcgaccgagccggccagattcgcagtaggggatgggactcaagatacattcaatctgtccagccctgcatacatcggcctacccactagtggggcgttcaagctagaatacagagttggtccggcgcttaatttgtcgccgcaattgatcaacctcatgaatgaccgggcggtcggcatcatgccgacttgcgccggttgcgatgtaaaagtcattcaggagtaatgacgtgatcacacccgaactgatacccagtccgtttgccgctcagggcgataaagacccgattccacaaacctcctccactggcttcgcaaaccttcgcgacggctatacgccggactacgaaatcagcctggcgtcgaacaacccgcaggccaaagcggtcgagcggaaaattcaaaaccaactcttcttcatcgcgacccagaacgcacaggcgtggcagcgacaaatggcgccgccgtggtttcagggcatgcctggcggctacgaacagaatgcagaagtcgtgcgcgtcggaaatgacggcataatgcggcgttatcgttccatggtgaatgccaatgcgagcgaccctctcagcagcacgacttgggaagaacaacccgcatggtcggcgatgcgctccaacatcccgatgccggccggaggcccaggcctatcttctggcggagaagtcatcacgaccggccgcaacttcaacgacctgttaaatgggacgtgggagttcttctctgattcagtggttatcgcttctcagaatgcccccgtatatccggcttccgctggtgccgctgctggcatgttggaggcgaaatcttgggtgtccggagccaatacgttctgcgtccaacgctacactgatcgcgtcgggaacgtcgctgtgcgcgggcttaatgccggagcgtggaccaactggatgtatgcggtaaacgtcatggcccttcaacaaggtcgggtcacctatggagtcgcggccggatcggcgaacgcttacacgttgacgctagttccgcagctccaaggcggcctggtggatggcatgattcttcgggtcaagttcaacaccatgaacaccggcgcctccaccatcaacgtctccggactcggcgccaaagccatcgtcggcgcggccaacttccctctcaccggcggcgaacttggccaaggactcatcgctgagcttgtcttcgacgcagcaggcgaccgctggagaatcctcgcaggcgcgccacgcatccaagttggcaacgccgatcaagattaccaggcccccagctggaaacaggtgaaggattacgtcgcgtcccaaaagctgactgaagtggactgggctgacgtcgtcaacaagccgaacgtcgctatccaagacactacgccgtggttcgccaatctggagttgtctgacgctcggcctttcatcgatttccacttcaacaacaaccgcgccaaagacttcgactatcgctttatctctgaagctgatgggtcgatggcgttctactctcgccaggggtcagctggtcctacccaggatatcctgttcagcaggtcgaatgttacattcctccagccgcgactggatgttgcgaaaaacctcgcgtacatcgcgaactctggtcccctttggcagaacacaactgccgatcagcctggttggaaattcaccttcgcacaaggtgtggacgccaacaacaacgcggttatcgcagtcaataccaccaatccggacggctcctatcgctcacagatcatgcgatgggactgggcgtccacgaacgtcatattcaacaatcgtccgctctttgccggtcaatacactccttgggattctggaaactttaatccgaacaccaagttgactgtgaatgtcacgaaccaaatcgccggcccgaccgggattcggaatacaaacggcaacaccggcaacatgaacacatggggctccagttccacgacggcttcatacggaaacgctgctcttcaaatcttcgggaaaggtggtggcgagcctgccgcgctttatttcgacaactcccagacaggatggtatctggggatggacaaggatggacagctcaagcgggccggctggtcgctcggcaataacgcctacgtgattaccgacgaatccaacattcgtttccacgtgaattccatggctggcactcctgtttggggcggaaacgaattctgggggccgtggaactttaatccgaacaccaagctgaccatcaaagccggcacccaggaaactagcagcactgcgatattcagcggaactatgccattcgctccaatcgcatcgctgtccgattattctcaggcccctttgacggtttacaacgcgccaaccggtccgtctgcaaaaccggccgtcatcgcgttcattcgtcctggcaactggggcgcgttcttcggcatcgataccgacaacaagctgaaatggggcggcggatcgctcggcaacagttccagggaaatcgccgattccagcaacatcatgaatctttgggcggccaacccgaccgcgccgtcctggaacggccaaaccgtttggcgatccggaaactttgatccggcgacgaaagtggatttgaacgccgcgaacgccaccaacggcaacatgatcttcaaccgcatcgccggaactggtagcggcatagcttcgtccggccgagttggcgccatcaacctgcagaacggggcgcattcggggcaagcggccgcagtcactttcgagcgtggtggaagtatcttcgtcaacttcggcctggataccgacaacgttctcaaagtaggtggcggaaacctgggggcaaatgcctatccggtcatccacgccgggaactacaataactacatcaaccaggcgctggttcaggtcggtctgggcggggtcggttcctatggcattttcgctgttctggataatgcctctccggttgcaactgttcaacccggagtggtcgtggacggttccattctcatctactcgtcttgcgccgcaaactacaatagcggtcgaaggcctgccggaacttggcgctgcatgggatatgtagtcaaccgggatgccaacactcctgactccgcgacccttttccagcgagtgacgtaaaatgaaatggacgcggatcagaaaccctcgttggctggatgaaacaaacatccacgccatggtgactttcgatgggatcggggaagttcctttcaccgccaatccgcacgacgtggaggcccacggaagggccatccacgctgcaatcctatccggggcgcacggacctatcgccccggtcgatgcgaagcgggagcaggccttgcaggacgctatacgggccagggaaaagcgggctatccttcgtgatacccgctggcccatagatcgtcacgacgagcagaggcggctgggtatcgaaaccacggacggacctgggttgatagcagcccttgttcactggaggcagcagattcgcgattggaatagcggggatcggccgcgacttcccatggctttgaaaacaatgttcaaaaatcaggagtactgatgaaaatcacgaaggatgttctgatcaccggaaccggttgcaccacggatcgggcgatcaagtggctggatgatgtacaggcggccatggacaagttccacatcgagtcaccgcgagccatcgcggcctacctcgccaacatcggcgtcgagtccggcggactggtaagtctggtggagaatctcaactacagcgcccaaggattggccaacacctggccgcgccggtacgcagtagacccgcgagtccgcccgtatgtccctaatgctctggcgaaccgacttgcccgtaacccggttgccatcgccaacaacgtgtacgcggatcgtatgggtaatggctgtgagcaggatggcgacggttggaagtatcgcgggcgcggcctgatccagctgaccggaaagtcgaactattcactgttcgccgaagactccggtatggacgttctggagaagccggagctgctggaaactccggccggcgcgtcgatgtcttcggcctggttcttctggcgcaatcgctgcatccccatggcggaatccaacaacttctccatggtcgtgaaaaccatcaacggcgccgcgccgaacgatgcgaaccatggccagctccggatcaaccgttatgtgaagaccatcgccgcgatcaatcaaggctcctgatattcgcccaaaagaaaaggccgcttattcagcggcctttttgctttccggctttgcctcttcaaccatcttgacttcaaccggcgcggcggactcttcctgagtgaccgaatccacatagttccctagtgaactcagaacgccgattaacagcgctcttaccaccttgtccttgactgtctcgcctatgatcttggtcagaacggatattaactcttcccggagtctggggctgattcttggccgaaagcgcttgcgatgctctttgcgtttcatgtttagtcctctgtctgcggtcttctcctcaccccgataatggcttggggatgcgctgtgttaatcggaaggttcgggcgctattataactcgtcgaaaatgctcgcgcttaactgtttaacgatacgcaccgcgatattaaatcgccttctttctggccaaggaactctggcggccgggtccggtctaaggcctaatttgtcgacattaaaacgagaaaacccggatcgcctgtagggcaaggcgtccgggtttatttctatctagtgtacgctaggatcagtgacttccgccccacccgtccagccagcaatcgaagacggcgtgcctcggcttgtccttggcgccatgggagaagtgcttgaaccggatgacctggcccttgagatactccctgtcattccagcggcgctgtttctcgtcgtgggtcaggctggaggccgacacgttgaaggtgactccaggccacagacgttcgttgcggcagacgaacgcaccgaccattccggacggcgacaggttttctgcgtggctggagcgggccgtgtggccaagttcattgatgaaagcttcattgttgttgtgcatcaactcttccacgtcgatgatctcagcttcatcgtagtcgtatcgcttgactttcacacagtgcccttccttggcagtcgagcgaccgaacttgtacagtccatcagcgcgcttgcccatggaaccttcgaatcccagcattgtgtggcggcgctcgacttcgctgaactgttcgatggaagtcaccagttcctgctcgaccaggtgaatcctctcatagccgaggcagtgacgaaggaagttcacgcgctcggccgccctggctaggcgatcttcggtcggtgcgcgaggatcggtgaaatcatcgaacacatggaaagaccagtccggctcaccgctgtggcggcgaagatcgccggacgacttctggaaaactttcgggtcgctgatgtcgccgcagaccagctcgccgtccaggccgttgaacagtttatcgctgaggtattcgtagatcgattgattgttctgccgcttgagttgacgagtcagcgcctcgccttcgaatacgaagcagcgaaatccatcgatcttcggcgagaaatacatcggcagttggccttccagcagcttcgggtcaaaattcgatgcgagcatgggtttcatacagttctccagaaaagaagcccggcgaaccgggctaaatggcggtaagccggctcagatggtttcgttggcatagttcagttcggccatgatcgacgcatagcgctcgtccgactccttaatgaaaacgccgtcgtacatgacgcctttgcgatccttgatggtgtcgtaggctgcagcgtagcagtcgagcatggtggtgtcgtgctcttccgtcacgtcgaacagagtcatggcggccgataccaggctcttgatggccaacccatgatttccacgtgccagagcgcctgccagatcgccgaggcgctgcaaatcgtcgccgtaggtgggatgtacttcgccgctctcgatgaaggccgacagatgatcgaacagattttcgccgagttgcgcggccatgatcgtggcaaccaccattacgtcgccgatgccatctttcacatcgaccgggttgttctgaacccaggcttcgcatacttctgcgaactcttcgaccaacttcaggaattgatctttcgcagacgagcctttgatcaggttacggtcggaagcccatttaaccaccaggtcgtgaagttcgcggctcatgatttgttcgatgttcattctttcgattccttctgtatttgggatttgactgcattgatgatggacgccgtgctctggcgcgatccatccttggtggtaccgaagtagaaggccattaccgacttcagctcggcgaaccaatagccgatgatggtgccgatggcgaccgaggatgtcgggtccatcagagcctcgcggccgaatgtgaagattgcgatgatgatgagaatggagcctgtcagaagagcgaatgtaatcgccgggcgaacgaaatcgttctgctgcgcagcaagcctcctcgccgaatccctgtctgccgcctctgcggcgaactggctaagctcggcctggagctggttctgctcagactgaaggcgattttgttcggcttgaatcgcaagctcctggagacgaacgcgctcggcgctctggagttcggcgagacgcgctagagcttccggattcgcgtctagagcgctagcgaccgaggctgggtcggccttcgaccccagcgccgtcgcgacgatagcgccaacggcggcgcctgcaggcccacccaggagcgaccccagagccggggcagccgcgccgatcttactacctatgtctttccagtccatttcgactcctcaaaagaaaggcgccattacagcgcctttctccggccggtgatttagaactcttcggcttcggtcgcatcgccgacgccaccggcgtcactgcgaggctgttcctgcttgctgtagtccaccttcacctcgccgcctacgaacgacttgtacaggtcggccgcagccttgaagtgatccgggttcttcaccaggccttccagctcgaactggacgccggaccagctgcccttgtcgttcgacatgcctacggtggtcatacggaccaggttggcgaaagtcggcggggtgcgcaggccctgcggggtctgaacctttttctgggacagcgcggtcatgagcttcttcgaggccttgatctgcgaagacgacagggagatcagagcctggccgaaatcgccggtgtccggatcgatgacgatgacgtaatgaccacgggtgtcggcgaagtagtcagacttcttgtcgctgaccgaaccgtcttcgttcggcgcgtacaggcgtccttcgacttccttcaccttggccgggtctttcatcatttccttgaagtcttcgacgctgatggcacccttgaaaccgccctcggcctcgcgaccggcccagcggatgaactcgcggcggtacgcggccggaatgatcagcaggccggtcttgccgtcgtaaaccttgccggtgacggtgttcaggaacatgccggccttcgcgccttcgatgtacttcgggtcatcttcatcgacctggggagacatcttctgcaaaacctggatgaaggggatggcataggactcggcatcggcgccttcgaagcctgcgccgtcatacgatcccaaatccatgaagtcgggaacttctgtagtcgcgacggcgccgccaccggtggcaattgctacggccttggtttcttcggttgcttcggaagtttcggttttcttaccagccatgttaggctccttgtttgtcgaatttcagttatcgctaactgtgggtttataataacggaagttgcaactaagtaaagcaaattacatatcaagatttgctctttttcaccttcggtttcgtgatcttggcctctttgtattcgtgtacgccgatgaaatctggcagctcttcgcccttctccaggtactcgcgaccgaacgcctggagggtctggtaatggacatcgcggttgatggtggcgtcatagccggcttcgatgatggcctcggccgccttcttcgcatcttccatttcgccgcgaccgaattcggccagaaccttggtcttgatgatgccgtcgttgtcggtgtcttccagccacttccagaacttcgatttgttctcttccttgacggaaatgatggccttcggctctacttttacagtgcgaccgtccgccagagtagtggtcttctgaccaagctcctccaacagctccggaatggtgttacgcttgagggtcttcagctcctcttccttttcggccagcgccttttgaagatcgaggatttcgccgtccagctgcgaagccttgtccaccaagttcagcagtcgatggccgatgtcggtggcttccaccgccatttcatccatgacgccaaaatagtcgatttcgcccggcgcgttctctttcaagtattccgggatttcaagctcttgctctttcatgtccgcctccaacttagtgatgttcccttacttgaaccaagtattgagtagatattatgccgcatcttccttgatacggctactgatttacatattaaatttcgtcgcgagtgctaacgtcagcctcaaacacgccatcaacgacataacttgccaggttgcgtttccactccaagctgacctggattttctcgtcgatggaatccagacagatcaggtcgaagtacagaaccgagttgacggtgccgattcgatgatttcggtcttcggactgcatccgcagctcgttgtcttcgtcggtcgtgtagtagatggccacgtctgcggctgtgagcgtgatcccgatccctgctgcggccgggttgcccaggaacacctggacgcgcttggcctggaaatcgtcgatcaatttttcccgctcggcctctttggtctcgccgtagtaggtgccaaacgaaatcccttgggcctccaaatacgccttgatctggtcgatttcctgaatgcgcatggcccagacgatgatggaacgctccgggtcttcctccagcagaccctccagaagatcagtaaacacggcgaatcgcgggttgtcttcgggcggcaggatcaccggctcaccatagacgttgatatagccggacgccacttgcttgagcttcgagcgcgctgccgcagcatcgaaagatacatccagcatgaaatcttcgttctggagaacgaagtgatagtcttcttccacgcgctgataaacctttcgttgctccggcgacatttcgaagtatatgcgcttgtacaccttgtccggcaggaatggcaatgcttccttcttcgtgacccggaagctgtgcggctcgatcagggatcgcagcttgtccaggttccggaataccgggcgcccataatcgtctttttcgacgagttgcggcggcatggtttgcttcccttccagcttgcgcatgatagcgatcattcgaggatcgtcactgggcaccaagacggaaaattcggccacaaacgcccgataggatttagtccccagaattccattccgcaagaattggaactgcatgaacaaatcggtcggcgcccgcgtcagaggagttccggaaaggatgcgacgggccacggccttctcgcccagctttacgatctttttcgcacgcttggcttgtgggtttttgatcctcgttgactcgtccacaattgcgcaaactttgaatgtatcaaggaatcgctcgacctcatcatagccagcctggtggttgattgcgtcaacgttgatggcgaagacgcgaagaactttttcatctgcgaacgtctcggaatacagacggtccaagcgcgccctggcctttttggaagtcggtcggccgcgccaatccacgctcaaagtcttgatcgcgacgtgggtgggaatctcgcgcagaatccagttggtgtggacgcctttgggggcgacgatgagcagcgcgtccacgcgcccctgtaggaagaggcgaacggcatcggccaaagtcgtccaagtcttcccggtgccctgctccatcaggtatgcgaagttccgtttgttcagggacgctgccagggcattgaattggtgctgcatggcctcggtcttcatgcccttgacgggatatgttttggctttcatttgttctccaaatcggcgaggaactgaacaatgttatccagtccttctgcatagctcgcaacttccaccaagtcgcggctgttaagctcgaacaaatcgaacataggattcagcagcagccaatcggttccgatcttggccaggacgaagccccggccaccccagccgatccgctcccgaagaaaagggatttgcccaggttcgaaacatctggccattgggcaggtggaagcgcgtttcggccactcctccaaagccttgaactcgacccagaactggacacctcgacgattcaggcagatcgaatcggacatgccagaccgccgcgtctccagaaagtcgatcaggattcggccgagcgagcgctgcttaaacgcattcgccgctttcgtttcgcgatcattcatcaccttcgccctctttggaaactttctctgcttgtgctgccaactttgacttctcgcgctcggtcaatatccgcttgacggccttcacgatgaacatgtcgatgccgctgagcctccatcctttgatcaggaaccaagcgccggtcggcgtcccttcagcaatctgctttccgtattgcagatatttttcaggccgaattctgaaacgtatcggctgatcaaccgagtcatcaacgcacatgatgtcgagaaactgcgactggcccttgtacaccgggtttttcccttgatcagccctcttcttctggcgaatcggttcgttctcatcagacagaacttttttcaccatcttgacaatgaccagaccatcatctccatcgcggatatcccgaatgttctgaatggggtttccggaagttactccaaccagctccggattgtcataagcatgaccccagagcgtgtgagcttcgttcaaatctgcgaattgaacttcagaattcgacagactcgcggcgactttctcccaatcctgaagcgtcttcaggtgggtgcctgccagctctttatattgagccttcagctccttaagatcggccttcaactccttcagatcggccttcaacagtttctccagttctttgtcttggctgattttcgccgaaagaatctgggcttccagagctgctacatcagcagccttgtcctcaacatcctgtgccgatatcgggcaattggccagggcgatcctcgcggccttgacttcctcacgaagacgcaggaaccgctcggccttcgccgggccgaagcctttggcgttcatgatgccgccgatcaggcgcccgtccgccaccacccagttgagttcggaatgctccgggtccagggccgtatattctacgccttctttggccaattcgcgaaggatagacacagtttgctggtcgtccttcgccgcccgaaggcacgcggccgcgtattccaggcgatgataccgcttcatgtagcaagtccagtatgtcaccacggcatagcttaccgagtgggagcggttgaatccccaggcgccgaatgtcaccatttcctgccaaactcggtgagcgtcttccggggcgacgcctatggtcttggcgccctcgatgaacaattcccggcgcttgttgaaaaattcttcgccctttcgcgccgacatcgctttccggatcgccgacgtttgttcccagtcgaactgaccaatgtccttaacaattgacatgatctgttcttggtacaggaacacgccatacgtccccgacaaatactgctcgacctgcggaatggtataggtcacaggctcgcggccggccacgcgctcgatatacttggttgccataccagaagacaacggacccggacgggcgagcgccgtgatgtggtcgatgttctcgaacgcggtgatgttgatcgcgtttgctaccgagcgaacggcctgcccttcgaactggaagatgccggacattttgtcttcattgagaatgtccagaaccgccttgtcgttcaaaggcaagtcgtacaactcttgcgcggtcacgcagttcgcgtcctggatgactcccaaagttcgaaggccgagcgcatcaattttgagaagattcagatattccgaatcgggcttgtcgagctgcgcgacgccttcagaagttaccgtacagaagttgatgacttcatcgttgcagaccaggatgcctgccgcgtggacgccagagtgggatgggtgaatttcgaggtcgcccatgcaggcggacgcgatctcatacttttcgcggaagtcgcggccgggctgagttttttcgaaagtgtcctccaatccttttccatatcgttcgtccgccgatgtatattcgatgatcgagtttttgatgttgtcggtgtcgtggaatggaatgccgaagcgttttccgacgtgagcgataaccgacgcggccttgagtgtgttgatgttacccaacttcacaacgttccaagtgccatacttctgctggagatattcgaacactagatagcgatgggtatcggcgaagtcgatatctatatcgggaagatcggaccgggaaatgtcgataaagcgctgaaagaggaggcgatgcgggagcgggtcaacctctgtaatgccaaggagatagcagaccaaagagccggccgaagagccgcgagctggaccgaccagcatgtgcttcttggcaaacgcgaccagatctgccacgaccaggaagtagctgtcgaaatctttcagctgaatctgcttgatctcttcttggaatcgatcctcatactcctgggtccattccttgatgtggccgcgactgaggcggtaggcttgcccctcgcgagccagagcgacgatatcaccatccaagtggatcatcggcgccttcgccagtttcacatccgccaaccgctcgactaccgcacgagtattggctgcggcagtatcgaactcttcgcgagtcatgatgtggcgtaaacggctccacagctcctcttcggtggcgatgtggcgaaggccgaccgattcccgcaccttccaggccgacgcgaaatcagcatggtcgatggatggcatgtcgttgtaagaggtaattaccaccggctttccgaatgccctggccgtctccatagcgccgtgcgcggcgaccatcgacgcgggattgatgtcaatgtagtcgattccggccagatccagatgggcataggcctcgccagcgaatttgatgacgccgtcagcttcctggaattcttgcggagtcaatccttgattctggaccgacttggaagtcaagcggtagaacttcttggtgtccttggcgagcacccaggctttgagcttcagctctttctcgccatcgtcggcgcatttgatcgggatttccatgccgaatccgcgaggcagttctgccttggcagcggcttgttcccaacggacgtggccccatgttccatcatcgacgatggcgacgaatggggattcgatctctttggcgcgctcgatgatctccgggaatcgaccatatgcggcgccgtaggagtaaccagagcgaacgcggagctgagggaaagacatcatgcggcctccattgcttgatacgcccgatacactcccatgcgcttgcagacttcgtggagcagccgcacgtcgtcgagcgcccggtgtttctgtacatatgggccgcagtagtgctcataaagatgttgcaaccgcatgcggtggccgaacaacggcgccgactcttccacagtacagatatcgagtgatgggaaattgacttcttccaggccgagctttccgcgagccaaatcgcaggtaagcatgaacttatcgaatggcaggttgtgggcaatattcgcgtcggctctggaaaagaagtcgcgaactttctggcgctgatcgaggaaagatgggtgcttgaccaggtcttcgttcttcaacccggtgatcttggtgatgatttcctcgataacgattccaggattgcagatgaactctacttcatccaaaatcttttcgccatcagttatcacgccggcgaattcgatgattctcggctgctttctcagactcaccctttggtggaacgggagccctgtggtctcagtatcccatacagcgaatatcatgtttgttccctcttatgtcgaaaggccggctgctttcgcgaccggcctgaggagtataccgcgacggctgaagatttacgccttctgtccgtctttcggcgtgatgcggccggagcgcatggtggcgtgaacaaacgccgaatagttgatcgagtccaaggccgaatcggcatccttgaacccgctattcgccaggcgagtgagtttacccaccatgtgcatcacgaacatggcgagtcgatgatcatcggcggtcttcgccaccaggccgttcgggaagaggatttccatgatctttccgtacatcaggtcattgcgaccataggtgctctggcgggcgcggaagacttctgctgcggcgtacagattgttgagaacatcttccgcgaaatcatctggatgggaatcatcttcgcccggccagacggattccatggcgaacggcgcggcgtcttcggtcgggttttcggactgagccgtttcagcgagcggagacggggctttcgcaaacgcctcgtcgagggtaggggcggagttcggggcggccgggaacggctcgcctgcaatgtcgttgggcgcgctatcggggtcgctatcggccgcgacggcgaagaacggcgcatcgcaaccttccaggttcaggatgtaggagtcgatccccaggctattgtaggcatcgatgatgtcctggcgatcatcgaacgccgcgacgatcttggtgacgccttcgattttcttcaggatgtcgagcgcgactgcccgcttgaactgaggcgccggctcggtgttaccatacggccgcatgatgagttcatactcgcgatgttcggcgatgccgagttcgcggtggagcttggccctggtctggaaaaagtggttgtcggttcggccggtgacgaagaaaatcatgaggtcggcgtcgatggcattcctgatgcgacctacagcgtgcgggttgagagtgtccttgtcgagacgagaatgatactcgtcccattgccgttccaaggcgaagctcttgcggtggctatcgtcgaatacgcagccgtccaggtcgaagatgatgatgccattcttgggtttgcgttccatattcagatttccttgatggttgctttctgggtgacggttttatcgatgaacgtcccatcagaagtgagtcggaaaacttcgcagttctgagtgaaatcgaacgattgcacgttcatcgtgatgcgaatggattcgctgccgttggtcacttcgacttgtgcgatgtcgccaactttctcgacaatgatcttcatgttacatggacttcccgttgacggccacagggttggcctcttgtttttccgatccccagaaatcgcggcgcagttcttcctgctcggccgagcgatccatccaggggcgatagaacttgcactggtagataggttccaacggaacatcaaccacaggaatctggccgggcttcgtctccagagcggccatgaaccggtcataggatttctgctggatttcctcttcattcatcaccttcgacccatagcgcgggaaggcgcaggagccggtggcgacgcagtgcggctggagtaggctgtcgaacatcggatagacttccagaaccagccggcgcatctcgcggaacacttcctggtattcgccctgggtccgaacgcacaggcgaaccttcgccatgtcgctgagagtccgcagattgaacttggccgcgatcttcgtttccatgttggaagggatgatggcacgagcgtcctggagcgacgcgccggcctccagcagcttctggtagctggtttgcgcgtcggcaatggcgtcatgccacagacggttcagctcttcgcggacatggtaggtcgggtcaggctcgccatttaccgtagccggttcgtcgaattcccagcggaaagcttctggctgaacgacggcgctgatttccagagcgcgactggtttcctgctggtaagccccggtccgcgtccgaacgagttgatgggtgaagttcttgctcacgccctcgatctggaaaatgaagtctacgaactcgaacggcgagcggatggtgtccagcatgtacttccagtggtcgagcttttcggcctcggtcatggtcgccgggtcttggccgcgcatgcgggtggacttcgtgcccaagagcaattcccaggcgttctgggtgtaactaatcagagaaatcttcatcagaaatcttccggaattggcgtgaagtggaatttttcggtgagagccagggccaggccttgggcttgctccctgttaaggccatactgctctatctcttccttgagcagttcgcaggcctccaggcgcgcctcatactcttcagcctcatggacggatgagaagacggctccatcagaggttcggtacacaagttcgatcgccatggtgacctcagtagcagcggatgatttcggcgcggatatctcgacggtcgaggtagtgctcacgaatcttatcgcgggcgcgctcggcctcttcgcggctgccgaatgacaggttgaacgacgtgaaaggcttatcgtccagttcagcgccggtctgatacaggatgcctaccagaacgaaagacggcgcggtcttcggctgctggtcggcttgcatttcgaggaaggacataggaacctcttcagaatgatctggtgcgtaaattaatagcgctcctgctgagcagctacggtttccggctcgtagatgagcatgtcaacgatttccgggcactggcctttcacccagtcgatggccgcgaccagtgtggtggaagcggagaaagagaaagtgcggtaagactcatggatgtacggcgaccccatggaatcgcgctcggtcgtgcgcgaaatgactgctttgatattaacgatccggcccatcttcggcctccactttagcgattatatcggacaggcttaacttctcgccattcaggaaataactggcgcgaaacttcctgtcgccctctggcccgacgattcgggccgttatggtgagactcccgccgccaagggcatcggtgtcccggaagaaagctagcagcgcccgcttgagcgctgcttcgcgaggatcgacggccattaacctaccacgttccagccgtgctgagcgcaccacacggcaccggcccctgcaggaagactattcagaaggaacacaggagtcaggcggccgtcctcggtcatatggatgaagtagcgggcgccttcaccgagccattcggccttggcgatagcgcgttcgagattggccttggtggcgtaggttttggtgtggttcttgtcggtggagaaggttacttcgcgggccatttgtcgattccttttggttgaagggtttcgcgtttcgatgagggaatattacgcccacctgatccagaagtaaagcacttttgtaaattacttcacgaacatcttcttggccttctgataagacgaagaagtcatcaggcgctcgatgacgtccatgtcagaaaccagatcatccagaaggacattgcgccaggtagcgaaccggccgagcgagaagatgccagcctcatgggtgagattccagatcatggattcgcgctcgtcgcgaccgagcggaatgattttgcctttggtctggatggtcggctcgccatcttcgatgagatgccttttcctgatgccgaaggccgcgcaaacgtaatccatatcccagtcgctgtcccattcgatggtttcgattttaccatctaaagtctccactatccccttagtgatggattcgacgatcagagtatcaccggtgatggacgctcgaaacgttcccactttaggaccagggaaatacacggtctggaagacatcacaggggatggaaagcttgtatcgactcacgatgatggaggttccttcaccgaatgacgggtcgattcccaggtccagccctgccgcagccagattggcgcggaacggcgcggtgctgatgatattcacgtggtcatcttgccggcgaagatactggaagaaagaggcgtcgaaaggacggctccaagtgatacgattcgcaagcttagccaccagctgctcatagtagtcggccggtgcgatccaacgcttttcagtcgccagattccagatggaccggtccgacaggccgcccgttactttcctggagtacatgttgcagtggtcgatgcgcggctgggaaatgaactcgccgtcgatgtagatagctttgtgtacagtgacttcgcggaacgggatgccggtgagttggccaatcactggcgagcggaatcgcagaagtgcgttgtggcgctccttattctccggcgtcgccgcgtcgatgatttgggcttgaggaaagcgatgcgcggcgatcagtccggcgagtccggcgcccacgatgataactttctgatcaggaatcatgatgtgtcccttatgagtgtacaaaacttgagaggataaaaaagggacccattctcatgagtcccttgaagagctagacgattcaggctcagaagagcggcggcttactcttcatcaccttcggaaccatcggcgccctgatcttcaccgtcgtgctcctggccttcgtcatcggccttctcgtcatcgccctggccagcttcgtcttccttcgaagcgatggcaaccagatcgacccagcccatgatttccagcttgctcaggtagctgcggaccgaagtgccatagagcagatgggccaccttctcgccgaaggcttcgatttcgaccggctcaccaacggtgcagtgctcgttgatgtaagcgaacaccttgccgcgagtcgagaaggcctgcggagtgccatggccgtcgccggtcgggatgaagtgggtggcgcgggggcgacgcgagccattggacttcaggtcttcgcggcgggcttcggccttcttacggcgctcttcctgctcttccttgcggcgctgcttctcggcttcgcgctcggccttcttctgctcggccaggcgcttgcgctcttcttcgcgagcgactttctgggcttcctgggcggccttcttctcttcggcctttttggcgcgctcggcttccttctcggccttcttctgctcgcgctcggcttccttggccttcgccttctcggcctgctcggcttccttcaacttggccttttcagcacgctcggcttccttggcggcggccttttccttcgccttttcagcacgctcggcttccttcttctcacgctcggccttgcgcttctcttcgcgctcggctttcttctgctcgcgctcggcttccttggccttcgccttctcggcgcgctcgcgctctttacgttgacgctcagcggccttctctgccttgcgcagggcggctgcttgttccttggtcagctcttcgccttgggcctggtcgttctggtctttctgttccatgttcttactccgggaatgtttaaagggatggcttattggcctgtgaggggattatctctaaactaattgaagaagggaataccttagcctgaactttcctaaatattttctttcgggaaaatccagactccagggaacttatttatgttcgcgaagtttcaactcttccgcaaaaacagcaagtattcaactgcacgagttatgccggtatacatcaactgactataaggaattgacggcaagttttcttccagcattgccacacgcttccattccgatccctgcgacttatggaacgtcatcgcccaaccgaagtcgaatccgccaatggccttctgcgcctccagccgcacatcttcctcggccgaaaagctcaaaggattgaacttcacccatcgctcatagttcgttccgataatgcgaactttggcgaacaacatttcatccggctcgtcatcatcttcttggccttcggggaccggcttgaagtccagcagaattgcttgctcgccgttcatgatgccatattcgtgctggttcccggtgcacaccagcttctcgccgatttccggttgtacacccttgtagccgaggatgcggcgcgccctggcgttcaaacggcgacgagtattgttgtaggcgcaaaggatcacgccgtcatcgtccaagaacgtccgcatttcgtcgtccgacatgtcgaatccggcccgtaccagaatgtcgtcatactcgcggcagggcaggcgcttgccctggcggacgaacatcgacgcccgaacgatattgccggcgttgcgctcgatttcggtcatgatggtgtcacagctgttctcatggaaaatctggacgccgcgcacaggaggaacttggccaaagtcgccaatttccagaaccggaattcggtgcgacagcaagcgctcttcatcccactcgccgatcatggacgactcgtcgagcacgaccaacttcggcttctcgtcgagcgagtctttgttggcaaacatgatttcgccgtcttcatcttcgccaatcggccgatagatgaagctgtggagggtccgggcattggtgcagcccttctcgcgaagccgcgctgctgctttcccggttggcgcgacgaagaccgtccagtccatcgagcagcaaagttcggcgatgatcttcgcgatggaagtcttaccagttccggcgaaaccagcgagtcgatagacctggcggcggtgcgctcgatcacaccaaccgcgataccagtccacaacggaattgatcgcgtcgatctgctgactgtttggtcgaaagccgaatcgctcttcgatctgatcgacggtgaagttagatgctgacatatttgcgttctccaacgctaggtttaattgaatcgaggctcagtttaagcacgccgtccacagaccagccagtatcacgacgatacttgcggccttgcgggtcgacatagaagttcttcgtgcgccgcagcagaacataatgccaagcagctccaagcgcgtggacccttcctttatacgggaaagccttcgcctgctctgcggcctctttggccccagggagccagcggacggtagaaaggaccaggaccgcacccttaatagcctgggaagcggcgcggccgtcctgtgggctatagcgatgtctatcgaagtctacccagtggcggttgccgcgccggagcttgaccgttcgggatcgcccctcgaacaccaccgtgccttcgtgagtaaaaatatgttccgccatcgaatgttcctttataacgtacagttatgctttacctctgcgcaggaagagtatactatcagctgactcgccaaagcgagcgaatttaatccaactttacttcggcaggaaagtggccgatactagcgccgccgcctgtactgccctccaaaacagaggatacattaaatgcaagaatgcaagatttcccgcgaccaactcccggtcggtaatccgaatcccaatgtcgacaagacccgcgacccgaacctgaagcccggtttcctgcgtcgcagccgcgagctggacccggcgctggccgttcgcattcgtcgcgagctgatccacgccgaagcgtccgatctggccaaggccggatgggtcaattcacagtccagcctttatggatcgaaagccttcccgcgccattccgtcgttcgcgtgaccggagttccggaagatggagctttcatcggcatgctgatcggcttcatcgagcatcgcgagcatggcgaatgggcggtcatggaagccggaacgaaagaaggcggcgccgtcattattccagtcgatcacatcatgcgagcgtcattcgccgaagccgaagagttcgccgaaaagtgggagcggaacttggggtggcgtctcctgcgccaactccgcgagtgcggcgccctggccgggactgaagacgagttcctgcggcggatcatcaatcgatacgttcgtgatcgcacgatcctcgatcaccacaaagtcggcgcggacaaaacctatactgatgcagtactcaaaagcatcggcgaaacatggccgaagattccttcggggaaattcgtcggacaccgagtcgcgcagctcctgatcggccacaagctaggtcgagcggggaccattctgaatgacctggtggacttcctggagaagttcgcggccgggcgcgataaagttctcaacatcgccatctgtaattgaggtgaagggatgaacaataaaccgacgctgaatcaccaccatcaaactgcattgttgtatctgtataacaatccaaatcagccggccttcacaggtcccaacaatcaggcgctcaatgaacttcggcagatggggtatgtaaaggcgaaagaattcgaaaactgggcaggcaccggccatcttaggatggaatggacgctcaccaaagccgggattgagcgcgtcgaagtcgggcttctggggaagtgcgacgcttgcaagggaatcggtcagactttgcttcgggggaagtgtactgtttgcaatggccgcggccaggggtggatcagcgaatggtcgcagaagccaatcgaagataatcctcaaattacccctaagttcgaaaagaccgatgcgaataggcttgcagacgccattgaagaaatcggccggctggaaaaggcactggccgaatccgaaaagcgcgggagcgagctggccgcgagctattgtgacggcgtagtcggcgatgaatacggccatccttattgtcgttataaagtggaacgcgacgccgccttggccgaagtcgagcgcctgcgagaatcaaaaggcgatccctctggcagcttcgacaggtgtatgaagatgatgtacgagcgcgacgagaatgcaaaacgactcgacgccgccttggccagggtcgcggagctggaagggaagttgacggactggttgcacgaagggttccggctcaacgaggcgctagcggtcgccaaggctcaacccagcgtgccggaaatatctggcatcggtcgcgatgccgaacatcccagagctgtagtgctgtatctgcgtaacgaacccagcgatgaagatatgcgagcaatacagaactttttgcgcgccatggccgcccccgctcagcacagcgtgccgaaagcatggctcgacgttcaggcagagcgccgccggcaggtcgaggcccaggcgctaaggcaggaagtcgcagcactgcgcgcaagggcggatgttttgccggaggtgttcgggcttgagcggtaccgcgtagaaaaaactgggaagggtttctggccatactgcgtgcgtgcgggggatggaacgcgtgaactgttcgtcggccacttgaagcagtgtcagcgggtagcgaccgaattggctacggcgtttgaagatgggaagtttatcgccgcgcccggcagctcggctcagcacagcgtgccggaggggtggaagctcgtaccgatggacccgacatcgcagatgacctatgtcggtcagtccctgcgttatgacgcggtaaacagcatcggcgagatttaccggcaaatgctcgccgtagctccctcacccatcgatccggccgcgcatcctcagccgtgccagcaaccacaggcccatcctgcccgctgcgggtgcgagcggtaagtgccaagtaaggaattcatgtaatggaacagaagaaaccttcaccagtagatggagtcatcgccatgaccagcctcgacgttctccggaaagcacagcccgaagcccaggacgagtatgccgtgtccatgttcgcaacggcgatccgccagaaaatgcagcgctcccgcgataaaggccgaggcggctggatcgactgcgacgaagatattctgatcaacggattcgccgaacatgcgctgaagggaaatgagaacaacctcttggacctggcgacattcctgatgttcatgtgggtgcgcggcatcgacgatgcgaagattcccccggcgctcgaaaaggcgcggcagcacaagatcatggaagcatggagtcgggtccacgaagatggactaaactccgccagaaaggcgagtgctgcgcgacagttcgtggaagtgcctcgacgcaaggggcgcccggagcgacttgcatgaagcctcacgaaataagactggcacaggccgaagagttcctgcgcgaactcggccgagggattccggacgacgaacgggtaatggttggctacgctgaagaggccacagtccaaaccgacgagaacggccgcaagctcaacgccggctggtggcctgtgccctggaaggaagggaaatacataaactcccgatccaacgcctacgcttgcatctcgtcatccatcaagacgcccaacccgaagaccggccagatgcgatactggcgcggcgaagcctctttcggccacggcctggcgttgatggtcgatgacatcggctccggcaaagggtccaaaggcgacttcgaccgcgacgaattccgcgagcgactggagccgaccgcgattgtggagacttcgccgaacaactaccagttctggtatttcttcaaagagcctatgtcacacatgctccagttcaaggcgctgctctattcgttcgtggaccaggtgctaaagaaaggcggcgacaacaccgtcaaggacgtcagccgttacggccggatgccattcggcttcaacaacaagcgcgggaaagacggcaagttcaaatatgccgacgaaaacggcaaacccgaactcgtgcgcctgtacagcgccgactattccaagcgctactcgccagaggagatcgcccaggcctttggcgtccgcatcatcatgccacagatgaagaaggtggagataaaccgcgacgattgggtgtatgaccaagtatggctgaagtatgccgagcacatctgcacgaaatacaagatgggcgaggcggcaggcggccaggtccagcagaatatgtccggcaaataccgcatccgctgtccctggggcgacgagcacaccaacggcgatcctttcggcgcatactttcgcggaccgatacctggcgccgagcacgaatatgtgttcggttgcgggcacgatacttgccgcaaagagcatcgacggacgtgggcggccttcactgatgaagtcgtcctgccgtatattgtcgaacaacttgaacgcatcaaccgccgtcatatcggcgaggagtagtaactatgcaaaatgatcctggaattctgatcacagccattggcttgctgttcctcggccttatcatcttcttcgaaggcctaaagggatggaaaatacaagtcgcaaacttcctcgcgtcgcttctgtgcttcttcttcggcctttctgctttgacgttctggttcgtcgttgcgtttgacgtattttaatcgacgaacggtacagaaattttcggatggggacggaacttattagctctgccggtttaggtaggagataatagccgtccctttcgcctcaatatgtagaggcagtgttatatccgatcatgtaaagcagaaggcggcaaacctaacatgattatcgacgacgataacattcttgatgatgacgaatcggggtccggtgagttcgatctcacgcaaatagaagatgctggaatggaccctttgatgaccgccgcaagtaaagcggccgatgatgcgattgcgaggaatgaaacgcaccgcgcacaaaaggcggcaagatacgccgaggcgtatgcggaaccagacttgagaaagcgagcgcgattgttgatgctcgaccaggcgttcgatcttccggtcagccgggtggtgaaaggtccgttcgatgacttcatcactaaatacagctcaacttccgacagcaactatctcgcggtctatgatacgttgttctgtaagggcgacggaaccgtcccgcatccgcacttcgatgagtttcgcggccggctggtggaccaccgaggcgtggcgttcaacaacaagaccctcgaccccattgacctgatgggcgccctcgcggctgcggccttggacgatccatcgattaagaagacgattgagacttgctgcgtttgggcgcgtcgatatcgccgcaactctttgatcgagacgtttgagaagaagataccggattgggacggcgaagagcgaattagcacgttgctgatcgatcttttcaagccgttcgacaccgagctcaaccgtatggtgagcaagtatttctggctgagcctgtactgccgcatcaactatccgggaatttcggcgccgatctcgttggcgttgattggtgggcaggatgcggggaaatcatatttcggcttgctgatctgtaaggaactgtccggtgggcgcgatctggctccagttcagctcgacctgagccgacacgaccagacgccgttcctgcgcaacatcaccggcaactcggttattgcgaacgtcggggaaatgtccggcttcaaaaagggcgacatggaacgcatcaaagaattcctggtgcgatcttcggatacattcgatcaaaaattcgagccgggcgaaacgatcaagcgacaatggatcaccatcatggacggcaacggatacgatggactccagcgggacgactccggcaaccgtcgattctatccgatgttcgtggcacaacttcccgacgaagatggaaagccgaactgggttaagccgggcgatggtaatgaaccgttcaaggtggacttcacagacttcggccgcaagttctggcaggctatggctgagtgccgcgcctggatcgaagagcatggcgtcgatggatacctgaatatggtgtcggaagctaaccgcgaagtgcagaacttctctatttcggaaatggagaatgcgcgtggcgtggttcgtgatgatacgattgacatgtatctgatcaacgttctgatgagttgcgagttcgaagaggttaagccgggcaggaattcaaagaatcctggatggagggctgacaccgtcaccattctgaaatggttcgatattctcgccaggaagaagccgatttctcgccacttaactccgcacctgaaggcgctggggttcgtcccgaacaagaacggcctggctggttggtgcctgcccgtcgataaggttgcgcctggatggacgaatagtatgcaaaccacgctgccgccgttcaatgatgcgcttgtgtacttgctgaggaagggcgacccggatatcactgatgaggccgccatggcaaagattcgggcagtccgggccgagcgagccaagattttgggcgaggatttctgatgtagtggttgagtgtacttggactaggccgccttcgggcggtcttttctttggtgcggcgtacattagattccggcgttgggcgggattggtagaagtgaatacagtaatttggaccagtttcgagcgcgaataatggaaagtcgatagattttcggtatcggtttagcgtgtatggtggacggattttgcgtgaaatgttgagaaattgcgtgtttgaggtggacttttcgtgggaaatagccgcaaattactgtatagcgattctgagcggtaatttgggaagcctactgccgcgtgggttagcgggccaatttcctaatttccggtttttcgagcatgggttaaaactattctacagcgaaaatcgattgcac

SEQ ID NO: 39 - DNA, 66665 bp, synthetic construct
  source 1..66665: mol_type = other DNA
gccaaggagatagcagaccaaagagccggccgaagagccgcgagctgggccgaccagcatatgcttcttggcgaacgcgaccagatctgccacgaccaggaagtagctgtcgaaatctttcagctgaatctgcttgatctcttcttggaatcgatcctcatactcctgggtccattccttgatgtggccgcgactgagacggtaggcttgcccctcgcgagccagcgcgacgatatccccatccaggtggatcataggcgccttcgccagtttcacatccgccaattgttcgactaccgcacgagtattggcggcggcggcatcgaactcttcgcgagtcatgatgtggcgtaaacggctccacaactcctcttcggtggcgatgtggcgaaggccgaccgattcccgcaccttccaggccgacgcgaaatcagcatggtcgatggacggcatgtcgttgtaagaggtaattaccaccggctttccgaatgccctggccgtctccatagcgccgtgcgcggcgaccatcgacgcgggattgatgtcaatgtagtcgattccggccagatccagatgggcataggcctcgccagcgaatttgatgacgccgtcagcttcctggaattcttgcggagtcaatccttgattctggaccgacttggaagtcaagcggtagaacttctttgtgtccttggcgagcacccaggctttgagcttcagctctttctcgccatcgtcggcgcatttgatcgggatttccatgccgaatccgcgaggcagttctgccttggtagcggcttgctcccaacggacgtggccccatgttccatcatcgacgatggcgacgaatggggattcgatctctttggcgcgctcgatgatctccgggaatcgaccatatgcggcgccgtaggagtaaccagagcgaacgcggagctgagggaaagacatcatgcggcctccattgcttgatacgcccgatacactcccatgcgcttgcagacttcgtggagcagccgcacgtcgtcgagcgcccggtgtttctgtacatatgggccgcagtagtgctcataaagatgttgcagccgcatgcggtggccgaacaacggcgccgactcttccacagtacagatatcgagcgatgggaaattgacttcgtccaggccgaacttgccgcgagccagatcgcaggtcagcatgaacttatcgaatggcaggttgtgggcaatattcgcgtcggctctggaaaagaagtcgcgaactttctggcgctgatcgaggaaagatgggtgcttgaccaggtcttcgttcttcaacccggtgatcttggtgatgatttcctcgataacgattccaggattgcagatgaactctacttcatccaaaatcttttcgccatcagttatcacgccggcgaattcgatgattctcggctgctttctcagactcaccctttggtggaacgggagtcctgtggtctcagtatcccatacagcgaatatcatgtttgttccctcttatgtcgaaaggccggctgctttcgcgaccggcctgaggagtataccgcgacggctgaagatttacgccttctgtccgtctttcggcgtgatgcggccggagcgcatggtggcgtgaacaaacgccgaatagttgatcgagtccaaggccgaatcggcatccttgaacccgctattcgccaggcgagtgagtttacccaccatgtgcatcacgaacagggcgagtcgatgatcatcggcggtcttcgccaccaggccgttcgggaagaggatttccatgatctttccgtacatcagatcattgcgaccataggtgctctggcgggcgcggaagacttctgctgcggcgtacagattgttgagaacatcttccgcgaaatcatctggatgggaatcatcttcgcccggccagacggattccatggcgaacggcgcggcgtcttcggtcgggtctttggactgagccgtttcagcgagcggagacggggctttcgcaaacgcctcgtcgagggtaggggcggagttcggggcggccgggaacggctcgcctgccatgtcgttgggcgcgctatcggggtcgctatcggccgcgacggcgaagaacggcgcatcgcaaccttccaggttcaggatgtaggagtcgatccccaggctattgtaggcatcgatgatgtcctggcgatcatcgaacgccgcgacgatcttggtgacgccttcgattttcttcaggatgtcgagcgcgactgcccgcttgaactgaggcgccggctcggtgttaccatacggccgcatgatgagttcatactcgcgatgttcggcgatgccgagttcgcggtggagcttggccctggtctggaaaaagtggttgtcggttcggccggtgacgaagaaaatcatgaggtcggcgtcgatggcattcctgatgcgacctacagcgtgcgggttgagagtgtccttgtcgagacgagaatgatactcgtcccattgccgttccaaggcgaagctcttgcggtggctatcgtcgaatacgcagccgtccagatcgaagatgatgatgccattcttgggtttgcgttccatattcagatttccttgatggttgctttctgggtgacggttttatcgatgaacgtcccatcagaagtgaggcggaaaacttcgccattctggctgaaatcgaacgattgcacgttcatcgtgatgcgaatggattcgctgccgttggtcacttcgacttgtgcgatgtcgccaactttctcgacaatgatcttcatgttacatggacttcccattaacggccacagggctggcctcttgtttttccgatccccagaaatcgcggcgcagttcttcctgctcggccgagcgatccatccaggggcgatagaacttgcactggtaaatcggctctaccggcaaattaaccacaggaatctgaccgggcttcgtctccagagcggacatgaagcggtcataggatttctgctggatttcctcttcattcatcaccttcgatccataacgcgggaaggcgcaggagccggtggcgacgcagtgcggctggagcaggctgtcgaacatcggatagacttccagcaccagccggcgcatttcgcggaacgcttcctgatattcaccctgggtccgaacgcacaggcgaaccttcgccatgtcgctgagagtccgcaggttgaacttggccgcgatcttcgtttccatgttggaagggatgatggcacgagcatcctgaagcgatgcgccggcctccaagagcttctggtaactggtctgcgcgtcggcgatggcatcgtgccacaggcggttcagctcttctcgggcgtgataggtcgggtccggctcgccattggccgtcgccggctcatcgaaatcccagcggaatgcttccggttgaactacggcgctcacctccagggcgcgactggtttcctgctggtaagccccggtgcgagtccgaacgagttgatgggtgaaattcttgctgacgccctcgatctggaaaatgaagtccacgaactcgaacggcgagcggatggtgtccagcatgtacttccagtggtcgagcttttcggcctcggtcatggtcgccgggtcttggccgcgcatgcgggtggacttcgtgcccaagagcaattcccaggcgttctgggtgtaactaatcagagaaatcttcatcagaaatcttccggaattggcgtgaagtggaatttttcggtgagagccagggccaggccttgggcttgctccctgttaaggccatactgctctatctcttccttgagcagttcgcaggcctccaggcgcgcctcatactcttcagcctcatggacggatgagaagacggctccatcagaggttcggtacacaagttcgatcgccatggtgacctcagtagcagcggatgatttcggcgcggatgtcgcgacggtcgaggtagtgctcacgaatcttgtcgcgggcacgctcggcctcttcgcggctgccgaacgacaggttgaacgacgtgaaaggcttatcatccagttcagcgccggtctgatacaggattcctaccagaacgaaagacggcgcggtcttcggctgctggtcggtttgcagttcgagaaaggacatagggagacctcttcaggatgatctggtgcgtacattaatagcgctcctgctgagcagctacggtttccggctcatagatgagcatgtcaacgatttccgggcactggcctttcacccagtcgatggccgcgaccagtgcggtggaagcggagaaagagaaagtgcggtaagactcatggatgtacggcgaccccatggaatcgcgctcggtggtgcgcgaaatgactgctttgatattaacgatccggcccatcttcggcctccactttagcgattatatcggacaggcttaacttctcgccattcaggaaataactggcgcgaaacttcctgtcgccctctggcccgacgattcgggccgttattgtgagactcccgccgccaagggcatcggtgtcccggaagaaagctagcagcgcccgcttgagcgctgcttcgcgaggatcgacggccattaacctaccacgttccagccgtgctgagcgcaccacacggcaccggtccctgcaggaagactattcagaaggaacacaggagtcaggcggccatcctcggtcatatggacgaagtagcgggcgccttcaccgagccactcggccttggcgatggcgcgttcgagattggccttggtggcgtaggtcttggtgtggttcttgtcggtggagaaggttacttcgcgggccatttgtcgattccttttggttgaagggtttcgcgtttcgatgagggaatattacgcccacctgatccagaagtaaagcacttttgtaaattacttcacgaacattttcttggccttctgataagacgaagaagtcatcaggcgctcgatgacgtccatgtcagaaaccagatcgtccagaaggacgttgcgccaggtagcgaaccggccgagcgagaagatgccggcttcatgggtgagattccagatcatggattcgcgctcgtcgcggccgagcggaacgattttgcctttggtctggatggtcggctcgccgtcctcgatgagatgccttttccttatgccgaaggccgcgcaaacgtaatccacatcccagtcgctgtcccattcgatggtttcgattttaccatctaaagtctccactatccccttagtgatggattcgacgatcagagtatcaccggtgatggacgctcgaaacgttcccactttaggaccagggaaatacacggtctggaagacatcacaggggatggaaagcttgtatcgactcacgatgatggaggttccttcaccgaatgacgggtcgattcccaggtccagccctgccgcagccagattggcgcggaacggcgcggtgctgatgatattcacgtggtcatcttgccggcgaagatactggaagaaagaggcgtcgaaaggacggctccaagtgatacgattcgcaagcttagccaccagctgctcatagtagtcggccggtgcgatccaacgcttttcagtcgccagattccagatggaccggtccgacaggccgcccgttactttcctggagtacatgttgcagtggtcgatgcgcggctgggaaatgaactcgccgtcgatgtagatagctttgtgtacagtgacttcgcggaacgggatgccggtgagttggccaatcactggcgagcggaatcgcagaagtgcgttgtggcgctccttattctccggcgtcgccgcgtcgatgatttgggcttgaggaaagcgatgcgcggcgatcagtccggcgagtccggcacctacgatgattactttctgatcaggaatcatgatgtgtcccttatgagtgtacaaaacttgagaggataaaaaagggacccattttcatgagtcccttgaagagctagacgattcaggctcagaggagcggcggcttactcctcctcaccttcggaaccatcggcgccctgatcttcaccgtcgtgctcctggccttcgtcatcggccttctcgtcatcgccctggccagcttcgtcttccttcgaagcgatggcaaccagatcgacccagcccatgatttccagcttgctcaggtagctgcgaaccgaagtgccatagagcagatgggccaacttctcgccgaaggattcgatttcgaccggctcaccaacggtgcagtgctcgttgatgtatgcgaacaccttgccgcgagtcgagaaggcctgcggagtgccatggccgtcgccggtcgggatgaagtgggtggcgcgcggacggcgggagccattggacttcaggtcttcgcggcgggcttcggccttcttgcggcgctcttcctgctcttccttgcggcgctgcttctcggcttcgcgctcagccttcttctgctcggccaggcgcttgcgctcttcttcgcgagcgactttctgagcttcctgggcggccttcttctcttcggcctttttggctcgctcggcttccttctcggccttcttctgctcgcgctcggcttccttggccttcgccttctcggcctgctcggcttccttcgccttggccttttcagcacgctcggcttctttggcggcggccttttccttcgccttctcggcgcgctcggcttccttcttctcgcgctcggccttgcgcttctcttcgcgctcggctttcttctgctcggcttccttggccttggcttcggccttctcggcgcgctcgcgctctttacgttggcgctcagcggccttctcggccttgcgcagggcagcggcttgttccttggtcagctcttcgccttgggtctgttcgttctggtccttctgttccatgttcttactccgggaatgtttaaagggatggcttattggcctgtgagaggattatctctaaactaattgaagaagggaatacccttagcctgaactttcctaaatattttctttcgggaaagtccaaactctagggaacttatttatgttcgagaagttcctagcttttacgcaagaacagtaagtattcgattgcgcgagttatcccagtatacatcaactgactataagggatggacggcaagttttcttccaacatggcgacccgtttccattccgatccctgcgacttatggaacgtcatcgcccagccgaagtcgaatccgccaatggccttctgcgcctccagccgcacatcttcctcgaccgaaaagctcaagggattgaacttcacccagcgctcatagttcgtgccgataatgcgaactttggcaaacagcatttcatccggctcgtcatcatcttcttggccttcggggaccggcttgaagtccagcagaattgcttgctcgccgttcatgatgccatattcgtgctggttcccggtgcacaccagcttctcgccgatttccggttgtacacccttgtagccgaggatgcggcgcgccctggcgttcaaacggcggcgagtattgttgtaggcgcaaaggatcacgccatcatcgtccaagaacgtccgcatttcgtcatccgacatgtcgaatccggcccgtaccagaatgtcgtcatactcgcggcagggtaggcgcttgccctggcggacgaacatcgacgctcgaacgatattgccggcgttgcgctcgatttcggtcatgatggtgtcacagctgttctcatggaaaatctggacgccgcgcacaggaggaacttggccaaagtcaccaatctccagaaccggaattcggtgcgacagcaagcgctcttcatcccactcgccgatcatggacgactcgtcgagcacgaccaacttcggcttctcgtcgagcgagtctttgttggcaaacatgatttcgccgtcttcatcttcgccaatcggccgatagatgaagctgtggagggtccgggcattggtgcaacccttctcgcgaagccgcgctgctgctttcccggttggcgcgacgaagaccgtccagtccatcgagcagcaaagttcggcgatgatcttcgcgatggaagtcttaccagttccggcgaaaccagcgagtcgatagacctggcggcggtgcgctcgatcacaccaaccgcgataccagtccacaacggaattgatcgcgtcgatctgctgactgtttggtcgaaagccgaatcgctcttcgatctgatcgacggtgaagttagatgctgacatatttgcgttctccaacgctaggtttaattgaatcgaggctcagtttaagcacgccgtccacagaccagccagtatcacgacgatacttgcggccttgcggatcgacatagaagttcttcgtgcgccgcagcagaacataatgccaagcagctccaagtgcgtggacccttcctttatacgggaaagccttcgcctgctctgcggcctctttggccccagggagccagcggacggtcgaaaggaccaggaccgcacccttaatagcctgggaagcggcgcggccgtcctgtgggctatagcgatgtctatcgaagtctacccagtggtggttgccgcgccggagcttgaccgttcgggatcgcccctcgaacaccaccgtgccttcatgagtaaaaatatgttccgccatcgaatgttcctttataacatacagttatgctttacctctgcgcaggaagagtatactatcagctgactcgccaaagcgagcgaatttaatccaactttacttcggcaggaaagtggccgatactagcgccgccgcctgtactgccctccaaaacagaggatacattaaatgcaagaatgcaagatttcccgcgaccaactcccggtcggtaatccgaatcccaatgtcgacaagacccgcgacccgaacctgaagcccggcttccttcgccgaagccgcgagctggacccggcgctggccgttcgcattcgtcgcgagctgatccacgccgaagcatccgacttggccaaggccggatgggtcaattcacagtccagcctttatggatcgaaagccttcccgcgccattccgtcgttcgcgtgaccggagttccggaagatggagctttcatcggcatgctgatcggcttcatcgagcatcgcgagcatggcgaatgggcggtcatggaagccggaacgaaagaaggcggcgccgtcatcatcccggtcgatcacatcatgcgagcgtcattcgccgaagccgaagagttcgccgaaaagtgggagcggaacttgggatggcgcctcctgcgccagctccgcgagtgcggcgccctggccgggactgaagacgagttcctgcggcggatcatcaatcgatacgttcgtgatcgcacgatcctcgaccaccacaaagtcggcgctgacaaaatctacactgatgcagtgctcaaaagcatcggcgaaacatggccgaagattccttcggggaaattcgtcggacaccgagtcgcgcaactcctgatcgaccacaagctaggtcgagcgggaaccattctgaatgacctggtggacttcctggagaagttcgcggccgggcgcgataaagttctcaacatcgccatctgtaattgaggtgaagggatgaacaataaaccgacgctgaatcaccaccatcaaactgcattgttgtatctgtataacaatccaaatcagccggccttcacaggtcccaacaatcaggcgctcaatgaacttcggcagatggggtatgtaaaggcgaaagaattcgaaaactgggcaggcaccggccatcttaggatggaatggacgctcaccaaagccgggattgagcgcgtcgaagtcgggcttctggggaagtgcgacgcttgcaagggaatcggtcagactttgcttcgggggaagtgtactgtttgcaatggccgcggccaggggtggatcagagaatggtcgcagaagccaatcgaagataatcctcaaattgtccctaagttcgaaaagaccgatgcgaatagacttgcagacgccattgaagaaatcggccggctggaaaaggcactggccgaatccgaaaagcgcgggagcgagctggccgcgagctattgtgacggcgtagtcggcgatgaatacggccatccttattgtcgttataaagtggaacgcgacgccgccttggccgaagtagagcgcctgcgagaatcaaaaggcgatccctctggcagcttcgacagttgtatgaagatgatgtacgagcgcgacgagaatgcaaaacgactcgacgccgccttggccagggtcgcggagctggaagggaagttgacggactgggtgcacgaagggttccggctcaacgaggcgctagcggtcgccaaggctcaacccagcgtgccggaggggtggaagctcgtaccgatggacccgacatcgcagatgacctctgtcggtcagtccctgcgttatgacgcggtaaacagcatcggcgagatttaccggcaaatgctcgccgtagctccctcacccatcgatccggccgcgcatcctcagccgtgccagcaaccacaggcccatcctgcccgctgcgggtgcgagcggtaagtgccaagcaaggagttcatgtaatggaacagcagaaaccttcgaaagtagatggagccatcgccatgaccgatctcgatattcgcattcttcgaaaggcgaagcccgaagcgcaggacgagtgcgccgtgtccatgttcgcaacggcgatccgccagaaactgcagcgctcccgcgataaaggccgaggcggctggatcgactgcgacgaagatgttctgatcaacggattcgccgaacatgcgctgaagggtaatgagaacaacctcttggacctggcgacgttcctgatgttcatgtgggtgcgcggcatcgacgatgcgaagattcccccggcgctcgaaaaggcgcggcagcacaagatcatggaagcatggagtcgggtccacgaagatggactaaactccgccagaaaggcgagtgctgcgcgacagttcgtggaagtgcctcgacgcaaggggcgcccggagcgacttgcatgaagcctcacgaaataagactggcacaggccgaagagttcctgcgcgaactcggccgagggattccggacgacgagagggtgatggtcggctacgctgaagaggccacagtccagaccgacgagaacggccgcaagctcaacgccggctggtggcctgtgccctggaaggaagggaaatacatcaactccagatccaacgcctacgcgtgcatctcgtcgtccatcaagacgcccaacccgaagaccggccagatgcgatactggcgcggcgaagcctctttcggccacggcctggcgttgatggtcgatgacatcggctcaggcaaagggtccaagggtgacttcgaccgcgacgagttccgcgagcgactggagccgaccgcgattgtggagacttcgccgaacaactaccagttctggtatttcttcaaagagccgatgtcccacatgctccagttcaaggcgctgctctattcgttcgtggaccaggtgctaaagaaaggcggcgacaacaccgtcaaggacgtcagccgttacggccggatgcccttcggcttcaacaacaagcgcgggaaagacggcaagttcaaatatgccgacgaaaacggcaagcccgaactcgtgcgactgttcagcgccgactattccaagcgctactcgccagaagagatcgcccaggcattcggcgtccgcatcatcatgccacagatgaagaaggtggagataaaccgcgacgattgggtgtatgaccaagtatggctgaagtatgccgagcacatctgcacgaaatacaagatgggcgaagcggcaggcggccaggtccagcagaatatgtccggcaaataccgcatccgctgtccctggggcgacgagcacaccaacggcgatcctttcggcgcatactttcgcggaccgatacctggcgccgagcacgaatatgtgttcggatgcgggcacgatacttgccgcaaagagcatcgacggacatgggcggccttcactgatgaagtcgtcctgccctatatcgtagaacaattggaacgcattaaccgccgtcacatcggcgaggagtagtaactatgcaaaatgatcctggaattctgattaccgccatcggctcattgctgctcggccttctcgtcttcttcgaaggcctgaatggctggaaaataccagtgtcaaactttctcgcgtcgctcttgtgcttcttcgtcggcctttctgctttgacgttctggttcgtcgttgcgtttgacgtattttaatcgacgaacggtacagaaattttcggatggggacggaacttattagctatgccggtttaggtaggagataatagccgtccctttcgcctcaatgtgtagaggcaatgttgaatccgatcatgtaaagcagaaggcggcaaacctaacatgattatcgacgaagataatatttttgatgatggcgaatcagggtccagtgagtttgatctcacgcagatagaagatgctggaatggaccctttgatgaccgccgcgagcaaggcggccgatgatgcgattgcgaggaacgaaacgcatcgcgcgcaaaaggcggcaagatacgccgaggcgtatgctgaaccagacttgaggaagcgagcgcggttgttgatgctcgaccaggcgttcgatcttccggtcagccgggtggtgaaagggccgttcgatgacttcatcacgaaatacagctcgacgtcagacagcaactacctcgcggtctatgatacgttgttctgtaagggcgacggaaccgtcccacacccgcacttcgacgagtttcgcggccggctggtggaccatcgcggcgtggcgttcaacaacaagaccctcgatccgattgacctgatgggcgccctcgcggctgcggccttggacgatccctcgattaagaagacgattgagacttgctgcgtttgggcgcgtcgatatcgccgcaactcgctgatcgagacgtttgagaagaagataccggattgggacggcgaagagcgaattagcacgttgctgatcgatcttttcaagccgttcgacaccgaattgaaccggatggtaagcaagtatttctggctgagcttgtactgccgcatcaactaccctggaatctcggcgccgatctcgttggcgttgattggtgggcaggatgcggggaaatcatatttcggcttgctgatctgtaaggagctgtccggtgggcgcgatctggctccagttcagctcgacctgagccgacacgaccagacgccgttcctgcgcaacatcaccggcaactcggttattgcgaacgtcggcgaaatgtccggcttcaaaaagggcgacatggaacgcatcaaagaattcctggtgcgatcttcggatacattcgaccagaagtttgagccgggcgaaacgatcaagcggcaatggatcaccatcatggacggcaacggatacgatggactccagcgggacgactccggcaaccgtcgattctatccgatgttcgtggcacaacttcccgacgaagatggaaagccgaactgggttaagccgggcgatggtaatgaaccgttcaaggtggacttcaccgacttcggccgcaaattctggcaagcgatggctgaatgccgcgcatggatcgaagagcatggtgtcgatggatacctggatatggtgtcggaagcgaaccgcgaagtgcagaagttctctatttcggaaatggagaatgcgcgtggcgtggttcgtgatgacacgattgatatgtatctgatcaacgtgctgatcagttgcgagttcgaagagatcaagcctggcaggaattcaaagaatcctggatggagagtcaacaccatcgaaatcctgaaatggttcgatattctcgccaggaagaagccgatttctcgccacttaactccgcacctgaaggcgctaggatttgttccgaataagaatggcttgaatggatggtgcctgcctgtagataaggttgcacctggatgggcgaatgacatgcacacgacgctgccgccgttcaatgatgcgcttgtgtacttgctgaggaaggtggattctgaggtgactgatgaagaggcaatgattcaaatccgcaaagttaaggccgagcgcgcaaggatattgggcgaggatttctgatgtagtgatggagtgtacttggactaggccgccttcgggcggtcttttctttggtacggagtacattcgatttcggttgtggccgagtgagattcggaagctatctggtaattagggtttggtggcgatggcgcgttgtggaaagttcgtggacggtggatcgaggattttgtgtggtgattggatgaattgtggaaaatcgacgattctgactggattttttgggtcggccgcgtcgagcttaccggtaatttacgaaaccggtaattagggcctagccttagtgccgcgtgggtttgaagggcttaaccggatactttccggtttcggatgcagccgcaaaagtatactacagcgaaaatcgattgcacaatcctaatagaaaaaatctatcacggacgttacctatctttaaaattaataaaattaatagtaatttggtaatttggtatactttggtatttgaaagcctcgcggcactaagcttgtacatatcccgtgaagtttccgattccagccagctcgcggcagggtcgccggaaacttccggacttccaatccatgggtcgcggcaacaccacggcggactaagcggcaagtgccaaaactcgacgaacggaaccggaaatttgggagcgcgacagaatcgctcagctggacatatttctaacattcgatttaacactcaatccaaacactcaccccatcgtcgcccgccaaccgccgactcgatcctcatccaccagcggatcgcccgtataacatcctataacaccacctaacactcattcaccatcaaacccacccagacctacagcccacccacaagcagcccatagacgcgatccctggccccatagtacaatcgcgccatactcagtgtcgcgacagagcaccaggccccatccaccaaccgagccaccgcgacgactccagaatcgaactcagggacgcagcaccaaatgaccaaattctacagccccgacgatctagtcacgccacaggaattcgcagacccgcatttcgcggcgatcaaccaaaagcgattcgacctgtacatcgacctgcgcgtccaaggttacagctcctggcgggtcttccgggccatctggggcgaggagcatatggacggtcccgcgcaggcccgcatcttcgcgatggagtccaacccgtactatcgcaagcagttcaaggccaagttgaacgcgaccaaaacgtccgatttgtggaatccaaagacggcgctccacgaactcctccaaatggttcgtgaccccaccgtcaaggactccagccgtctgtcggccatcaaggaattgaacgttctggctgaaatcacgttcgtggacgagtcgggcaagaccaggatcggtcgcggcctggccgacttctacgcatcagaagccgaggctcagaccgccaccgtcgctgctgcggccgaagccaatggctatgtgccggaaggcgaagagggagatttcccgtctccgacgccggaaccgaccgaggaagaccgcgccaaccccatttagacatgaaataacggctaaggatttaaggtaaggaggtttatttatgcaccccttcgatcaagcggtcgtgaaggatccgaccgcgtcctacgtggacgtcaaggcgcggcggacgttcctgcagagcggccaactggacgatcgcctcaaggcggcgctgccgaaagaatatgactgcaccaccgaagcgacccccaatccgcagcaaggggaaatggtcatcccgcggcgctatctgtcggggaaccatggcccggtcaatccggattacgagccggtggtgaccctctaccgcgacttcgagaagatcagcgcgacgctgggcaacctctacgtggcgaccggcaaacccgtctatgccacctgcctgctgaatatgctcgacaaatgggccaaagcggatgccctgctcaattatgatccgaaaagccaaagctggtatcaggtcgagtggtcggcggcgaccgcggcgttcgccctgagcacgatgatggcggaacccaacgtcgacaccgcccaacgcgaacgggtcgtgaagtggctcaaccgggtcgcgcggcaccaaacgtcgttcccgggcggggacacgtcgtgctgcaacaatcacagctattggcgggggcaagaggcgacgatcatcggcgtgatctccaaagacgatgaactgttccgctgggggctcggccggtatgtccaagccatggggctgatcaacgaggatggcagcttcgtccatgaaatgacgcgccacgagcagtcgctccattatcaaaactatgccatgctccccctcacgatgatcgccgagaccgcgtcgcgccagggcatcgacctctatgcgtacaaggaaaacgggcgggacatccatagcgcccgcaaattcgtcttcgccgccgtgaaaaatccggacctgatcaaaaaatacgcctccgaaccgcaggatacgcgggcgttcaagcccgggcggggcgacctcaattggatcgaatatcaacgggcccgcttcgggttcgcggatgagctgggcttcatgaccgtgcccatcttcgatccgcggaccggcgggtcgggcacgctgctggcgtataaaccccaaggagcggcagcccaggcccccgtcagctgatgattattcgccagcttcgatgatttcgaagttgtatttgacgccttcgtgctcgaaagtcattttgccagccgccttcagctgcatgcggaatcggatgtgcttcgaagaaggcaggccgaactcgatgaatgctgcgttggtggaccggaactcgccgcgcttgcctttgacagtcacagccacgccatggcgctgagtgcgtttcttggaaacttccgggtctttccaggagttggcgatggctgccgacaggtctttggtctctttggccttctccggcgcgttcttggcctcttcgcgcatcttccggatttcttccagcgcttcctcttcggtgatctcttcttcaggcttcagattctcttcctcggccttctcttcttccttcttcttggaagtgcgggttttgtagactttggccggggcttcctcttcctgaaaggcttcttcctcggccggcagagcattcaggatggcgaggcagcgacgctcagcagtcttgcggtcggagaagcgcttgacagtcgcatcggcgttgtgagcgttgtagaaggcgaccagttctttcatttctgcgttctggatgtcgccgaaggttttgatggagttggtcatcttgcgatcctctgttttggaagatttcgttcgggcttcggtttgtcgccccgttgaaagagattatgcctaggtcgattctgcgtgtctacatttatttcatcagattgatcgcaaagccgacgaacggttgtctgatgtgaaaacaccgcagagcaggctgcggtgtttgttggcgagggcgatggtcaagcgaacggatcgcccagcatatcttcagacggggcacgttgcatatcgcccagcttgtcttcgtcagttgccgggctggacgggatcgcgccggaccgaagcgacagagattccgactgcctgctcacctgcggagccggaggagcttttggcgcagtaggggcaggcgggaccggcaggcctggaggagccatcggcgccatgggcggttctggaagatcaggaagactcggcgctatgccgccaaaggaccgctgcgactgctgcgccggattgtcgccgaacatttcggcggatcggttgtccttgatgacttgacctatggccgtcttgtcgccgcccggctctgccggatcgaagcccgtgaatggagtggtaacgcagcgcatgttcggatgggtaggcagatttttcaggactatggagtctgcccagacatacggattcttgtggttgccgggtccgtggctgatgatctcggcaggaatgtggccgttcatggtgagccattccgccatcccctgccgggtcagcgggcttactacgatctggccagtggactcttcggcgacggcgaacagatcaccgagcttgaatccgatgatcatatagttggacctggactcgccgacgaaagccagggtttcgatgttgtggtggatatcttgatcttcccagatgtacagcatggtgtcactcctctttggcgaaattgttctttcgaaggtagtaggcgatcttcagtcgtggccagaacggcgtcagtgccacgttgtcgtgacggatgatcgcaaagtggtccgttccttccaaccctgcgatgaagcagcgttcccaggcgctcccgctgtagcgatcatctggcttccagacgttcatgcctgagcttagttcgctcgactcccatttatgatcgatcttgacgttcctcatggctccctcaataaggctgcttgttgtgctcgaccagagacataccggccggaactttgaagcggacgtattcgatcatcatcgccgttcgacgccgattcgtgccagactcgtcattaacgaagagttcgcactgatgcgggatgactcgcgtcaccaggtcttcgcctttcgaaccgtagaactttatgtaggctgcgacgcctcgcgtcatgttcagatggaccgtttcgcagagtcgctgtgcggccgacgcgctggacagatcggtcggactgaccgtcacccagtaatggccactttgttctttatcggacatcaactgccctccaatgagaaagcctctgccgagtcgcagaggctggttgttgttagtcgcgcttcaacagaacgactttgtcgtatgcgcgatatttaccgcgccagtcttcccagtagtcgccggccgggcaggtaagctccagggtgatttcgtcgcgccagcattcgacggaaaggacaattgccttgttcctggttgcggaatccgctctgagcttaatcaggatttcgtcgcccgttttcagctcatcaactctcacaactttggccatgacacaatcctgtttgaagaggcgcggccggaaccaacccagccgcgccgatggattaacgtttgtgaaggatggacacggtgtccacgtcgaggatgctgatggtacggcgacggcgcggattgctgcgttcatggatgcgaatcaggttcgcaactggagcttcgtccaccacccatacatcttcctgcttctgcgtccggagcaggaccgttacttctgtgttctgggcgaggccgttgcagatgaaagtgaacttggacgagggagttctgtacatttcgagattcctttttggacttcggggtccgacttctcagccggtgaagagattatgcctgatcatcaccatcgagtaaagcacttgtgtaccaattctccagttaaatggaaccaaagcgcggtatcgctgatcgctacgcttccacgccatggtccttcttgcttacagacttcgaaccacaagctgatttccattctggccaggactcggccgaaggattcgagccggcgccggctagccaggatgtcgacattcacccgccgattgatttcgtatcggcgaccgttgatgacgaagaccaggcgcagggtgcgtccgtccagacattcccagtatctggtttcataccgaagccagtagcgcttaccagccgggcctaccatggtcatttaatcgatgctcctggacgcgccacgcggtccgttcggcgggacgggatcgaaccgccccaggatatagtcgggccggcgcgcttcctgaggacacacggcgagaaggcgccatcctgcgtccagggcgtactggagttcgtccgtgcagcagtcttccttgagcagcagacggttgatgctctggagattcggaccagggatagcagagcctgtgaccgagttccagccttcgataccgtgcaccatctgcggctggttgatgtagccttcggacctgccagccaaccggctcgcggccagctccaggcgctccagcatgggtcgcagagcggcttccgggtcaacatcgtcccagagcaggaccaggttgatgatggtgtacggatagtccttgtccaggtcccaggccgaagcggtcagacggcccaggccgatttcattacacatcacaggaacgtcgttgctccaggtggacggctcccagttccgctcgccaggattcccgattgttacgccttccaggttccccaggagaatgtggagcttgctgacatattccgcctccagcgctttccgctcttcgtcggtctggttgtggcgatagaaggatggagggctgacttttgcatggtagagtttcatggcggttcctcggttttggaagatttgaaagttagagaatggtgtcgcagtatttctcgaaaggactctggcgcttcttctcgcagatcgcgcaggtgatttccaggtcgggcagctcgctgtaagtcttgccgagatacagccagcgcttgcacagactgcggccgtccgacgtgaagaagtggactttgcgagcattgccgggttgcgcccagccaccttgatcgtttttgcgcttgctcatggcgatatttcctttggatctggaatccatgccgtccgttcgctcacccaaactccgtctacatagatcaggactgacagagcagtcgcgccaaacccgaagcctacatagaatgaaccgggatcgatttccatggtggcgctattggtggcgctattgaaatcgacttcaaagttgaacatcgaatggccactcataccatcaccatgtcgatttcattgatgaagaaatgaacatcgacaccatcggcgcgaccggtgtaacgcagccgagtcgtcccatcaatgtgggcttcctcgacgccgatgacttccaggatggtgtcgttgcagtaaagcttgacgaacatcttgatgccggagccaatcgccgcgaaggcgatctgcttgtacaggtcttgcttgatcacgctttgcgctcctgtttgcggatgtattctgccctggcttcggcttcgaacttcgcccaaagcgcgttgtcgactggaccccagggaccggtctgagtcccgtccaccggcgcgaacttgccaccggcgcgacgatacttggacagagttctcaggctgatgattttctcttcttgggaatcgagttggacgatcacttgacatacttcccgaagtagcaggtgtggagtatttccatacccttggagatagccttcagcttgataccgaaattcttgatcgcccagtccagatcgtggtgatagaactcgatgatgttgacgatttggccggcgctgtagtggatgacgcgaaccttgccgttccagcggaaatcttcgcggctgtttacggcctcgacttcgatggtgtcgtttctgccgatggtccatttggagctagtcatgtcgcaatcctctttttggagtgtttcgcgtttcgatgaggtaactatacctcagtcacctcatcgagtaaagcacttttgaacagattatctgaaatttctggaagacagatccatcggctgattcagtcaatcaatcggcggaaccgagacgccacccgttgcgggcgaaggccgagcgaccagacagcttgcgacactggatggagctaccatcgtcgaaggtgtaagatacggcccagtccaggcgctcgcgacgtactgccgcggcagcgatatcttccagacgggctttgagaagttgttctgctttggtcatttcaagttcctctttggagcgcttctggcatcgatgagatgactatacctaagtcatctcatcgagtaaagcacttctgaggaattatctgaaatttctggaggccaggaattgtcgccagagccagtcaacgtgatcgttgagatagcgctcgccatcggacgacagagccaggcagccgtcctttatgccgagcttggagccggcaatccattcgaactcgaactggagcgttcctgggcgaggggtatgggacatgatgtacttttgcacgatcaggaatcctcgaaaggtttggcgttcgcgatggccgcgattttctgcatgccgatgcgatagaattcggcctcttccctggccttggccagctgctccctggcttcgcacgccagcttgtgctgattgttggcgttctggatgcttccgtccagactcctgtccagttcttcccgaagagccttctgcgacgccagctctgcctccaaatcctggattctgagctggagctggcgattcgtctcggcaagcttgttttcgtgagcaatggagttctgaaggcattcatccagatgagctttttcgagcttcagctggttttcgcgatccgcgtacgcagtaagacatttggtcagacgagcctgttctttcacaagatcgactttgcggagcttggccctggccagagctttgcgaagtgactccagctcaagcgggtgaagatcagcatccgggtcttcacgctcttccttcggctccatccgcaggtagtattggccggcagcgaaggccaatagggcacggtcggaattctctacggaagcggccatgaagtgggaattataacgaggcagaaacttgcccgcctctgggtcccagcacaggctatccgccataggccagaatttccggaagttatctgcgttcacgcccaccttgaccgtttccggcgcacctgaatccgtcgccacttccaggttcaggtgaatggtgccggtgatgtactggaagtacactatgctagacataacacaaactccatgagaagtcgcggccgggaccatcctggccgcgcatcgtgattactcttcgccttcgtccgcgctcagccactcttcgaaggcgaaattcactttcgactcgacccaatcctgcagctcatcggcgaactcgtcactgtcgatatccatcggaacgcccagagtttcttcattccacaattcagcattcagctcgaactggaccatttgctcgccatcgacttccatcaggatgcggtctgcgacttcatagtcgtctacatcgaacagatggccgccagtcaggaggtgctggacgaaagcttcatcgagattggtgacttcgatctggacttgtttggtcattttccgtctccttacttagcggctttgaattgggctttgaggttggccagttcagctttcagatcgatcatcgcctgaccgcgcaggccttccatttcggcctcgctgattgcgatcttggctgcgcggattttgtcgttgatttgatctttagtcatttcggcttccttttgtttgaagggtttcgcgtttcgatgaggagattatgccgacagtcagactggaagtaaagtgtctgatcgaagaaatttctgtacaccgacgaacggttgcgctcgaccgtctgctgcggtgtcgatatactcggcctattgcgaacaatggactgattaaatgttcaagctcaatcctgcactgcgagcggtctggcgaactcgtgcccgttacaaagtcatctatggcggccgggcgtcttcgaagtcgcacgacgctggcggtatagccgttttcctcgcggccaactacaagctcaaattcctctgtgctcgccagttccagaaccgcatcagcgaatctgtctacacattgatcaaagacaagatcgaaaactcagagtataatggcgaattcatcttcaccaagaactccatcaagcacaagattaccggctcagagttcctgttttatgggatcgcccgtaacctgtcggaaatcaagtccaccgaaggcatcgacattctctggcttgaggaagctcactacctgacacaggagcagtgggaagttatcgagccgaccatccggaaagagaactctgaaatctggatcatcttcaaccctaacgaagtcaccgatttcgtatatcagaacttcgtggtcaaaccaccgaaagactcctgcgtcaagatgatcaactggaacgaaaatccgttcctaagcgagacgatgctcaaagtgattcacgaagcctatgaacgcgaccgggagcaggccgagcacatttatggcgggattccgaagactggaggcgacaaatccgtcatcaacctcaagttcattctcgcggccatcgacgcccacaagaaactcggctgggagccggccggatcgaagcgcatcggcttcgacgttgcggacgacggcgaggatgcgaacgccactacgctcatgcacggcaacgtcatcatggaagtggacgaatgggacggcctggaagatgaactgctcaaatcgtccagtcgcgtttacaacctggcgaagatgaaaggcgcatcggtcacttatgactccatcggcgtcggcgctcatgtcggttcgaagttcgccgagttgaacgatgccagcccagacttcaaactgatctatgacccattcaacgcgggcggcgctgtcgataagcctgatgacgtctatatgaagctgccgcacacgacgatcaagaacaaagaccacttcagcaacatcaaggcgcagaagtgggaagaagtcgcgacccgattcaggaagacttatgaagcggttgagcatggaaaggtttatccatttgacgaattgatttcgatcaactctgaaacgattcacccggacaaactaaatcaactgtgtatcgaactttcgtcaccgcgcaaagacctggacatgaacggccggttcaaagtcgagtccaagaaggatatgcgcgagaaacgcaagatcaagtcaccgaacatcgctgactcggtgattatgtcggccattctgccgatccggaagcccaaaggcttcttcgacttctaaacatagaaaagcccggatcgctccgggcttcgggtcttactcggtgcggttcctggcgctgagtgtcgacgcaacggcctcgccgactcccagggcttcctggccggccgcgagcgcttcggcttccgactcgacgatgaaatcatcaccttggccatcgcctggtggaacctcgaccagcacggcttcttcgccttcgaaccgcaggtcataggtcttttcgacggacagaccgtaacgagcgttgagcgcgtcccagagctgggcctcataggtccgcaggtcttgcagagctttctggtggctgagcatggccatgtcaacggcccgttgcagggtttcgtccaggacgttgaaccgaatgcgaagagaacgaatccgctcgacgacttccgcatccactacatgtctttcgatcattacttttcacctttgctgaatgtaacgttgtagccgttgtcggccaggtaggtcagggcgccttcgaaggaagttccgacgaggtgcttgagcttcatttcgcgttgcgcggccaaccagaatgcagttccggaaaactctgcgcggccttcggacaaaaccctgccatcaggcccggcgatccgtacatggacggaagatagcttgatcggcatcagtgaatacctccactggcttgcgacggcatgctttcggcgcgagcggcttcgcagtccgggcagggacaggcttggcggacgcgctccaactcgtcggcatccatgacatagagcttcccgtcggcagtgtcatgtgccatagcgatgttcgggaagtcggttgcgctcaggccggcgacagtgcggatttcgtcccagagcaccagatgctcggcattcagtcgggcggcgagcgcttcgtgctctttagcgacgcgcgccatgaactcgtccatacggaatgcgaattccgtatcgatggcacgggccgaggccatggagctgaggcgaatcggttctttcttcatgatgattctcttttggttggtggtggctaatgtccgtgcctattcaaggccggctcaatgcggcgaagaacaacacgatgaagaggagcgaaaagaatgcgaacgccagagatattccggaaatcagctttgctatgccctgcatctcagtcgccttggcagcgagtctggccttagcctcgataacttccggtcgtggcgactgaacatattctaaggcctcttcccgcgctttttcggcctcgaccaacctagggtcgcgggccgagacttcgctgtgccctggcctcgcgggatgggcttgcagcgatggagggagttcagccgccacgactccatagtctgcgcaggcccaagcgatcccgatgaggatcgcgaggatggattggacgattcgcagcatcactttgtcgctagggaagttcatgatcaatcctccaccgaccgaacgatttccatgttacgcccggcattggtccctgcattgaaggcgcgccgaccgtcgctatcgtccagacgcatgagcttggtgacattcgacttcttgtagccaggatcgccgaaatgttcgtgaaccgcagcttccttcaccacaaccagagacgttccggcagaagataccagctccatgcgcttcctggtgatggattgaaggcgatagctgatttcctgggtcgcggccagcttgaattgcgcggcaacctttacgttgaaacgttcgtacccttgagccttctgatactcccggcacagacgatcaatggcctcgaccagggagttgaacatgttcaccgccagctcaacgtccgacttgtagcctttaaagcgtacggcatgaccccagcgcttggtagtgcttccgtcgcgggcgctcctggatgccttagccgatgctctgtggttgttgatgccaccggcgaaatccatgatgcagtcattgtacgtcgccacggccactgagaaaaacttcatccagttcgggattgcggaatagtaacgagtcgcaatctgctcgtcgaactcttcacgaatctcgccggtcgcttcgaagccgtggaggtcatacttgtccttcagcttcttcacgcgctcggctgcgatggccgcttcgtgcgggctggaggagtcggctgccatggcggtcagtttgcggatgcggtctttcgccttctcgatggcttccggggtgaattcgttctggtcggtcatggtcggttccttttgtctgaagggtttcgcatttcaatggagctattctgccttcattcagaatggaagtaaagcactttcttccactatttcgtcatcgactggaagaaattccagatccaatcacctgctaccagcaagaggatgagggcggcaaagaacaagacagcggccgcgagctgtgcgcccggcttcagtttgggatggctgagcttgggctctacgggaacggccggagcgctagcgctgcaaccggcgtctcctgggccgtagccgatgccgcgttcacacgcctggagcgacaccagggatttaagatactcggtctgcttttgcgactcttcgtagatgccggcgacggcgaaccagagggcgaacactacggacgtacacacaacccaggcgccggtcagcaggagggccagcgggccgatgacgaagacggtagcagccaggacgattgcgccgccccagatgatgaagccggccagaccattagtgatgtcgacacagaactttttcattttcagattccttcggttacgggatggaggggatttgaaactctgcgccgccgagaacatcaatgacgacttcccagagcgtcggaacagaccactggtaacggtcgaagtcggtttcaggatcgacgcccagcgtcacataggaagtggcaggccatttatgaacactgcctttccgcatgagagtcgccacgcggccgtcaccgagcggattcgtcctgtgcggaacgtacgcagacatcgaatattgctgcccggcgtcgacaacaaatctttgcctctggcgcagacatacagagcccacaggattccagccgcgaccgccgcaagcctggcgagccgaagaatgctcataaccttcgtgagtcatttcgccgaggcaagccgagcgatcctcgtaatagttgatgttctccatcgatccaaccagcaccagagactcgaaatcgaatcgatgatcgtggatggccgagtgattgaagcaaagccgacgcggcagctccgggtgccaaacatggaggcgaccggccggaagttggacctgaatgaaccccaggccgtgcagagtgatcttgtccttcatcgggtcatggacggtgctcatggataatcctcagtagcagaaatgcattgtgagagttacgattgacaagccggtcgcccatagaagggcgaaccaggccatggctttgatggtcgtgtagatcatccgaagaattttccggcacagatcgggccaatgcccatttcgatggatgcgtggttggtcaactcgcgaccgcagcaggagcactgaccagtcttccgaccgtaggcgactgccgattccatcggcttttcgaacatcttcagaacgtcgtcgtgctcagtgtcggtgcagtcgcggctcttgatgaatttgccattggtgatccggccgaggtagatgtctcccaggacatacagactcccggcgttccgactgttagcgctagcctctttcacaacaacgatgagcggctcctcgccttcgccagccaggcggattttcgggcgcttgattccagactctttcgccttctcaaatgctttctcgataccagaaatgtccagagtcggcgcagcagcttcctgcgcggccactttctcgcgatacttggcgaagttttcgatggcgcgcttcgcagcagcgatctgattttctgtcaaggagccgtatttatacaacgactcctgaaggctctgagcgaagctgaaggaatttccagtccaccactcgacgatgtccgggtgcgcggcttcgaaggccttaattttgaggtcgcgctcttgcgcagcgctacagattttctcgatgcgcttttctgccgccttagcacggctcttggcgcgctgctccgggctggttttgtactctttgtatccgacgccgccgcaggcaaagcaggcgcgaccataagacgaagggccacggtacaggccggtgcctgcgcatttggtgcacttgtcgcgatacagcttcacttccttccgggagttcgggcgggcacccattgacacgtcttccagggtcttcggcgcttcgttgttgatctctacggtagcgaagtcatcacccaggtcttcgaagccggtgaacagattctctgctgcgttcatatcgattctcctgtttggaaagttcgtttcgatgggttgactatacgccagaaatggcaaaacggtagcactttcgcactaccgttcgtcgggtcgcagacgatcaataaatatcgctattgatcttgaatccatgctcagcgccgtcgttgtagtcatactcagcatagccgtcgcagtagtcgttcaaatgctgaatgatgccaagaacgtcgttcgcggctttgtgtcgtttcgcggcgatggtcttggcgatgctgtcgccgacttccagggtttcggccgtccggcgatggatcagcaggcgactccaaagatagagccggacgcgacgaataatgtcgcgatggcgctccagtcgtccgtgcaacttttcaatttcgtgctcgcgagattttaatactcgtcgaagccgttgaacttccaactccaaatcggccttagtagccatgttcacctcagaaaggaaaatcgtctgagactccaggaagctcgacgattattgttgagcctgatcggtctagaatgcatccgaccgagccagccctgtgtggatagggtctacacgaactataacaggtgacttccatgactattcgccaggtcgatcctccacaccatctgcaaattggcgggcgcttcgacttcagttttcgttcgtccaggacggcgcgtctgtcgcaggaaaggcagcgtgccttaaccgacgtaaccatgggtatagtcgatcattcggatgagctcatcatcctctgattctctcgacttcagaccgcccaaagagtccgactggccgtcgcatttcgcatcgatatccatcgaagacaggaatcctgccgatactgcggtgatatcaactttgtcgccggccttcttgaagccttcgcactcagcatcgagggccacaattgcactcgctgccatgttcacgtgactgatgaggtcggggaagatcacaggaacttcacgcgacatgccacggaccgtcagcttcaggactacatacttcatactcactatcccttttgtatgtgaggaaagaacttgctgttttccggatgatggaagcgctcggccgcaggcggtctttcttccggacattgaatcgtcgaaggagggaaaaccgcgccggcgataatcgccgcgaggagtgcagcggatgtcgacatccagagggcggtttccaggctcacccgaacttccggacggcgcggcttcattcgctccaccctcttcccggttcataggatggtagatcgccgccgcgaacccagttgtcccacatatggttcagaccagtcggtggctggggcggcggactgtagaatccgggagtctcagtgctgctcaggaaataaggcgtgcaaacggcctggacgaccaattggtgccgctcccacatcttatcaatcgctcttagcatgacgtcttcgcactgagccttactgtcgaaccgtctgctagtatggtccggcatctggacgcagccgtctccagtgcaaaggaaagcagtagcaatccatacggtgatactcgccatttcgtcaccctctttagttgatgagcagagtctattccatctgctcgccaggagtaaagcgcttttcgtcgggataaatgccgatgatgtctgcgtcgagcatccaaatctccacggacggatcgtcgctgctgatttggtacaggttgtacagctcccgtccgccgacagcgcgctcgcctcgcggctcaaccgccagaaccttgccgtgcccttctccgtgctcgtccatgtatatgacgtgatcgccgacttcatagctttctttcgtgacgaggcgtgaacgcgagctgttctgcgattccaccatccaggaatccagcacgccgcctttcatgtcgcgaaacaatcttgccgatttgtcgcaatcgaatacgcccagaacttcgccgtctttcaacacgatatgtacgattggcaaaagagtattcatgtttaatctccattggttgataattagagtctaatctgccgaaaagttcccgtaaagaattattttctcataactgattagttgcaactgttaatctgatgtatatgtttgaatctcttttgaacgtttgatgtttcccctataataagcgcacacagccaacaaccacgtggaactacaatgtttaaactttcctggatattcgggcgcaaaaaggataatgctgcctgttctgaatcggcgccggagaaagtcgcacaaatccctcaacacgatccgctcgaccccatgatcaagctgggaaggattcgcggctggaacgtcgagccggagaaagccccggtcattcgtagtgtgaaagatttcctggagccgggcctatctgtcgcaatggatagtgcgtatggtgatggaccaaccccggccgcgaaggctgctgcgggcggccagaatccctatgtcgtcccgactatgttgcaggactggtacaattcccaagggttcatcggataccaagcttgcgcaatcatttcccaacactggttggtggacaaagcttgttccatgtctggggaagacgcagcacggaacggatgggaactcaaatcggacggcaggaagctatccgatgaacaaagtgcgctgatcgcccggcgcgacatggagtttcgcgtcaaagacaacctcgtcgaactcaacagattcaagaacgttttcggcgttcgcatcgcgctgttcgttgtggagtctgacgatccggactactacgaaaaaccgttcaatccggatggaatcacgcccggctcctacaagggaatctcccagatcgatccatactgggcgatgccgcagctcactgccggctcgacggccgatccgtcttccgaacatttctatgagccggatttctggattatcagcgggaagaaatatcatcgcagccatctagtagtcgttcgcggaccgcagccgccagatatcctgaagcctacatacatcttcggcggtatcccgctcacccagagaatctatgagcgcgtgtatgcggcggaacggacggcgaacgaagccccgctgcttgccatgtcgaagcgaaccagcaccattcacgttgacgtggaaaaggccatcgcgaatgaagacgctttcaacgctcgcctggcgttctggatcgccaatcgcgataaccacggcgtgaaagtcttgggtactgatgaaagcatggagcagttcgacacgaaccttgccgacttcgacagcatcatcatgaaccaatatcagctggtcgctgccatcgccaagactccagctacgaagctcctcggcacttctccaaaaggattcaatgccactggtgagcacgaaacgatttcttatcacgaagaactggagtccattcaagagcacatattcgacccacttcttgaacgccactatttgcttctggcgaagtcggaagaaatcgatgtgcagctggaaatcgtctggaaccctgtggactccacgtccagccagcaacaagccgaattgaacaataagaaagccgcgaccgatgaaatctacatcaactctggcgttgtgtcgccggatgaagttcgcgagcgtctgcgcgacgatccgcgttccggctacaaccgactcaccgacgatcaggcagaaaccgaaccgggcatgtctccggaaaacctggccgaattcgagaaggccggtgcacagtcggccaaggcgaaaggcgaagccgagcgagccgaagcccaggcgggcgccgtagagggcgcaggcgccccggttcccgccgctccacgcgggactaagcctctcgcgaaagcggccgaggaaggggccagcgaggccgctgaaccgccgtcgcggccggaccccaaggccgagctgcggaacttgttggtcgatcttttgtcgaagctccaagacctggacgacattaaggcgccggacggcgtagacatagagcacaatgatgcgcctggcttaaagcgcacgtccaaacctggcgtgtctggcatggagccttcggtgttttcgtccaaccgcatcgtcgggcctcgtgatcattcggaactccagagaatcaaggttaatggaataaccaccttgatcgaaaatcctcgcggaagcattcggcaaggaaaggatgggagttggcgagttcagatgaaacaccactacggattcatcaagggaacgaaaggcgctgatggggatgaagtcgattgcttcgtcggtccgaatctgggatccaaacgggtcttcgtcgtcaaccaggtgaacaaggaaggtcagtttgacgagcacaagtgcatgctcggcttcaacaacatcaacgatgcgaagtctggatatctgtcctgcttccgcccaggttgggatggtctcggctccatccatgaagttgacctacccgctttccgtcgctggctggcgaacggcgacacaaccaaaccgtttggaggcgagtgatggcattcaaggcctccaaaaagcgcgaacgccgggcacctcttccggtcggaagagggaagcccataattccatcggcaggaatcgaggcctggtatcgaaagcagatgaaggatatttccaagctcatgatcgccgactatcgaagcgagattgagaaggcactgtcccagcctgcggccgaacggttcttcgccagcgacgaatccgttaacgccctgttcaagatgacccttcgaagcctacagcagcgatggaaccgcatttttgaaggcttcgcggccaagatcgccccggagtttgtcaaccggaccgaagaagcggccaccgccgcgaccctgcacagtttgtctttggccggcgtcgatcagccaagagctgcgtacaatgagagcgtcaggaataccctggaggcagcaactacttacaaccatactctcatcaccaggattcaagaggaagtccacgagaagatttacacatcagtaatgttgtctctgacttccccaaatccggaagagcaaggaacttccggcataacgaacgcacttcgcaaagtcgggaagttctctgaagatcgaatcgaactcatcgcaagagatcaaaccagcaagctttacagttcgctgagcgatgagagaatggcggaaaatggagtcgaggaattcgagtggatgcactcttctgccggcaagactcctcgccatacccacctggagaaagatgggaaaaggttcaagctgaatgaccccagactttgggagggtccgaaggccgaccaggggccgccaggatgggcgattaactgtaggtgcagaaagataccagtcatttgacatcgataggagcgctatatgccgttagttcatggcacttccaatgaggctcgttctgaaaacatcaagcgggaaatcgaagccggtaaagacccaaagcaggctgcggccatcgcttattccatccagcgcagtgagaaagggaagacggcgaaagattgttcgcctgagctcgtcgccgatcttcgcgccatggtggacgctctgtcgaggctcgtgaaatgaaccgcaagacgtgccggcgccgactcgtggtcgatgtaatcagggccaatattcacggcggattcttcagcctgaagtttgccgccatcgatttggcaatcatcggcgtcgccatcttgatgacttttggccgataatgctgagaaaatctggattctgactaaaaattctagtccggatagccgcaagttaccgtttacggaaaatagcagtaatttggaaagcctactgccgcgaggctttaacagagccagttcctaatttccgatttagccgcatgcttcaaaagtatatagcctgggaaattagaagtaacgttacaatagaattcatctataagtaacgttataatataacgtcaatctatatgctctagacgtattgaaattcaatttttaatcgggaaattggtaatttgaattagtttaggagttgaaagcctcgcggcagtaggcttggacaaatcccgtcaagtttccatggtcaaattactggattttcgcggctgaggggctggtaattagatcataatacaaattataatgtaagataacagtcgcggctacatctaattattgttccgcttatttacccttagatgtcctgcgtatataatacagccatagtccacgactcttcgaattaacgatgacaaagtcgaaaagaaaaattgacgaaaatggatatatgaccatcgagggctgcccgatcagctcttatggcgttttccagtattctgctggtcaactcggtcttccgggcgatccgacgcggattgtcaacgtatatcgcccggagtctgccgtcagcgatcctgagtacatcgaatctctgaagaatctcccgttgatcgacgagcacgaaatgctgtcgggattcgacgacgatgacgacagcgtggcccccgaagacaaaggggtggagggtatcatcacctccaacgcttactacgaagccccatgggctcgcggcgatatccgcatctattcccgcaacatgcagaatcagctggaaaggggcaaagaagacctgtccctaggctatagttgccgctacactgagcaacccggcatctggaacggaacgccttatgaagtcgtccaggacaagatgcgcggcaaccacatcgccctggtaaaagagggtcgtgtgccgggggccagagtattggatggtctgtgttttgaccatctcagttttgatttcagaccatccgatgagggtaatgaaatgagtctcaagaaagccaagcggaagccccctgtccagcgcgtagggcaagctgctgactcggcggtcgaagagttgcgcaccctgtggccgaaactctctgcgtctgtccagaagttcctgggcgaagaagagcaggagccggagcatcaggaaggcgccgctccggccgaaccgaccgacagcgagcacctgaccgagcatccgactctggaaggcgcccagaaggacgacgaagagcaggaagaggagccttccgttgtcgatccggccgtggccgccgtcgagccggagcatcaagaaagcgccgcatccgaaatgtccggtgaaggcgaagtcgccgaactgatctctcaggtcaaagccattctggctcgactggagggaacggtagccgaaggggcagacgaagagcatggcgaaggtcaagatgtcgtcgagggtttggaggagcagagcagcctcagcggctcgcaaaccgccagcgacgatggtggtgagagcaaggataacagcgaggaacttcctgaaatggcacagaagaacgcgcaagatgctgcaattcgcggtctctatcgcgacattgctgctaaagatcgcctctacaagcgtcttagctccgtggttggtgcgttcgatcaccgagctatggactcggctgaagtcgctgtttacggcgtgaaaaagctgaacatcagctgtgcgaagggccaggaagctctggcgctcgacatgtacctgaaaggcgtcgaagcctcgcgcggcgcggccagccgtcaatcgaaagcccaggattcggccggttctgctccgcagtgcgccgagctggacagctacctgaagggggagtaactcatgttccagaaacaagtttaccgccagtacactcctggttttccgggcgatctgatcgaggacggcccgaagcgggcgcggccgggtcgaatcatgtctctgtctgccgtaaatccggctgccaccgccaccggccccaaccgcatcagtcgcgctttcggttacgccggtgacgtcagcgccctcggcgaaggtcagccgaagaccatcgcggctcgcgcttctgaagtcgtgatcggcggcgccaacttctttggtgtcctcggtcatccgaagcactatgcgctgttcggttcggccggagactccctggctcccagctatgatctgcccgatggcgccgaaggcgagttcttcgacatggccaccggcctggtcgtcgaaattttcaacggcgccgcaaccgccctggacctggactatggtgacctggtcgcctatgtaccaaacaacctgcctaccgccgacaacgcgcttggcctgccggccggcgccctggttggcttcaaggctggctccatgccgaccggcttggtccagattcccaacgcacgcatcgttaacgccatcagtctgccggcccagtcggcggggaatctggttgctggcgttaccatcgtccagctcacgcagtaaggaggcgtcatgagccagatcagcaagacccattcgcgcctcgcaggccgcaatgcgaaacctttcgacctgaaaaacatcaccaatgacgccgtggcgtctctgcgccgcatcggcctggtattcgatcacgccgtcgtccaggaccagatcaaggccttggcgaaggccggcgcgttccgctccggctcggccatggacagcaacttcaccgccccggtgaccacgccgtccatcccgactcccatccagttcctgcagacctggttgccgggcttcgtgaaggtcatgaccgctgcacggaagatcgacgaaatcatcggcatcgataccgttggctcctgggaagatcaagaaatcgtccagggcatcgtggagccggccggcactgcggtggaatacggcgaccacaccaacatcccgctgaccagctggaacgccaacttcgaacgtcgcaccatcgttcgtggcgagctgggtatgatggtgggcaccctggaagagggtcgtgcctcggccatccggctgaacagcgccgaaaccaaacgccaacaggcggccatcggtctggaaatcttccgcaacgccatcggcttttatggctggcagagcggcctgggcaaccgcacctatggtttcctgaacgatcccaacctgccgccgttccagaccccgccgagccagggctggtccactgccgactgggcaggcatcatcggcgatatccgcgaggccgttcgccagctgcgtattcagagtcaagatcagatcgatccgaaggcggaaaagatcaccctggccctggccaccagcaaggtggactacctgtcggtcaccacgccatacggcatttcggtttctgactggatcgaacagacctatccgaaaatgcggatcgtgtctgctccggaactgtcaggcgtccagatgaaagcccaagagccggaagatgctctggtgctcttcgtcgaagacgtgaacgcggccgtcgatggaagcaccgatggcggcagcgtgttcagccagctggtacagagcaagttcatcaccctgggtgtcgaaaagcgggcgaagtcgtatgtggaagacttctccaacggcaccgctggtgcgctgtgtaagcgtccgtgggccgtggtgcgctacctcggcatctaaccgatgcctattcaccaaaggccgggtttccggcctttgttcactctgactctgactcggttgtaggggccggttagggcataattactaggactacgccaatgactgtttacatcgtttccgccatgactcaatccgtgtcttacaatgcgtatgacacctctgatccgtccaatcctcgccttcagcggaagattctgattcgtggccgcgccggcatcgcatcagaaacttccggcttcggcgacatgatttccgacgcggccgggcgtccgatctggaccccgcagggcgattgtactgccgtgagcgattcggatttcgagctgctccaggccaacaagattttcatgcgtcacatggataagggttatctgcgagtcgtgaagaccgacatcaccagtgaccaccagcggatttccaaagagactcgcaccatggagcgcgatggattccagcctctggacgctgctcgtctgcagcagaaaatcaaggtgactaccgccagcgcttcccaggaacaagagttccggatttaaccgagggtttcggtatggtgattttcgacgaacataagtttcgcacgctgtttccggagtttgctgatccagccgcttatccggacgtgcgcctgcagatgtatttcgacatcgcgtgcgaattcatttctgatcgcgattcgccataccggattctcaacggcaaagccctggaagcgtgcctgtatcttctgaccgcccacctcctgtcgctgtccacgatgcaagttcagggcgcggctggaggtggcgtcactgccggtgggacccagggcggtttcatcaccagcgccacggtcggcgaggtcagcgtggccaagctcgcgcccccggccaagaatggttggcagtggtggctttccgggacgccttatggtcaagagttgtgggcgctcctcagcgtcaaagcggtgggcggattctacatcggcggtcttccagagcgccgaggcttccggaaggttggagggacgttctggtgatccctggtgcgaatcttctgcgaatggccttcggggtcatcggtactcaaattgtgaaatatcgcaagtttgagcagcgagtgaagaatgatcaagctcagtacgtttccatgttcgaggagcctttcgacctggcagcgtctgttcagcgagtccgacgcgatcagtatgtccagtttaatctggagttccaacggaattacgttatgatcttcgccaactttgagatggttgacttggatcgcgatgtggccggtgaccagttcctctggaccggaagagtctttcagctggagtctcaaggctcctggttttatcaggacggctggggagtttgcctggccgtggatatcggtgcggccaagctcactgatgacgggaaaccgactttctaggtgatgtatgtttgacggcgaactgatagcgaaactggttgtcgagttgaatgcggcgatgacatctgctcaagaggctttgcagttcccggattttgaagtcgtccagaaagctcagccgacccaacagggaacgtcaaccaggccgaccatctttttccagaaactgtttgacattcctcgcggctggcctgccaccgattggcacctggacaacacggcccgcaaatatgtagaaataactcgacagcatgtagagacgactttccagatcagttcccttcattggcagaatcctgaaataactcacgtggttacggcttctgatatcgccaactatgtgagggcttatttccaagctcgatccacgattgagcgcgtaaaggaactggacttcctcattcttcgcgtgtctcaaatttccaacgaagcattcgagaacgacaatcaccagttcgaattccacccaagttttgacatggttgtaacttacaaccaatatattcgcctgtacgaaaacgcagcatattcggccgatggggtattaataggcatatgagtctgaggcgcgattcagagctaatcgccgcgcacctccagatgttaagagccatgcgcggcaggtccgtttcagccggatggtattccacggctcgatatcctgacaaggcaggcggatcggtcggaatacaagtcgcgagaatcgcacgtctcaatgagtacggcggaactatcgaccatccgggcgggaccaggtatattagggacgccattgttcggggccggtttgttggcgttcggttcgtcagaaacgactttccgggagaaaccgaggtaactaagcctcacagaattaccatcccggctagaccgtttatgcgatatgcttggaacttgttttccgcagatcgcgccgcaatccagaaccggatagccatgaggctggccagaggacagatcactccagatcaagctcttgcccagatcggcctggcgttggaaggatacatagccagaagcatcaggaccgggccatgggtggctaactcagcatctacggtcaggagaaagggattcaacagaccgctggtcgatacggcgcacatgcttcaatcgattagcagcagagtaacataaccaggagatcatccagtgatcagtcagagccgttatatccggatcatttcgggcgtaggcgcaggcgctccggtcgcaggccgaaagctgattctgcgcgtcatgactaccaacaacgtcattccgcctggaatcgtcatcgagttcgacaacgccagcgcagtcttgtcatacttcggcgcgcagtcggaagagtatcagcgggctgcggcttatttcaagttcatcagtaaaagcgtgaattcgccgtccagcatcagcttcgctcgctgggtaaacaccgccatcgcgccgatggttgttggtgacaatctgccgaagaccatcgccgatttcgccggcttctcagcaggggttctgaccatcatggtcggcgcggcagaacagaacatcaccgccatcgatacgtccgccgcgacttctatggacaacgtggcgtcgatcatccagaccgaaatccgcaagaacgccgacccgcagctggcccaggctaccgttacctggaatcagaacaccaaccagttcaccttggtcggcgccaccatcggcaccggcgtcctggccgtggcgaaatctgccgatccccaggacatgtccactgccctcggctggtccacctccaacgtcgtcaacgtcgccggccaagctgccgatcttcccgacgcggccgttgccaagagcaccaatgtcagtaacaacttcggttcgttcctgtttgccggcgcgtcgctcgacaatgaccagatcaaggccgtgtcggcctggaacgctgctcagaacaaccagttcatctacacggtcgcaacttccctggcgaacctcggcactcttttcaccttggtgaatggcaacgccgggaccgccctgaacgtgctgtcggcgactgctgccaacgacttcgtggagcagtgccccagcgagattctggccgccaccaactacgatgagccgggtgcttcgcaaaactacatgtactaccaattccctggccgcaacatcaccgtttccgacgataccgttgcgaacaccgtcgacaagagccggggcaactacatcggcgtcacccaggccaatggccagcaactcgcgttctaccagcgcggcattctgtgcggcggtccgaccgatgctgtggacatgaacgtctatgccaacgaaatctggctgaagtcggctatcgctcaagcgctcctggacttgttcctgaacgtcaatgcggttccggcgagcagcactggcgaggcgatgaccctggcggtgctgcagccggttctggacaaggcgaccgccaacggcacgttcacctacggcaaggaaatcagcgccgtccagcagcagtacatcacccaagtcaccggtgatcgccgcgcctggcgtcaagtccaaaccctgggttactggatcaacatcaccttctccagctataccaacagcaacacaggcttgaccgagtggaaggccaattacacgctgatctattcgaagggcgatgccatccgcttcgtcgaaggatcggatgtgatgatctaatggtttgcggcggactcgatccgccgcgaccttccataaatggagtgaggaataaacaatgatcaacatttctgcgttcggctcgatctgccagttcacggcaagcagaactttcccgaacggattcaccgtcaccgagtttgccgacgatgcggaccccatcgacagcccgccgttcactgcggccgataccggcgtcggcctcaacggtgacatggtagtctggaaccgggcgaacatcctggaagtcgtcgtcaacgtcatcccgaacaccgagggcgagcgcaacctggcagtcctgctggatgccaaccgcaccgggaaagacaagtcgggcgctcgtgatgtcgtcggtttggtcgtggcgatgccggacggcagcaaaatcacctgcaccaacggcacccccatcgacggcgttctgatcaacgcggtggcaagcgtcggccgtctgaagaccaagccgtatcggttccgattcgaaaaagtgatcaaagccggtactagctgatgaagaaaattccgctgacagcagtccccaaccaggcgatctcattcaacgccggtagcagctattggaagattcgcctgtaccagaacatggacatgatgaatgccgatatcagccgcgacggcgtgatcgtttgccatggggtccgctgcttcggcgggattcctcttctccaatacagccatcagtaccgacctgactatggaaatttcgtcttcgaccgcgacgccgattggacattgttcggcgacggcatcaacctgttctatctggacggcgccgaattcgccgagtatcaggcgcttgccacgaggaaagaatgagcacatcaacgatcagaaccgggacgaacaacgatatccttttggacgacaatggaaacatggttatcctcagggatgtcgaagcgtgcgcccaggacgttcgggcggcgatgctcatgcgcaccggcgaaaacattttcgatgtgaactccggtgtgggatatttcgaatacatcttctcgccgcagaaaagctatgatgacgctcgcaaatccatcgcggatgcaattttatcctcaccggatgtgaccggcatcgagcagcttgacatcgacataaccggggaagtcttcggcgtcgatgcgaaagttatcaccatccacgggcctgttaccacaggagtttgaaatgagtaccatccgcatccaatacgccaacggcacccaactgttcctggacggcaaaaatccgccgcccctggacccgctgccctcgtttaacccgtctgtcgaagatctggaaggcctggaccgcgaaaagaacaccgacaagggcgactcctcgccggccggtcttcccgttcccccggtaaacgtcgattccaatgtcgacaacggcggaaccatcccggctccggtatcgaccgacgctcctgcggccgaatcggccccggaaggcgcccaggaagctcctgcagcgggccaaggcgacgagaaaggcgccgaggaagccccgactaccgccccagtagaaaaggccgaggaaacggcctcgccggccgctgaagaggaagccccggctcccgccaaggccacctctcgcaaaaccaccagcaagtaaggactcgacatgatcaacgtcagcggcttcggcacaggaattgtaatagtttccgcctcatcgttcccgatggggttttccttgtcgaagttcgctgatgatgagagtccgatatcctccaaagagctggagccgttcggatatgagatgctttatgacggcggcctattcgcctttgacaaggctgctcctctggaagtatctgtatccgtcatcgcagggagcgaggatgatattaaccttcgcacccttctcaattccaaaaagggatcattcagatttcttccgggaattatcccggacatgacgactctcgtggctactcttcctgatggcggccgcaccgttctgtccaatgggaccatcctcaagggtccggccatcgacaccatacagaacaccggacggcgcaaaggcaacacgtacactttcgttttcggtagctatcttggcgcccagactgcgcgtcaagccatttctaacgttatccaatcggtactggaggtggtctgatgttagggattttcaccagcctcctaagttcgcgatctttttcgattgtggaccaaaacacaaaccagctagttgctgcggatttgaggataagccgggtcaacacccggttttcttctgtagggcaacgccacatgctggaagatggtacgaccaagatggattccagaacgatccaccctatggaaatcatcgtcgaagtattttgcccttcaattgatgtcgtcgatcagatcaatcaattgctcctggatcgcgacacgctgtacaaagtcatcactcgcggcatggtattcgaacggatgatgtgtaccagcgaagcgctcaatcagactccggatatgatatcggcgactcctgcgcggctgacattctcccaagttctcgtccagaatcccaagcctataatgttcagaaatgcaggggactcttctatgatcgaccgagggctggccctagctgaagacgtggttggctcggccggcgatctgttcgactacgcagtaaacggcgtccagaacgccgcagacttgttctgaggtgccaattgaactctttcctcaagtctattctcaacacgcctactctcaccatacgcgatgatgtcaccaaacttcctgtctggaagagtcttcaagtcaagaaagtggaaatttactcgccggcttccgtagtgtcgaaacctctggcgacgaaagaccagacggaagctcaagtgtacaccgaagctctggacattgatgtgaagaatggaaagatcatccaaccggtgcgactccgcatcaatgctatctgtccggacctgtccaccgttgaaagtatcatgaacgctttcaatgataacacctcgactttcgctatcacttctaagtcgatattggccgataaaatggccatcatgacgctcgatgtagatcagtcgccagacatgttgaacgcggctgagatcaatatggaattcgagcaggttgagcctccagtattgaatgaattcgatcctgcgttccctcaagatagtccgacttatggggtacagattcaatctctttctgatgctaatttgctggatttgggcgccatcggcgattcgatatcttcggccgcaaaatcgctatataatcgcgtgaccagctacttctgaggatgtatcatgcttgaaatcaatcttcccgatggccgtcaaactcgcgtacaaatcgaggcgtggtcggcattggatggctgggaactccagcgccgtttcgtcgaattcgctgtcagccaagattccgacttccgccgctctttcaccatggaaatcctgggctatgcgaaagtgctgcttggcgacgatgacgccggcattccgctgaccaccgcggcagtcatcaacaaccacctcggccactggaagaacgtggaactggttttcaactctgttctcaagcacaatggcatcgacccggccacgcacgccgaccggccggactattgggaacaagtcggatcgcagatggccatcgcatttctggccgaggcgtccaagctcattggtccagcaatgaagatcgccgaaggactcgccaacaagccggagtgattcatgtctagtgatttggatgaattcatacttcggtatgaggccgatactgccagagccgagcgcaatctggagcgcctccagaaccagatcaggcgcgtgaacagcgcatcgacgagtggccttcaggatttgcgccacttcgcagacggcgcggccaccgaactcggcagagtcgttccgcagattgattctgtgacgagcgcaattcgcggaatgaacgcgcaactggcaataggcgccactggcgtggccctggtcgcggccggcgtcaaggcgttcatgaacaccagggaccagtacaatcagcagcgcatccaggcgatggacatcggcatcgccccggcacgcttggaagagtaccagagaaaattcgttcgccagtccggtggaaccatcagccgcgagcagggcgcggagatgaccaaaaatctggcagacactttccggcgtgcttatcgcgatatcgggcgagtcggcccggaagcgcgaattctgcgtatggccggcgtcgatgtcgggagcttccaaaagggcatgcggccgctcaacgacatcatcaccgatctggccacgaaaatggccaagctgaagccggacgaaatttctgcctacgctgatgcccttggcgtctcgcgagattacctgagcaccctggcgaagatcggcccggccatgggaaaagtcactgagatgacgactgcggaactccagtccagggtccagggcgagtccaacatccagaaattcaacgatgccctggcgaatctcaaccagacgttcactaccctggaaaaccgagtcggcgaaaagctcgcgcctgcgttcaccaagctgatcgaaatcatcgacaagatagtccaggctattcccaatgaagtggaaagcttcgcgaaggacaccaaatcccgttgggaagatggagtgctcgggaaggcgaccgttggcagtgatatcctatccctcctcagccccggcgccctgctcggtcgcctggcagcgtgggggactcgtcgcggcatggaagaatcagggctcatcgacaaggacaaggttcccggcgctcaaaccagcgaagacctggccaagaaacaagaagaccaggacaaggctactaagtccatgaaagagctagagaagctggctgaccagaccacgaagtctaccaatgattttgcggtggcgatcaacatgttcagtggcgcggtatcgtcgttcgcgaatgccgttgacgagcgccaagcttgggcagcctgggcgggggaaattggtcgggcggtcggcatgggaagcaccgcgccgacttcgcgggccaccggcgtctatccgcacgcgatctatgatcagtcgaagagtggcgcggccggacaagtcttcggcgagccaatcggcgcccagtctcttcgcaatcgcatgttctcgccgcagcgcaaggcagagccggtcaccgttccatcgtacatcaacgatatcatcaaagatgcttcgaagatgtacaacattcctgagctggacatcaagaaactcatatacaccgaaagccgattcaacgccagggccaccagcgaagccggagcgaaaggcctcatgcaactgatgccggaaatcgccaaggcgtatggtatcactgacgtatatgaccctcgccagaacatcctcggcggaacgcgcctactgcgtgaaaacctagatcgagcaaatggcgacatgcggttggccttgacatactatcatggcggactcgatccgaagaactggggcccaaggactcgcgcatatccgggtttggtaatgagcgctccaatcgagctgatggaagaggctcagcgcaagcagaaggctgcggccatgaccgtcgccaacgagacgttcgccccggaaggcggcgacatggacattcgtccctatgatggcgggcgactggaaaccccagaccagggcaagaaggaagatgagcgccgcgaagcccgtcgatatgacgacagggttgtgcgaccggaaattcgcatcatcgaccgcatgccagaccgcagcgacggcgaaatcctcaagatgtctaggcgtcaagaggccgaccgggcagactctggattccggaagttcccgaatcaggttcgcggcgagaccaagcagaacatccaggcccaactcactgccggagccatcgcgcaagtgatcggcgttaaccccaaccagatcatgcgccgcgaaatcagccgttctgacttgctattcggatacaaccaagccatcctgggcaagcagcaggagatcaaggccgccgcgaccgaagccaacaacgtattcctgtctccagccaagctcgccgaagccactgccaaggtgaacgccgcatcgcgagaaatggatattctcaggacgtacggcgagcaacttctgaagagcgctccagagcgcggccaggagctgaccatcggtcgaatcgatatgttggtcaacgttaccggcgcgaattctccggaagaggctcgcgagatattcagcaagcagactgcagaccagctgactacggcaatccaagatgcccaaaacgattccgcaactaagatactctactgatgaaaaagagaattctgcgagtaacattcaacatgccttatggacccgaagtcatccgagaggatttggatgttcgggtccggatcatgaaggctgcgttgcggattcagaaccgggcgactatggaaattttcggcctaaccactcagctgcgtgagtctcttctgtcacagttcaccgcgtggaagcaccggcaacgtcaagtcggcagggaagacgaattgatgatcaaagtgtcggtggaagccggctactctgaccaggggcgcgagcaagtttccagagtctttgtcggcgaagtggccattgtcgatatcatttcgccgccaccggacattggaatccgcatccagtgctacaccaggcaaatcgacaggacgaagaccattcgaaatatgccgcccgccaacacgacgttcgtcaagttcgtcgagtggggcgcgaacgaaatgggattgaacttcatctgcgataccagttacaacgatcaagttctgaagaatccgggccggtctatcactgtcgcgtcggcaatcctggcgtcgattcaggatatgtacatgccggacgtggccgcgttcgttgatgatgacatcttgatcgtgaaggatcgcgataaagtcattcgccctgatgaggtgaccaacgtcaattcgttcgttggaattccatcttggtctgaatggggcgttgaattccagtgtctgtttgagccatcgattcgcgtggctggaggcgtggcggtcgaatcgctcatgaacccgagcgtcaatggcaactatgtaatcactgctctggaatacgatttggccagtcgggatcggccgttctatatcaaagtcatggggagcccagcagcataatggccagggaaatcaaaccgttcaacatgttcggcgttcactatacttcgcggcaattctctgctgccgatgggctcagcatgatgtcggaaattcagagtgtgccgccagaagaactgctcaagggaaccagtgtattggcgcatccggaagatcatccggaaggcatctggcttcccttgaccgctgcgaacatcaatctttatgtagttgatcgggcgaaagtaatagctcccgtacaagttcttgcacttctgtccgaagtggtaattgactggaactttggtttcctcaaagactggaccggagtcaagattccatccagatttgtcgaagatatcaaaagcgtgaagacggcacattcgccttctgtagttgcgagtttggtagcgaacggctcagcctctatgcgcgagttggaagagtattattcgactcaagatgcatttaagatgatagacatcatgacggcgaagagcgtgaacgaggccttggcgtcagaggcatcgcacaacagaatcaaaaagggataattcctaaccgggcctgggaaggctatactagacctgccaaatcagaggctttcccatgtccaatatttctctaacatcagcaaaagctcccgacagaacgcgactgatcgccgctcttgacgctcggtcgcgacgggatgctctagatttcgaagtaatgataccggctcaggttgttcaatatgaccggaccgagaatatcgcgacgattcaacctctcatcacctgggttgacacggaacacaatgccgtccaaaggcaccagctggtggatattcctgtaatttccatgggggctggcggcttccacataagtttcccgattcagcaaggtgacataggctggatttatgcggccgaccgcgacacgtctcagttcctggagtcgttgtcaatgtcgaagccgaacaccggccgcatccataagttcgagcacggcctgttcatcccggacgtattccgtcgatacaccatcaattccgaagattcggccgctatggtcatacaatcgacttctggagcgaccagaatttcgattcgcggcgataacatcaagataactgcgccgtcgaacgttactgtggatactccgcaggcgaacttcaccggcaatgtgactatcgctaacaccctggtcgtaaacggcatcaacgtgaacaaccacggccacctcgaaaacaacccgcctgatgcccggacgaaaggcggcatggttgcttaaggagattttcatggcaagttttgatttttctgatttaacagcggggggggttgtaatggctaactacaactacatcgtcgatactggtgtgatagtcgcagataccgccgacgttctgagcgacgttgaggccgagttccgcgccgccctcggtgccaatatcaacttggccgcgagcactccgcagggatcgcttgtcgcggccgaggccatcgcccgttccagtgtcatgcggaatgaagcgcgaattgccaataccataaacccgaacgtttcattcggaacgttcctggacgcgatctgtgccttgatggggatcgagcgcggttctgatctgtcaaccttcggctatggagttcaagtcaccggccgcagccaaacccgcatttccaccgggtctagggtccagactccggccggcgcgatcttcacagtgatgagcgatgtcacgatccctgctggtggtgtcgcgaccatcgatatcaaatcgcaggagtatggcaacattcctctgccggtcgggaatctcatcatcatcgacggaacaattggatggtccggagcaaaagtcatcgcctccactcgcgtcgatccgggcagccgccaaatgagcgatgcagagttgaagaatgcccgcgttaatcgattggccatccaaggtcgcaactcgactatggccatcaaggcgtatgtgagcgccgttccaaacgtcacgtcggtgaacgtaatcgagaacaacaccggcgccgttcaagtggtgaatggagtctcgtttacccttccgtatgctgtttgggtctgcgtcgccggaaacccggataaacaagcagtcgccgatgcgttgtgggccgcccataacggcggaactccatgggactatggtgcgacgaacaacggcgtcccggtggacggtccgaatggcgttcctgtgcgcgatccggcgtccggtcgaaagtatgtcgtgaagtggaccactccaattatgtacgatggatatgttaacgtaacagtccagcaaggttcctcctctgtagctccggaagccattcagaacgcagtggtcaattacgcccaggggaaagtggaaggggaagaggggctggtggtgggcgcgagcctgtcggcattcgaagtcgccggcgccatcgctcgcgaaattcccggcatctacatcaaactctgccaggtcgcgtgcgtcgcggctggctcgccggctccggctccgggcgatttcacttcggaatacgtcatgagcgcattcggccaggctaccatttccgttggtaacgttcgggtgactttcgtatgactctgcctgcgtacaattcggacatccaacaagctctgaaatggctccataaccaggcgcctggaatcaccggcctgatccagagaaaggcgcaatggtatgacagattcagccgccaattctgggccaactgggagcgcgacgttttccacttgaaaactgccaacccgttcggccttatggtttggtgcatcatcctcggcacgccttcgaaagggttcggcctttatccaaaaaacagttcttgggcattcggtcggctacgccagaacttcatctatagcggtacacaagttccgccaccggcagacgcatcgcctggcggcaacttctacggtggcggcaatgccgaaattctcaacttggacgaaatcaggaaagtgcttcagctaagatatgtagcgctgatttctaacggctcgattgcatatgtcaatcgcatgcttcgttacatattcaatgatgatgagccatgggacgaggcgaccggtctgtacttctatctcatggactcaaccggcgagaatggccctgtggagaacttggcgatatatcggaaagattgggaaggtatggtgctgttgtccagttcgcccagagcgaaccacgtgctgacatcgacccctgccagcgacgccgattggccgggagtcgatccggccgcgagcggtattccggtaacggtcgaaacggcgtccgctacggccccggacggctccgctacggtgtgcaagcttactaagccggccgggagtaccgcttacgtctccgcgccgatagatgggccgctggggtccggtagcactgtaacgttctcgttcttcgcgaaagccggctccacccgtttcattgcaattcagtcggctgccgatttccccagtcgagccgatgccgttttcgacctggattccgggaacgtaatcagcgatcagatgctggacagcagcgtggtaagcgcccgaatgattcgtctggaaaatggctggtggcgttgcgttctcacgaccaagaccgtcagctcttcgttccgcgctgcttacgtcgctccggcagaaaccaacttcagctggattgattcgaattccagcgcggagattgacgtgcttatctggggcgctcagatcgaactgggtgatactccaactggatacttggaaactaccggggcgcccgtaaccatgaccgattatgttttgcagaacgcccagaccggaacagtcaagttcacacagccccttccgaccggagtagaagcgtattggactggagactggaaaggcgggactgcagcagaaccggccagattcgcagtcgggaatgggactcaggatacgtttactctgtcagaccccgcatacatcggcctacccaccagtggggcgttcaagctagaatacagggttggtccggcgcttaatctgtcgccgcaattgatcaacctcatgaatgaccgggcagttggtattatgccgacttgcgccggttgcgatgtcaaagtcattcaggagtaatgacgtgatcacacccgaactgatccccagtccgtttgccgctcagggcgataaagacccgattccacaaacctcctccactggcttcgcaaaccttcgcgacggctatacgccggactacgaaatcagcctggcgtcgaacaacccgcaggccaaagcggtcgagcggaagattcaaaaccaactcttcttcatcgctacccagaacgcacaggcgtggcagcgacaaatggcgccgccgtggtttcagggcatgcctggcggctacgaacagaatgcagaagtcgtgcgcgtcggaaatgacggcataatgcggcgctatcgttccatggtgaatgccaatgcgagcgaccctctcagcagcacgacttgggaagaacaacccgcatggtcggcgatgcgctccaacatcccgatgccggccggaggcccaggcctatcttctggcggagaagtcatcacgaccggccgcaacttcaacgacctgttaaatgggacgtgggagttcttctctgattcagtggttatcgcttctcagaatgcccccgtatatccggcttccgctggtgccgctgctggcatgttggaggcgaaatcttgggtgtccggagccaatacgttctgcgtccaacgctacactgatcgcgtcgggaacgtcgctgtgcgcgggcttaatgccggagcgtggaccaactggatgtatgcggtaaacgtcatggcccttcaacaaggtcgggtcacctatggagtcgcggccggatcggcgaacgcttacacgttgacgctagttccgcagctccaaggcggcctggtggatggcatgattcttcgggtcaagttcaacaccatgaacaccggcgcctccaccatcaacgtctccggactcggcgccaaagccatcgtcggcgcggccaacttccctctcaccggcggcgaacttggccaaggactcatcgctgagcttgtattcgacgcagcaggcgaccgctggagaatcctcgcaggcgcgccacgcatccaagttggcaacgccgatcaagattaccaggcccccagctggaaacaggtgaaggattacgtcgcgtcccaaaagctgactgaagtggactgggctgacgtcgtcaacaagccgaacgtcgctatccaagacactacgccgtggttcgccaatctggagttgtctgacgctcggcctttcatcgatttccacttcaacaacaaccgcgccaaagacttcgactatcgctttatctctgaagctgatgggtcgatggcgttctactctcgccaggggtcagctggtcctacccaggatatcctgttcagcaggtcgaatgttacattcctccagccgcgactggatgttgcgaaaaacctcgcgtacatcgcgaactctggccccctttggcagaacaccactgccgatcagcctggttggaaattcaccttcgcacaaggtgtggacgccaacaacaacgcggttatcgcagtcaataccaccaatccggacggctcctatcgctcacagatcatgcgatgggactgggcgtccacgaacgtcatattcaacaatcgtccgctctttgccggtcaatacactccttgggattctggaaactttgatccctccaccaagttgactgtgaatgccacgaaccaaatcgccggcccgaccgggattcggaatacaaacggcaacaccggcaacatgaacacatggggctccagttccacgacggcttcatacggaaacgctgctcttcaaatcttcgggaaaggtggtggcgagcctgccgcgctttatttcgacaactcccagacaggatggtatctggggatggacaaggatggacagctcaagcgggccggctggtcgctcggcaataacgcctacgtgattaccgacgaatccaacattcgtttccacgtgaattccatggctggcactcctgtttggggcggaaacgaattctgggggccgtggaactttaatccgaacaccaagctgaccatcaaagccggcacccaggaaactagcagcactgcgatattcagcggaactatgccattcgctccaatcgcatcgctgtccgattattctcaggcccctttgacggtttacaacgcgccaaccggtccgtctgcaaaaccggccgtcatcgcgttcattcgtcctggcaactggggcgcgttcttcggcatcgataccgacaacaagctgaaatggggcggcggatcgctcggcaacagttccagggaaatcgccgattccagcaacatcatgaatctttgggcggccaacccgaccgcgccgtcctggaacggccaaaccgtttggcgatccggaaactttgatccggcgacgaaagtggatttgaacgccgcgaacgccaccaacggcaacatggtcttcaaccgcatttctggaactggtagcggcatagcttcgtcaggtcgagttggcgccatcaacctgcagaatggggcgcattcggggcaagcggcagcagtcactttcgagcggggcggcagtatcttcgtcaacttcggcttggataccgacaacgttctcaaagtaggtggcggaaacctgggggcaaatgcctatccggtcatccacgccgggaactacaataactacatcaaccaggcgctggttcaggtgggtcttggcggagtcggttcctatggcatctttgcggttctggacaatgccgctccaaccgcgaccgttcgaccgggagtggttgtggacggttccattctcatctactcgtcttgcgccgcaaactacaatagcggtcaaaggcctgccggaacttggcgctgcatgggatatgtagtcaaccgggatgccaacactcctgactccgcgacccttttccagcgagtgacgtaaaatgaaatggacgcggatcagaaaccctcgttggctggatgaaacaaacatccacgccatggtgactttcgaggggatcggggaagttcctttcactgccaatccgcacgacgtggaggcccatggaagggccatccacgctgcgatcctgtccggggagcacggacctatcgccccggtagattcgacgcgggagaaggccttgcaggacgctatacgagcaagggaaaagcgggctatccttcgcgatacccgctggcccatagatcgtcacgacgagcagaggcggctgggtatcgaaaccactgacggacctgggctgatagcagctcttgtttcctggaggcagcagattcgcgattggaatagcggggatcggccgcgacttcccatggctctgaaaacgatgtttaaaaatcaggagtattgatgaaaatcacgaaggatattctgatcaccggaaccggttgcaccacggatcgggcgatcaagtggctggatgatgtccaggcggctatggacaagttccacatcgagtcgccgcgagccattgcggcctacctagccaacatcggcgtcgagtccggtggactggtgagtctggtggagaatctcaactacagcgcccaaggattggccaacacatggccgcgccggtacgcagtagacccgcgagtccgcccgtatgtcccgaatgctctggcgaatcgtctggcccgaaacccggttgccatcgccaacaacgtgtacgcggatcgcatgggcaatggatgcgagcaggatggcgatggttggaagtatcgcgggcgcggcttaatccagctgaccgggaagtcgaactattctctgttcgccgaagactccggcatggacgttctggagaagccggagcttctggaaactccggccggcgcgtcgatgtcttcggcctggttcttctggcgcaatcgctgcatccccatggcggaatccaacaacttctccatggtcgtgaaaaccatcaacggcgccgcgccgaacgatgcgaaccatggccagctccggatcaaccgttatatgaagaccatcgccgcgatcaatcaaggctcctgatattcgcccaaaagaaaaggccgcttattcagcggcctttttgctttccggctttgcctcttcaaccatcttgacttcaaccggcgcggcggactcttcctgagtgaccgaatccacatagttccctagtgaactcagaacgccgattaacagcgctcttactaccttgtccttgactgtctcgcctatgatcttggtcagaacggatattaactcttcccggagtctggggctgattcttggccgaaagcgcttgcgatgctctttgcgtttcatgtttagtcctctgtctgcggtcttctcctcaccccgataatggcttggggatgcgctgtgttaatcggaaggttcgggcgctattataactcgtcgaaaatgctcgcgcttaactgtttaacgatacgcaccgcgatattaaatcgccttctttctggccaaggaactctggcggccgggtccggtctaaggcctaatttgtcgacattaaaacgagaaaacccggatcgcctgtagggcaatgcgtccgggtttatttctatctagtgtacgctaggatcagtgacttccgccccacccgtccagccagcaatcgaagacggcgtgcctcggcttgtccttggcgccatgggagaagtgcttgaaccggatgacctggcccttgagatactccctgtcattccagcggcgctgtttctcgtcgtgggtcaggctggaggccgacacgttgaaagtgactccaggccacagacgttcgttgcggcagactaacgcaccgaccattccggacggcgacaggttttctgcgtggctggagcgggccgtgtggccaagttcattgatgaaagcttcattgttgttgtgcatcaactcttccacgtcgatgatctcagcttcatcgtagtcgtatcgcttgactttcacacagtgcccttccttggcagtcgagcgaccgaacttgtacagcccatcagcgcgcttgcccatggaaccttcgaatcccagcattgtgtggcggcgctcgacttcgctgaactgttcgatggaagtcaccagttcctgctcgaccaggtgaatcctctcatagccgaggcagtgacgaaggaagttcacgcgctcggccgccctggctaggcgatcttcggtcggtgcgcgaggatcggtgaaatcatcgaacacatggaaagaccagtccggctcaccgctgtggcggcgaagatcgccggacgacttctggaaaactttcgggtcgctgatgtcgccgcagaccagctcgccgtccaggccgttgaacagtttatcgctgaggtattcgtagatcgattgattgttctgccgcttgagttgacgagtcagcgcctcgccttcgaatacgaagcagcgaaatccatcgatcttcggcgagaaatacatcggcagttggccttccagcagcttcgggtcaaaattcgatgcgagcatgggtttcatacagttctccagaaaagaagcccggcgaaccgggctaaatggcggtaagccggctcagatggtttcgttggcgtggttcagttcggccatgatcgacgcatagcgctcgtccgactccttgatgaacacgccgtcgtacatgacgcctttgcgatccttgatggtgtcgtaggccgcagcgtagcaggcgagcatggtagtgtcgtgctcttccgtcacatcgaacagagtcatgacggccaataccaggctcttgatggctaatccatgatttccgcgtgccagcgcgccggccagatgtccgaggtgctgcaaatcgtcgccgtaggtgggatgaacttcgacagtctcgctgaagaccgatagatgatcgaacagattttcaccgagttgcgcggccatgatcgtggcaaccaccattacgtcgccgatgccgtctttcacctcgactggtttgttataaacccaggcttcgcaaacttctgcgaactcttcgaccaacttcaggaattgatccttggccgaagagcctttgatcaggttccggtcggaaccccatttaacaaccaggtcgtgaagttcgcgactcatgatttgttcgatattcattctttcgattccttttggatttgggattttactgcgttgattatggacgccgtgctctggcgcgatccatccttggtggtgccgaagtagaaggccattaccgacttcagctcggcgaaccaatagccgatgatggtgccgatggcgaccgaggatgttgggtccatcagagcctcgcggccgaatgtgaagattgcgatgatgatgagaatggagcctgtcagaagagcgaatgtaatcgccgggcgaacgaaatcgttctgctgcgccgcaagcctcctcgcagaatccctgtcggccgcctctgcggcgaactggctaagctcggcctggagctggttctgctcagactgaaggcgattttgttcggcttgaatcgcaagctcctggagacgaacgcgctcggcgctctggagttcggcgagacgcgctagagcttccggattcgcgtctagagcgctagcgaccgaggctgggtcggccttcgaccccagcgccgtcgcgacgatagcacccacggcggcgcctgcaggcccacccaggagcgaccccagagccggggcagccgcgccgatcttactacctatgtctttccagtccatttcgactcctcaaaagaaaggcgccattacagcgcctttctccggccggtgattcagaactcttcggcttcggtcgcatcgccgacgccaccggcgtcactgcgaggctgttcctgcttgctgtagtccaccttcacctcgccgccgacgaacgacttgtacaggtcggccgcagccttgaagtgatccgggttcttcaccaggccttccagctcgaactggacgccggaccagctacccttgtcgttcgacatgcctacggtggtcatgcggaccaggttggcgaaagtcggcggggtgcgcaggccctgcggggtctgaacctttttctgggacagcgcggtcatgagcttcttcgaggccttgatctgcgaagacgacagggagatcagagcctggccgaaatcgccggtgtccggatcgatgacgatgacgtaatgaccacgggtgtcggcgaagtagtcagacttcttgtcgctgaccgaaccgtcttcgttcggcgcgtacaggcgtccttcgacttccttcaccttggtcgggtctttcatcatttccttgaagtcttcgacgctgatggcgcccttgaaaccgccctcggcctcgcgaccggcccagcggatgaactcgcggcggtacgcggccggaatgatcagcaggccggtcttgccgtcgtaaatcttgccggtgacggtgttcaggaacatgccggccttcgcgccttcgatgtacttcgggtcatcttcatcgacctggggagacatcttctgcagaacctggatgaaggggatggcataggactcggcatcggcgccttcgaagcctgcgccgtcatacgatcccaaatccatgaagtcgggaacttcggtagttgcgacggcgccgccaccggtggcaactgctacggccttggtttcttcggttgcttcggaagtttcggttttcttaccagccatgttaggctccttgtttgtcgaatttcagttatcgctaactgtgggtttataataacggaagttgcaactaagtaaagcaaattacatattaagatttgctctttttcatcttcggtttcgtgatcttggcctctttgtattcgtgcacgccgatgaaatctggcagctcttcgcccttctccagatactcgcggccgaacgcctggagggtctggtaatggacatcgcggttgatggtggcgtcatagccggcttcgatgatggcctcggccgccttcttcgcatcttccatttcgccgcgaccgaactcggccagaaccttggtcttgatgatgccgtcgttgtctgtgtcttccagccacttccagaacttcgatttgttctcttccttgacggaaatgatggccttcggctcgactttgaccgtgcgaccgtccgccagagtagtggtcttttgaccaagctcctccaacagctccggaatggtgttgcgcttgagggttttcagctcctcttccttttcggccagcgccttttgaagatcgaggatttcgacgtccagctgcgaagccttgtccaccaggttcagcagtcgatggccgatgtcggtagcttcgaccgccatttcatccatgacgccaaaatagtcgatttcgcccggtgcgttctctttcaggtattccgggatttcaagctcttgctctttcatgtccgcctccaacttagtgatgttcccttacttgaactaagtattgagtagatattatgccgcatcttccttgatacggctactgatttacatattaaatttcgtcgcgagtgctaacgtcagcctcaaacactccatcaacgacataacttgccaggttgcgcttccactccaagctgacctggattttctcgtcgatggaatccagacagatcaggtcgaagtacaaaaccgagttgacggtgccgattcggtgatttcggtcttcggactgcatccgcaactcgttgtcttcgtcggtcgtgtagtaaatggccacgtctgcggcggtgagcgtgatcccgatccctgctgcggccgggttgcccaggaacacctggacgcgcttggcctggaaatcgtcgatcaatttttcccgctcggcctctttggtctcgccgtagtatgtgccaaacgaaattccttgggcctccagatacgccttgatctggtcgatttcctgaatgcgcatggcccagatgatgatggagcgctccgggtcttcctccagcagaccctccagaagatcagtaaacacggcgaatcgcgggttgtcttcgggcggcaggatcaccggctcgccatagacgttgatatagccggatgcaacttgcttgagcttcgaacgcgctgccgcagcatcgaaagatacgtccagcatgaagtcttcgttcttgagaacgaagtggtagtcttcttccacgcgctggtaaacttttcgttgctccggcgacatttcgaagtatatgcgcttgtacaccttgtccggcaggaatgggagtgcttccttcttcgtgacccggaaactgtgcggctcgatcagggaccgcagcttgtccaggttccggaataccgggcgcccacgctcgtctttttcgaccagttgcggcggcatggtttgcttcccttccagcttgcgcatgatagcgatcattcgaggatcgtcactgggaaccaaaacggaaaattcggccacgaacgcccgataggatttcgttccaagaattccatcgcgcaagaattggaactgcatgaacaaatcggtaggcgcccgcgttagaggagttccggaaaggatgcgacgggccacggccttctcacccagctttacgatctttttcgcacgcttggcttgcgggtttttgatcctcgtggactcgtcaacaattgcgcaaaccttgaaagtttcaaggaatcgcaagacttcatcatagccagcctggtgattgatggcgtcaacgttgatggcgaagacgcgaagaactttttcatctgcgaacgtctcggcatacagacgatccaagcgcgccctggcctttttggaagtcggtcggccgcgccaatccacgctcaaagtcttgatcgcgacgtgggtgggaatctcgcgcagaatccagttggtgtggacgcccttgggggcgacgatgagcagcgcgtccacgcgcccctgtaggaagaggcgaacggcatcggccaaagtcgtccaagtcttcccggtgccctgctccatcaggtatgcgaaattccgtttgttcagggacgcggccagggcattgaactggtgctgcatggcctcggtcttcatgcccttgacgggatatgttttggctttcatttgttctccaaatcggcgaggaactgaacaatgttatccagtccttctgcatagctcgcaatttccaccaagtcgcggctgttaagctcgaacaaatcgagcatgggattcagcagcagccaatcggtcccgatcttggccaggacgaagccccggccgccccagccgatccgttcccgaaggaaagggatttgcccaggctcgaaacatctggccattgggcaggtggaggcgcgtttcggccactcctccaacgccttgaactcgacccagaactggacacctcgacgattcaggcaaatcgaatcggacataccagaccgccgcgtctccagaaagtcgatcaggattcggccgagtgagcgttgcttaaacgcattcgccgctttcgtttcgcgatcattcatcgccttcgccctctttggaaactttctctgcttgcgctgccagctttgctttttcgcgttcggtcaaaatcctcttgacggccttcacgatgaacatatcgattccgctgagcttccagcctttgatgaggaaccaagagcctgtcggcgttccttcggcaatctgctttccgtattgcagatatttttcaggcctaattctgaaacgtatcggctgatcaaccgagtcgtcaacacacatgatgtcgaggaactgcgactggcccttgtacaccgggtttttcccttgatctgccctcttcttctggcgaatcggttcgttctcatcagacagaacttttttcaccatcttgacaatgaccaggccatcgtctccatcgcggatatcccgaatgttctggatggggtttccggaagttactccaaccaactccggattgtcataagcatgaccccagagcgtgtgagcttcgttcaaatctgcgaattgaacttcagaattcgacagactcgcggcgactttctcccaatcctgaagcgtcttcaggtgggttccggccagctctttatattgagctttcagctccctaagatcggcctttaactccttcagatcggccttcaacagtttttccagttctttgtcttggctgattttcgccgaaagaatctgggcttccagcgctgctacatcagcagccttgtcctcaacatcctgtgccgatatcgggcaattggccagggcgatcctcgcggccttgacgtcatcacgaaggcgcaggaacttctctgccttcgccgggccgaagcctttggcgttcatgatgccgccgatcaggcgcccgtccgccactacccagttaagttcggaatgctccgggtccagggccgtatattctacgccttccttggccaattcgcgaaggatggacacagtttgctggtcgtctttcgccgcccgaagacacgctgccgcgtattccaggcgatgataccgcttcatgtagcaggtccagtacgtcaccacagcgtagctgaccgagtgggagcggttgaatccccaggcgccgaatgtcaccatttcctgccacacacggtgagcatcgtccggggcgacgcctatggtcttggcaccctcgatgaacaattcccggcgcttgttgaagaactcttcaccctttcgcgcagacatggctttccggattgccgatgtctgctcccagtcgaactgtccgatgtccttgacgatggacatgatctgttcctgatataggaagacgccgtacgtccctgacagatattgctcgacctgcggaatggtataggtcacaggctcgcggccggccacgcgctcgatatacttggtggccataccagaagacaacggacccggacgggctagcgccgtgatgtggtcgatgttttcgaacgcggtgatattgatcgcgtttgcgaccgaacgaactgcctgcccttcgaactggaaaatgccggacattttgtcttcgttgagaacatccaggaccgccttgtcgttcaaaggcaagtcgtacaactcctgcgcagtcacacagttcgcgtcctggatgacgcccagagttcgaaggccgagcgcatcgatcttgaggagattcaaatattccgaatccggcttatcgagctgcgcgacgccttcagaagttaccgtacagaagtcgataacttcatcgttgcagaccaggatgcctgccgcgtgtacgccagagtgggatgggtgaatttcgaggtcgcccatgcaggcggacgcgatctcatacttttcgcggaagtcgcggccgggctgagttttctcgaaagtgtcctccaatccttttccatatcgttcgtccgccgacgtatattcaatgatcgagtttttgatgttgtctgtatcgtggaaggggatgccgaagcgctttccgacgtgagcgataaccgacgcggccttgagcgtgttgatgttgcccaacttcaccacgttccaagtgccatacttctgctggagatattcgaacactagatagcgatgggtatcggcgaagtcgatatctatatcgggaagatcggaccgggaaatgtcgataaagcgctggaagagaaggcgatgagggagcgggtcaacctcggtaat

SEQ ID NO: 40 - DNA, 66383 bp, synthetic construct
  source 1..66383: mol_type = other DNA
gccaaggagatagcagaccaaagagccggccgaagagccgcgagctgggccgaccagcatatgcttcttggcgaacgcgaccagatctgccacgaccaggaagtagctgtcgaaatctttcagctgaatctgcttgatctcttcttggaatcgatcctcatactcctgggtccattccttgatgtggccgcgactgagacggtaggcttgcccctcgcgagccagcgcgacgatatccccatccaggtggatcataggcgccttcgccagtttcacatccgccaattgttcgactaccgcacgagtattggcggcggcggcatcgaactcttcgcgagtcatgatgtggcgtaaacggctccacaactcctcttcggtggcgatgtggcgaaggccgaccgattcccgcaccttccaggccgacgcgaaatcagcatggtcgatggacggcatgtcgttgtaagaggtaattaccaccggctttccgaatgccctggccgtctccatagcgccgtgcgcggcgaccatcgacgcgggattgatgtcaatgtagtcgattccggccagatccagatgggcataggcctcgccagcgaatttgatgacgccgtcagcttcctggaattcttgcggagtcaatccttgattctggaccgacttggaagtcaagcggtagaacttctttgtgtccttggcgagcacccaggctttgagcttcagctctttctcgccatcgtcggcgcatttgatcgggatttccatgccgaatccgcgaggcagttctgccttggtagcggcttgctcccaacggacgtggccccatgttccatcatcgacgatggcgacgaatggggattcgatctctttggcgcgctcgatgatctccgggaatcgaccatatgcggcgccgtaggagtaaccagagcgaacgcggagctgagggaaagacatcatgcggcctccattgcttgatacgcccgatacactcccatgcgcttgcagacttcgtggagcagccgcacgtcgtcgagcgcccggtgtttctgtacatatgggccgcagtagtgctcataaagatgttgcagccgcatgcggtggccgaacaacggcgccgactcttccacagtacagatatcgagcgatgggaaattgacttcgtccaggccgaacttgccgcgagccagatcgcaggtcagcatgaacttatcgaatggcaggttgtgggcaatattcgcgtcggctctggaaaagaagtcgcgaactttctggcgctgatcgaggaaagatgggtgcttgaccaggtcttcgttcttcaacccggtgatcttggtgatgatttcctcgataacgattccaggattgcagatgaactctacttcatccaaaatcttttcgccatcagttatcacgccggcgaattcgatgattctcggctgctttctcagactcaccctttggtggaacgggagtcctgtggtctcagtatcccatacagcgaatatcatgtttgttccctcttatgtcgaaaggccggctgctttcgcgaccggcctgaggagtataccgcgacggctgaagatttacgccttctgtccgtctttcggcgtgatgcggccggagcgcatggtggcgtgaacaaacgccgaatagttgatcgagtccaaggccgaatcggcatccttgaacccgctattcgccaggcgagtgagtttacccaccatgtgcatcacgaacagggcgagtcgatgatcatcggcggtcttcgccaccaggccgttcgggaagaggatttccatgatctttccgtacatcagatcattgcgaccataggtgctctggcgggcgcggaagacttctgctgcggcgtacagattgttgagaacatcttccgcgaaatcatctggatgggaatcatcttcgcccggccagacggattccatggcgaacggcgcggcgtcttcggtcgggtctttggactgagccgtttcagcgagcggagacggggctttcgcaaacgcctcgtcgagggtaggggcggagttcggggcggccgggaacggctcgcctgccatgtcgttgggcgcgctatcggggtcgctatcggccgcgacggcgaagaacggcgcatcgcaaccttccaggttcaggatgtaggagtcgatccccaggctattgtaggcatcgatgatgtcctggcgatcatcgaacgccgcgacgatcttggtgacgccttcgattttcttcaggatgtcgagcgcgactgcccgcttgaactgaggcgccggctcggtgttaccatacggccgcatgatgagttcatactcgcgatgttcggcgatgccgagttcgcggtggagcttggccctggtctggaaaaagtggttgtcggttcggccggtgacgaagaaaatcatgaggtcggcgtcgatggcattcctgatgcgacctacagcgtgcgggttgagagtgtccttgtcgagacgagaatgatactcgtcccattgccgttccaaggcgaagctcttgcggtggctatcgtcgaatacgcagccgtccagatcgaagatgatgatgccattcttgggtttgcgttccatattcagatttccttgatggttgctttctgggtgacggttttatcgatgaacgtcccatcagaagtgaggcggaaaacttcgccattctggctgaaatcgaacgattgcacgttcatcgtgatgcgaatggattcgctgccgttggtcacttcgacttgtgcgatgtcgccaactttctcgacaatgatcttcatgttacatggacttcccattaacggccacagggctggcctcttgtttttccgatccccagaaatcgcggcgcagttcttcctgctcggccgagcgatccatccaggggcgatagaacttgcactggtaaatcggctctaccggcaaattaaccacaggaatctgaccgggcttcgtctccagagcggacatgaagcggtcataggatttctgctggatttcctcttcattcatcaccttcgatccataacgcgggaaggcgcaggagccggtggcgacgcagtgcggctggagcaggctgtcgaacatcggatagacttccagcaccagccggcgcatttcgcggaacgcttcctgatattcaccctgggtccgaacgcacaggcgaaccttcgccatgtcgctgagagtccgcaggttgaacttggccgcgatcttcgtttccatgttggaagggatgatggcacgagcatcctgaagcgatgcgccggcctccaagagcttctggtaactggtctgcgcgtcggcgatggcatcgtgccacaggcggttcagctcttctcgggcgtgataggtcgggtccggctcgccattggccgtcgccggctcatcgaaatcccagcggaatgcttccggttgaactacggcgctcacctccagggcgcgactggtttcctgctggtaagccccggtgcgagtccgaacgagttgatgggtgaaattcttgctgacgccctcgatctggaaaatgaagtccacgaactcgaacggcgagcggatggtgtccagcatgtacttccagtggtcgagcttttcggcctcggtcatggtcgccgggtcttggccgcgcatgcgggtggacttcgtgcccaagagcaattcccaggcgttctgggtgtaactaatcagagaaatcttcatcagaaatcttccggaattggcgtgaagtggaatttttcggtgagagccagggccaggccttgggcttgctccctgttaaggccatactgctctatctcttccttgagcagttcgcaggcctccaggcgcgcctcatactcttcagcctcatggacggatgagaagacggctccatcagaggttcggtacacaagttcgatcgccatggtgacctcagtagcagcggatgatttcggcgcggatgtcgcgacggtcgaggtagtgctcacgaatcttgtcgcgggcacgctcggcctcttcgcggctgccgaacgacaggttgaacgacgtgaaaggcttatcatccagttcagcgccggtctgatacaggattcctaccagaacgaaagacggcgcggtcttcggctgctggtcggtttgcagttcgagaaaggacatagggagacctcttcaggatgatctggtgcgtacattaatagcgctcctgctgagcagctacggtttccggctcatagatgagcatgtcaacgatttccgggcactggcctttcacccagtcgatggccgcgaccagtgcggtggaagcggagaaagagaaagtgcggtaagactcatggatgtacggcgaccccatggaatcgcgctcggtggtgcgcgaaatgactgctttgatattaacgatccggcccatcttcggcctccactttagcgattatatcggacaggcttaacttctcgccattcaggaaataactggcgcgaaacttcctgtcgccctctggcccgacgattcgggccgttattgtgagactcccgccgccaagggcatcggtgtcccggaagaaagctagcagcgcccgcttgagcgctgcttcgcgaggatcgacggccattaacctaccacgttccagccgtgctgagcgcaccacacggcaccggtccctgcaggaagactattcagaaggaacacaggagtcaggcggccatcctcggtcatatggacgaagtagcgggcgccttcaccgagccactcggccttggcgatggcgcgttcgagattggccttggtggcgtaggtcttggtgtggttcttgtcggtggagaaggttacttcgcgggccatttgtcgattccttttggttgaagggtttcgcgtttcgatgagggaatattacgcccacctgatccagaagtaaagcacttttgtaaattacttcacgaacattttcttggccttctgataagacgaagaagtcatcaggcgctcgatgacgtccatgtcagaaaccagatcgtccagaaggacgttgcgccaggtagcgaaccggccgagcgagaagatgccggcttcatgggtgagattccagatcatggattcgcgctcgtcgcggccgagcggaacgattttgcctttggtctggatggtcggctcgccgtcctcgatgagatgccttttccttatgccgaaggccgcgcaaacgtaatccacatcccagtcgctgtcccattcgatggtttcgattttaccatctaaagtctccactatccccttagtgatggattcgacgatcagagtatcaccggtgatggacgctcgaaacgttcccactttaggaccagggaaatacacggtctggaagacatcacaggggatggaaagcttgtatcgactcacgatgatggaggttccttcaccgaatgacgggtcgattcccaggtccagccctgccgcagccagattggcgcggaacggcgcggtgctgatgatattcacgtggtcatcttgccggcgaagatactggaagaaagaggcgtcgaaaggacggctccaagtgatacgattcgcaagcttagccaccagctgctcatagtagtcggccggtgcgatccaacgcttttcagtcgccagattccagatggaccggtccgacaggccgcccgttactttcctggagtacatgttgcagtggtcgatgcgcggctgggaaatgaactcgccgtcgatgtagatagctttgtgtacagtgacttcgcggaacgggatgccggtgagttggccaatcactggcgagcggaatcgcagaagtgcgttgtggcgctccttattctccggcgtcgccgcgtcgatgatttgggcttgaggaaagcgatgcgcggcgatcagtccggcgagtccggcacctacgatgattactttctgatcaggaatcatgatgtgtcccttatgagtgtacaaaacttgagaggataaaaaagggacccattttcatgagtcccttgaagagctagacgattcaggctcagaggagcggcggcttactcctcctcaccttcggaaccatcggcgccctgatcttcaccgtcgtgctcctggccttcgtcatcggccttctcgtcatcgccctggccagcttcgtcttccttcgaagcgatggcaaccagatcgacccagcccatgatttccagcttgctcaggtagctgcgaaccgaagtgccatagagcagatgggccaacttctcgccgaaggattcgatttcgaccggctcaccaacggtgcagtgctcgttgatgtatgcgaacaccttgccgcgagtcgagaaggcctgcggagtgccatggccgtcgccggtcgggatgaagtgggtggcgcgcggacggcgggagccattggacttcaggtcttcgcggcgggcttcggccttcttgcggcgctcttcctgctcttccttgcggcgctgcttctcggcttcgcgctcagccttcttctgctcggccaggcgcttgcgctcttcttcgcgagcgactttctgagcttcctgggcggccttcttctcttcggcctttttggctcgctcggcttccttctcggccttcttctgctcgcgctcggcttccttggccttcgccttctcggcctgctcggcttccttcgccttggccttttcagcacgctcggcttctttggcggcggccttttccttcgccttctcggcgcgctcggcttccttcttctcgcgctcggccttgcgcttctcttcgcgctcggctttcttctgctcggcttccttggccttggcttcggccttctcggcgcgctcgcgctctttacgttggcgctcagcggccttctcggccttgcgcagggcagcggcttgttccttggtcagctcttcgccttgggtctgttcgttctggtccttctgttccatgttcttactccgggaatgtttaaagggatggcttattggcctgtgagaggattatctctaaactaattgaagaagggaatacccttagcctgaactttcctaaatattttctttcgggaaagtccaaactctagggaacttatttatgttcgagaagttcctagcttttacgcaagaacagtaagtattcgattgcgcgagttatcccagtatacatcaactgactataagggatggacggcaagttttcttccaacatggcgacccgtttccattccgatccctgcgacttatggaacgtcatcgcccagccgaagtcgaatccgccaatggccttctgcgcctccagccgcacatcttcctcgaccgaaaagctcaagggattgaacttcacccagcgctcatagttcgtgccgataatgcgaactttggcaaacagcatttcatccggctcgtcatcatcttcttggccttcggggaccggcttgaagtccagcagaattgcttgctcgccgttcatgatgccatattcgtgctggttcccggtgcacaccagcttctcgccgatttccggttgtacacccttgtagccgaggatgcggcgcgccctggcgttcaaacggcggcgagtattgttgtaggcgcaaaggatcacgccatcatcgtccaagaacgtccgcatttcgtcatccgacatgtcgaatccggcccgtaccagaatgtcgtcatactcgcggcagggtaggcgcttgccctggcggacgaacatcgacgctcgaacgatattgccggcgttgcgctcgatttcggtcatgatggtgtcacagctgttctcatggaaaatctggacgccgcgcacaggaggaacttggccaaagtcaccaatctccagaaccggaattcggtgcgacagcaagcgctcttcatcccactcgccgatcatggacgactcgtcgagcacgaccaacttcggcttctcgtcgagcgagtctttgttggcaaacatgatttcgccgtcttcatcttcgccaatcggccgatagatgaagctgtggagggtccgggcattggtgcaacccttctcgcgaagccgcgctgctgctttcccggttggcgcgacgaagaccgtccagtccatcgagcagcaaagttcggcgatgatcttcgcgatggaagtcttaccagttccggcgaaaccagcgagtcgatagacctggcggcggtgcgctcgatcacaccaaccgcgataccagtccacaacggaattgatcgcgtcgatctgctgactgtttggtcgaaagccgaatcgctcttcgatctgatcgacggtgaagttagatgctgacatatttgcgttctccaacgctaggtttaattgaatcgaggctcagtttaagcacgccgtccacagaccagccagtatcacgacgatacttgcggccttgcggatcgacatagaagttcttcgtgcgccgcagcagaacataatgccaagcagctccaagtgcgtggacccttcctttatacgggaaagccttcgcctgctctgcggcctctttggccccagggagccagcggacggtcgaaaggaccaggaccgcacccttaatagcctgggaagcggcgcggccgtcctgtgggctatagcgatgtctatcgaagtctacccagtggtggttgccgcgccggagcttgaccgttcgggatcgcccctcgaacaccaccgtgccttcatgagtaaaaatatgttccgccatcgaatgttcctttataacatacagttatgctttacctctgcgcaggaagagtatactatcagctgactcgccaaagcgagcgaatttaatccaactttacttcggcaggaaagtggccgatactagcgccgccgcctgtactgccctccaaaacagaggatacattaaatgcaagaatgcaagatttcccgcgaccaactcccggtcggtaatccgaatcccaatgtcgacaagacccgcgacccgaacctgaagcccggcttccttcgccgaagccgcgagctggacccggcgctggccgttcgcattcgtcgcgagctgatccacgccgaagcatccgacttggccaaggccggatgggtcaattcacagtccagcctttatggatcgaaagccttcccgcgccattccgtcgttcgcgtgaccggagttccggaagatggagctttcatcggcatgctgatcggcttcatcgagcatcgcgagcatggcgaatgggcggtcatggaagccggaacgaaagaaggcggcgccgtcatcatcccggtcgatcacatcatgcgagcgtcattcgccgaagccgaagagttcgccgaaaagtgggagcggaacttgggatggcgcctcctgcgccagctccgcgagtgcggcgccctggccgggactgaagacgagttcctgcggcggatcatcaatcgatacgttcgtgatcgcacgatcctcgaccaccacaaagtcggcgctgacaaaatctacactgatgcagtgctcaaaagcatcggcgaaacatggccgaagattccttcggggaaattcgtcggacaccgagtcgcgcaactcctgatcgaccacaagctaggtcgagcgggaaccattctgaatgacctggtggacttcctggagaagttcgcggccgggcgcgataaagttctcaacatcgccatctgtaattgaggtgaagggatgaacaataaaccgacgctgaatcaccaccatcaaactgcattgttgtatctgtataacaatccaaatcagccggccttcacaggtcccaacaatcaggcgctcaatgaacttcggcagatggggtatgtaaaggcgaaagaattcgaaaactgggcaggcaccggccatcttaggatggaatggacgctcaccaaagccgggattgagcgcgtcgaagtcgggcttctggggaagtgcgacgcttgcaagggaatcggtcagactttgcttcgggggaagtgtactgtttgcaatggccgcggccaggggtggatcagagaatggtcgcagaagccaatcgaagataatcctcaaattgtccctaagttcgaaaagaccgatgcgaatagacttgcagacgccattgaagaaatcggccggctggaaaaggcactggccgaatccgaaaagcgcgggagcgagctggccgcgagctattgtgacggcgtagtcggcgatgaatacggccatccttattgtcgttataaagtggaacgcgacgccgccttggccgaagtagagcgcctgcgagaatcaaaaggcgatccctctggcagcttcgacagttgtatgaagatgatgtacgagcgcgacgagaatgcaaaacgactcgacgccgccttggccagggtcgcggagctggaagggaagttgacggactgggtgcacgaagggttccggctcaacgaggcgctagcggtcgccaaggctcaacccagcgtgccggaggggtggaagctcgtaccgatggacccgacatcgcagatgacctctgtcggtcagtccctgcgttatgacgcggtaaacagcatcggcgagatttaccggcaaatgctcgccgtagctccctcacccatcgatccggccgcgcatcctcagccgtgccagcaaccacaggcccatcctgcccgctgcgggtgcgagcggtaagtgccaagcaaggagttcatgtaatggaacagcagaaaccttcgaaagtagatggagccatcgccatgaccgatctcgatattcgcattcttcgaaaggcgaagcccgaagcgcaggacgagtgcgccgtgtccatgttcgcaacggcgatccgccagaaactgcagcgctcccgcgataaaggccgaggcggctggatcgactgcgacgaagatgttctgatcaacggattcgccgaacatgcgctgaagggtaatgagaacaacctcttggacctggcgacgttcctgatgttcatgtgggtgcgcggcatcgacgatgcgaagattcccccggcgctcgaaaaggcgcggcagcacaagatcatggaagcatggagtcgggtccacgaagatggactaaactccgccagaaaggcgagtgctgcgcgacagttcgtggaagtgcctcgacgcaaggggcgcccggagcgacttgcatgaagcctcacgaaataagactggcacaggccgaagagttcctgcgcgaactcggccgagggattccggacgacgagagggtgatggtcggctacgctgaagaggccacagtccagaccgacgagaacggccgcaagctcaacgccggctggtggcctgtgccctggaaggaagggaaatacatcaactccagatccaacgcctacgcgtgcatctcgtcgtccatcaagacgcccaacccgaagaccggccagatgcgatactggcgcggcgaagcctctttcggccacggcctggcgttgatggtcgatgacatcggctcaggcaaagggtccaagggtgacttcgaccgcgacgagttccgcgagcgactggagccgaccgcgattgtggagacttcgccgaacaactaccagttctggtatttcttcaaagagccgatgtcccacatgctccagttcaaggcgctgctctattcgttcgtggaccaggtgctaaagaaaggcggcgacaacaccgtcaaggacgtcagccgttacggccggatgcccttcggcttcaacaacaagcgcgggaaagacggcaagttcaaatatgccgacgaaaacggcaagcccgaactcgtgcgactgttcagcgccgactattccaagcgctactcgccagaagagatcgcccaggcattcggcgtccgcatcatcatgccacagatgaagaaggtggagataaaccgcgacgattgggtgtatgaccaagtatggctgaagtatgccgagcacatctgcacgaaatacaagatgggcgaagcggcaggcggccaggtccagcagaatatgtccggcaaataccgcatccgctgtccctggggcgacgagcacaccaacggcgatcctttcggcgcatactttcgcggaccgatacctggcgccgagcacgaatatgtgttcggatgcgggcacgatacttgccgcaaagagcatcgacggacatgggcggccttcactgatgaagtcgtcctgccctatatcgtagaacaattggaacgcattaaccgccgtcacatcggcgaggagtagtaactatgcaaaatgatcctggaattctgattaccgccatcggctcattgctgctcggccttctcgtcttcttcgaaggcctgaatggctggaaaataccagtgtcaaactttctcgcgtcgctcttgtgcttcttcgtcggcctttctgctttgacgttctggttcgtcgttgcgtttgacgtattttaatcgacgaacggtacagaaattttcggatggggacggaacttattagctatgccggtttaggtaggagataatagccgtccctttcgcctcaatgtgtagaggcaatgttgaatccgatcatgtaaagcagaaggcggcaaacctaacatgattatcgacgaagataatatttttgatgatggcgaatcagggtccagtgagtttgatctcacgcagatagaagatgctggaatggaccctttgatgaccgccgcgagcaaggcggccgatgatgcgattgcgaggaacgaaacgcatcgcgcgcaaaaggcggcaagatacgccgaggcgtatgctgaaccagacttgaggaagcgagcgcggttgttgatgctcgaccaggcgttcgatcttccggtcagccgggtggtgaaagggccgttcgatgacttcatcacgaaatacagctcgacgtcagacagcaactacctcgcggtctatgatacgttgttctgtaagggcgacggaaccgtcccacacccgcacttcgacgagtttcgcggccggctggtggaccatcgcggcgtggcgttcaacaacaagaccctcgatccgattgacctgatgggcgccctcgcggctgcggccttggacgatccctcgattaagaagacgattgagacttgctgcgtttgggcgcgtcgatatcgccgcaactcgctgatcgagacgtttgagaagaagataccggattgggacggcgaagagcgaattagcacgttgctgatcgatcttttcaagccgttcgacaccgaattgaaccggatggtaagcaagtatttctggctgagcttgtactgccgcatcaactaccctggaatctcggcgccgatctcgttggcgttgattggtgggcaggatgcggggaaatcatatttcggcttgctgatctgtaaggagctgtccggtgggcgcgatctggctccagttcagctcgacctgagccgacacgaccagacgccgttcctgcgcaacatcaccggcaactcggttattgcgaacgtcggcgaaatgtccggcttcaaaaagggcgacatggaacgcatcaaagaattcctggtgcgatcttcggatacattcgaccagaagtttgagccgggcgaaacgatcaagcggcaatggatcaccatcatggacggcaacggatacgatggactccagcgggacgactccggcaaccgtcgattctatccgatgttcgtggcacaacttcccgacgaagatggaaagccgaactgggttaagccgggcgatggtaatgaaccgttcaaggtggacttcaccgacttcggccgcaaattctggcaagcgatggctgaatgccgcgcatggatcgaagagcatggtgtcgatggatacctggatatggtgtcggaagcgaaccgcgaagtgcagaagttctctatttcggaaatggagaatgcgcgtggcgtggttcgtgatgacacgattgatatgtatctgatcaacgtgctgatcagttgcgagttcgaagagatcaagcctggcaggaattcaaagaatcctggatggagagtcaacaccatcgaaatcctgaaatggttcgatattctcgccaggaagaagccgatttctcgccacttaactccgcacctgaaggcgctaggatttgttccgaataagaatggcttgaatggatggtgcctgcctgtagataaggttgcacctggatgggcgaatgacatgcacacgacgctgccgccgttcaatgatgcgcttgtgtacttgctgaggaaggtggattctgaggtgactgatgaagaggcaatgattcaaatccgcaaagttaaggccgagcgcgcaaggatattgggcgaggatttctgatgtagtgatggagtgtacttggactaggccgccttcgggcggtcttttctttggtacggagtacattcgatttcggttgtggccgagtgagattcggaagctatctggtaattagggtttggtggcgatggcgcgttgtggaaagttcgtggacggtggatcgaggattttgtgtggtgattggatgaattgtggaaaatcgacgattctgactggattttttgggtcggccgcgtcgagcttaccggtaatttacgaaaccggtaattagggcctagccttagtgccgcgtgggtttgaagggcttaaccggatactttccggtttcggatgcagccgcaaaagtatactacagcgaaaatcgattgcacaatcctaatagaaaaaatctatcacggacgttacctatctttaaaattaataaaattaatagtaatttggtaatttggtatactttggtatttgaaagcctcgcggcactaagcttgtacatatcccgtgaagtttccgattccagccagctcgcggcagggtcgccggaaacttccggacttccaatccatgggtcgcggcaacaccacggcggactaagcggcaagtgccaaaactcgacgaacggaaccggaaatttgggagcgcgacagaatcgctcagctggacatatttctaacattcgatttaacactcaatccaaacactcaccccatcgtcgcccgccaaccgccgactcgatcctcatccaccagcggatcgcccgtataacatcctataacaccacctaacactcattcaccatcaaacccacccagacctacagcccacccacaagcagcccatagacgcgatccctggccccatagtacaatcgcgccatactcagtgtcgcgacagagcaccaggccccatccaccaaccgagccaccgcgacgactccagaatcgaactcagggacgcagcaccaaatgaccaaattctacagccccgacgatctagtcacgccacaggaattcgcagacccgcatttcgcggcgatcaaccaaaagcgattcgacctgtacatcgacctgcgcgtccaaggttacagctcctggcgggtcttccgggccatctggggcgaggagcatatggacggtcccgcgcaggcccgcatcttcgcgatggagtccaacccgtactatcgcaagcagttcaaggccaagttgaacgcgaccaaaacgtccgatttgtggaatccaaagacggcgctccacgaactcctccaaatggttcgtgaccccaccgtcaaggactccagccgtctgtcggccatcaaggaattgaacgttctggctgaaatcacgttcgtggacgagtcgggcaagaccaggatcggtcgcggcctggccgacttctacgcatcagaagccgaggctcagaccgccaccgtcgctgctgcggccgaagccaatggctatgtgccggaaggcgaagagggagatttcccgtctccgacgccggaaccgaccgaggaagaccgcgccaaccccatttagacatgaaataacggctaaggatttaaggtaaggaggtttatttatgcaggataaaaagtctaaaagtaagactgccaagattgattggtctcactggacagtgacggtccctgaggagaacccggacaagccaggtaagccgtattcactgggttatccggagattctcaattatgcagaggacaaaatcgcgtcaaaatacatgtacgacgatccaaaggacaaaagtgtcgtgttctacgcattcccgtccggcgtgactaccgctaacacccattacagccggtcagagttacgggaaactatggagaccgggtcaaacaaagttaactggaccttcgctaagggtggcaaaatgcgtggtacttacgctatcgacgacatcagcaaagagccggatggtaagtattcccgcgtaattatcgcccaaatccacggcgtactgaccgacgagcaacgtgatcttattgggcaaaaggacaataatgcccctccgattctcaaggtgtactgggataaaggtaaaattcgggtaaaaacgaaagttttaaaggacctgaacgccccttacaaagagatgcttctggaacacgcttggggtgatgacgaaggccggaactttaaagagaagattgacttaaatacacggttcacattggaggttaaagtgagcgatgggcggatggaagtcattcttaacgacaccgaaagtttggtctatgacgacattcacatgaaaaaatggggcattttcgaaaactactttaaagcagggaactacttccagtctaaaactccgggcacttttgcaaaagttaaaatttattcacttcaggttacccactgattattcgccagcttcgatgatttcgaagttgtatttgacgccttcgtgctcgaaagtcattttgccagccgccttcagctgcatgcggaatcggatgtgcttcgaagaaggcaggccgaactcgatgaatgctgcgttggtggaccggaactcgccgcgcttgcctttgacagtcacagccacgccatggcgctgagtgcgtttcttggaaacttccgggtctttccaggagttggcgatggctgccgacaggtctttggtctctttggccttctccggcgcgttcttggcctcttcgcgcatcttccggatttcttccagcgcttcctcttcggtgatctcttcttcaggcttcagattctcttcctcggccttctcttcttccttcttcttggaagtgcgggttttgtagactttggccggggcttcctcttcctgaaaggcttcttcctcggccggcagagcattcaggatggcgaggcagcgacgctcagcagtcttgcggtcggagaagcgcttgacagtcgcatcggcgttgtgagcgttgtagaaggcgaccagttctttcatttctgcgttctggatgtcgccgaaggttttgatggagttggtcatcttgcgatcctctgttttggaagatttcgttcgggcttcggtttgtcgccccgttgaaagagattatgcctaggtcgattctgcgtgtctacatttatttcatcagattgatcgcaaagccgacgaacggttgtctgatgtgaaaacaccgcagagcaggctgcggtgtttgttggcgagggcgatggtcaagcgaacggatcgcccagcatatcttcagacggggcacgttgcatatcgcccagcttgtcttcgtcagttgccgggctggacgggatcgcgccggaccgaagcgacagagattccgactgcctgctcacctgcggagccggaggagcttttggcgcagtaggggcaggcgggaccggcaggcctggaggagccatcggcgccatgggcggttctggaagatcaggaagactcggcgctatgccgccaaaggaccgctgcgactgctgcgccggattgtcgccgaacatttcggcggatcggttgtccttgatgacttgacctatggccgtcttgtcgccgcccggctctgccggatcgaagcccgtgaatggagtggtaacgcagcgcatgttcggatgggtaggcagatttttcaggactatggagtctgcccagacatacggattcttgtggttgccgggtccgtggctgatgatctcggcaggaatgtggccgttcatggtgagccattccgccatcccctgccgggtcagcgggcttactacgatctggccagtggactcttcggcgacggcgaacagatcaccgagcttgaatccgatgatcatatagttggacctggactcgccgacgaaagccagggtttcgatgttgtggtggatatcttgatcttcccagatgtacagcatggtgtcactcctctttggcgaaattgttctttcgaaggtagtaggcgatcttcagtcgtggccagaacggcgtcagtgccacgttgtcgtgacggatgatcgcaaagtggtccgttccttccaaccctgcgatgaagcagcgttcccaggcgctcccgctgtagcgatcatctggcttccagacgttcatgcctgagcttagttcgctcgactcccatttatgatcgatcttgacgttcctcatggctccctcaataaggctgcttgttgtgctcgaccagagacataccggccggaactttgaagcggacgtattcgatcatcatcgccgttcgacgccgattcgtgccagactcgtcattaacgaagagttcgcactgatgcgggatgactcgcgtcaccaggtcttcgcctttcgaaccgtagaactttatgtaggctgcgacgcctcgcgtcatgttcagatggaccgtttcgcagagtcgctgtgcggccgacgcgctggacagatcggtcggactgaccgtcacccagtaatggccactttgttctttatcggacatcaactgccctccaatgagaaagcctctgccgagtcgcagaggctggttgttgttagtcgcgcttcaacagaacgactttgtcgtatgcgcgatatttaccgcgccagtcttcccagtagtcgccggccgggcaggtaagctccagggtgatttcgtcgcgccagcattcgacggaaaggacaattgccttgttcctggttgcggaatccgctctgagcttaatcaggatttcgtcgcccgttttcagctcatcaactctcacaactttggccatgacacaatcctgtttgaagaggcgcggccggaaccaacccagccgcgccgatggattaacgtttgtgaaggatggacacggtgtccacgtcgaggatgctgatggtacggcgacggcgcggattgctgcgttcatggatgcgaatcaggttcgcaactggagcttcgtccaccacccatacatcttcctgcttctgcgtccggagcaggaccgttacttctgtgttctgggcgaggccgttgcagatgaaagtgaacttggacgagggagttctgtacatttcgagattcctttttggacttcggggtccgacttctcagccggtgaagagattatgcctgatcatcaccatcgagtaaagcacttgtgtaccaattctccagttaaatggaaccaaagcgcggtatcgctgatcgctacgcttccacgccatggtccttcttgcttacagacttcgaaccacaagctgatttccattctggccaggactcggccgaaggattcgagccggcgccggctagccaggatgtcgacattcacccgccgattgatttcgtatcggcgaccgttgatgacgaagaccaggcgcagggtgcgtccgtccagacattcccagtatctggtttcataccgaagccagtagcgcttaccagccgggcctaccatggtcatttaatcgatgctcctggacgcgccacgcggtccgttcggcgggacgggatcgaaccgccccaggatatagtcgggccggcgcgcttcctgaggacacacggcgagaaggcgccatcctgcgtccagggcgtactggagttcgtccgtgcagcagtcttccttgagcagcagacggttgatgctctggagattcggaccagggatagcagagcctgtgaccgagttccagccttcgataccgtgcaccatctgcggctggttgatgtagccttcggacctgccagccaaccggctcgcggccagctccaggcgctccagcatgggtcgcagagcggcttccgggtcaacatcgtcccagagcaggaccaggttgatgatggtgtacggatagtccttgtccaggtcccaggccgaagcggtcagacggcccaggccgatttcattacacatcacaggaacgtcgttgctccaggtggacggctcccagttccgctcgccaggattcccgattgttacgccttccaggttccccaggagaatgtggagcttgctgacatattccgcctccagcgctttccgctcttcgtcggtctggttgtggcgatagaaggatggagggctgacttttgcatggtagagtttcatggcggttcctcggttttggaagatttgaaagttagagaatggtgtcgcagtatttctcgaaaggactctggcgcttcttctcgcagatcgcgcaggtgatttccaggtcgggcagctcgctgtaagtcttgccgagatacagccagcgcttgcacagactgcggccgtccgacgtgaagaagtggactttgcgagcattgccgggttgcgcccagccaccttgatcgtttttgcgcttgctcatggcgatatttcctttggatctggaatccatgccgtccgttcgctcacccaaactccgtctacatagatcaggactgacagagcagtcgcgccaaacccgaagcctacatagaatgaaccgggatcgatttccatggtggcgctattggtggcgctattgaaatcgacttcaaagttgaacatcgaatggccactcataccatcaccatgtcgatttcattgatgaagaaatgaacatcgacaccatcggcgcgaccggtgtaacgcagccgagtcgtcccatcaatgtgggcttcctcgacgccgatgacttccaggatggtgtcgttgcagtaaagcttgacgaacatcttgatgccggagccaatcgccgcgaaggcgatctgcttgtacaggtcttgcttgatcacgctttgcgctcctgtttgcggatgtattctgccctggcttcggcttcgaacttcgcccaaagcgcgttgtcgactggaccccagggaccggtctgagtcccgtccaccggcgcgaacttgccaccggcgcgacgatacttggacagagttctcaggctgatgattttctcttcttgggaatcgagttggacgatcacttgacatacttcccgaagtagcaggtgtggagtatttccatacccttggagatagccttcagcttgataccgaaattcttgatcgcccagtccagatcgtggtgatagaactcgatgatgttgacgatttggccggcgctgtagtggatgacgcgaaccttgccgttccagcggaaatcttcgcggctgtttacggcctcgacttcgatggtgtcgtttctgccgatggtccatttggagctagtcatgtcgcaatcctctttttggagtgtttcgcgtttcgatgaggtaactatacctcagtcacctcatcgagtaaagcacttttgaacagattatctgaaatttctggaagacagatccatcggctgattcagtcaatcaatcggcggaaccgagacgccacccgttgcgggcgaaggccgagcgaccagacagcttgcgacactggatggagctaccatcgtcgaaggtgtaagatacggcccagtccaggcgctcgcgacgtactgccgcggcagcgatatcttccagacgggctttgagaagttgttctgctttggtcatttcaagttcctctttggagcgcttctggcatcgatgagatgactatacctaagtcatctcatcgagtaaagcacttctgaggaattatctgaaatttctggaggccaggaattgtcgccagagccagtcaacgtgatcgttgagatagcgctcgccatcggacgacagagccaggcagccgtcctttatgccgagcttggagccggcaatccattcgaactcgaactggagcgttcctgggcgaggggtatgggacatgatgtacttttgcacgatcaggaatcctcgaaaggtttggcgttcgcgatggccgcgattttctgcatgccgatgcgatagaattcggcctcttccctggccttggccagctgctccctggcttcgcacgccagcttgtgctgattgttggcgttctggatgcttccgtccagactcctgtccagttcttcccgaagagccttctgcgacgccagctctgcctccaaatcctggattctgagctggagctggcgattcgtctcggcaagcttgttttcgtgagcaatggagttctgaaggcattcatccagatgagctttttcgagcttcagctggttttcgcgatccgcgtacgcagtaagacatttggtcagacgagcctgttctttcacaagatcgactttgcggagcttggccctggccagagctttgcgaagtgactccagctcaagcgggtgaagatcagcatccgggtcttcacgctcttccttcggctccatccgcaggtagtattggccggcagcgaaggccaatagggcacggtcggaattctctacggaagcggccatgaagtgggaattataacgaggcagaaacttgcccgcctctgggtcccagcacaggctatccgccataggccagaatttccggaagttatctgcgttcacgcccaccttgaccgtttccggcgcacctgaatccgtcgccacttccaggttcaggtgaatggtgccggtgatgtactggaagtacactatgctagacataacacaaactccatgagaagtcgcggccgggaccatcctggccgcgcatcgtgattactcttcgccttcgtccgcgctcagccactcttcgaaggcgaaattcactttcgactcgacccaatcctgcagctcatcggcgaactcgtcactgtcgatatccatcggaacgcccagagtttcttcattccacaattcagcattcagctcgaactggaccatttgctcgccatcgacttccatcaggatgcggtctgcgacttcatagtcgtctacatcgaacagatggccgccagtcaggaggtgctggacgaaagcttcatcgagattggtgacttcgatctggacttgtttggtcattttccgtctccttacttagcggctttgaattgggctttgaggttggccagttcagctttcagatcgatcatcgcctgaccgcgcaggccttccatttcggcctcgctgattgcgatcttggctgcgcggattttgtcgttgatttgatctttagtcatttcggcttccttttgtttgaagggtttcgcgtttcgatgaggagattatgccgacagtcagactggaagtaaagtgtctgatcgaagaaatttctgtacaccgacgaacggttgcgctcgaccgtctgctgcggtgtcgatatactcggcctattgcgaacaatggactgattaaatgttcaagctcaatcctgcactgcgagcggtctggcgaactcgtgcccgttacaaagtcatctatggcggccgggcgtcttcgaagtcgcacgacgctggcggtatagccgttttcctcgcggccaactacaagctcaaattcctctgtgctcgccagttccagaaccgcatcagcgaatctgtctacacattgatcaaagacaagatcgaaaactcagagtataatggcgaattcatcttcaccaagaactccatcaagcacaagattaccggctcagagttcctgttttatgggatcgcccgtaacctgtcggaaatcaagtccaccgaaggcatcgacattctctggcttgaggaagctcactacctgacacaggagcagtgggaagttatcgagccgaccatccggaaagagaactctgaaatctggatcatcttcaaccctaacgaagtcaccgatttcgtatatcagaacttcgtggtcaaaccaccgaaagactcctgcgtcaagatgatcaactggaacgaaaatccgttcctaagcgagacgatgctcaaagtgattcacgaagcctatgaacgcgaccgggagcaggccgagcacatttatggcgggattccgaagactggaggcgacaaatccgtcatcaacctcaagttcattctcgcggccatcgacgcccacaagaaactcggctgggagccggccggatcgaagcgcatcggcttcgacgttgcggacgacggcgaggatgcgaacgccactacgctcatgcacggcaacgtcatcatggaagtggacgaatgggacggcctggaagatgaactgctcaaatcgtccagtcgcgtttacaacctggcgaagatgaaaggcgcatcggtcacttatgactccatcggcgtcggcgctcatgtcggttcgaagttcgccgagttgaacgatgccagcccagacttcaaactgatctatgacccattcaacgcgggcggcgctgtcgataagcctgatgacgtctatatgaagctgccgcacacgacgatcaagaacaaagaccacttcagcaacatcaaggcgcagaagtgggaagaagtcgcgacccgattcaggaagacttatgaagcggttgagcatggaaaggtttatccatttgacgaattgatttcgatcaactctgaaacgattcacccggacaaactaaatcaactgtgtatcgaactttcgtcaccgcgcaaagacctggacatgaacggccggttcaaagtcgagtccaagaaggatatgcgcgagaaacgcaagatcaagtcaccgaacatcgctgactcggtgattatgtcggccattctgccgatccggaagcccaaaggcttcttcgacttctaaacatagaaaagcccggatcgctccgggcttcgggtcttactcggtgcggttcctggcgctgagtgtcgacgcaacggcctcgccgactcccagggcttcctggccggccgcgagcgcttcggcttccgactcgacgatgaaatcatcaccttggccatcgcctggtggaacctcgaccagcacggcttcttcgccttcgaaccgcaggtcataggtcttttcgacggacagaccgtaacgagcgttgagcgcgtcccagagctgggcctcataggtccgcaggtcttgcagagctttctggtggctgagcatggccatgtcaacggcccgttgcagggtttcgtccaggacgttgaaccgaatgcgaagagaacgaatccgctcgacgacttccgcatccactacatgtctttcgatcattacttttcacctttgctgaatgtaacgttgtagccgttgtcggccaggtaggtcagggcgccttcgaaggaagttccgacgaggtgcttgagcttcatttcgcgttgcgcggccaaccagaatgcagttccggaaaactctgcgcggccttcggacaaaaccctgccatcaggcccggcgatccgtacatggacggaagatagcttgatcggcatcagtgaatacctccactggcttgcgacggcatgctttcggcgcgagcggcttcgcagtccgggcagggacaggcttggcggacgcgctccaactcgtcggcatccatgacatagagcttcccgtcggcagtgtcatgtgccatagcgatgttcgggaagtcggttgcgctcaggccggcgacagtgcggatttcgtcccagagcaccagatgctcggcattcagtcgggcggcgagcgcttcgtgctctttagcgacgcgcgccatgaactcgtccatacggaatgcgaattccgtatcgatggcacgggccgaggccatggagctgaggcgaatcggttctttcttcatgatgattctcttttggttggtggtggctaatgtccgtgcctattcaaggccggctcaatgcggcgaagaacaacacgatgaagaggagcgaaaagaatgcgaacgccagagatattccggaaatcagctttgctatgccctgcatctcagtcgccttggcagcgagtctggccttagcctcgataacttccggtcgtggcgactgaacatattctaaggcctcttcccgcgctttttcggcctcgaccaacctagggtcgcgggccgagacttcgctgtgccctggcctcgcgggatgggcttgcagcgatggagggagttcagccgccacgactccatagtctgcgcaggcccaagcgatcccgatgaggatcgcgaggatggattggacgattcgcagcatcactttgtcgctagggaagttcatgatcaatcctccaccgaccgaacgatttccatgttacgcccggcattggtccctgcattgaaggcgcgccgaccgtcgctatcgtccagacgcatgagcttggtgacattcgacttcttgtagccaggatcgccgaaatgttcgtgaaccgcagcttccttcaccacaaccagagacgttccggcagaagataccagctccatgcgcttcctggtgatggattgaaggcgatagctgatttcctgggtcgcggccagcttgaattgcgcggcaacctttacgttgaaacgttcgtacccttgagccttctgatactcccggcacagacgatcaatggcctcgaccagggagttgaacatgttcaccgccagctcaacgtccgacttgtagcctttaaagcgtacggcatgaccccagcgcttggtagtgcttccgtcgcgggcgctcctggatgccttagccgatgctctgtggttgttgatgccaccggcgaaatccatgatgcagtcattgtacgtcgccacggccactgagaaaaacttcatccagttcgggattgcggaatagtaacgagtcgcaatctgctcgtcgaactcttcacgaatctcgccggtcgcttcgaagccgtggaggtcatacttgtccttcagcttcttcacgcgctcggctgcgatggccgcttcgtgcgggctggaggagtcggctgccatggcggtcagtttgcggatgcggtctttcgccttctcgatggcttccggggtgaattcgttctggtcggtcatggtcggttccttttgtctgaagggtttcgcatttcaatggagctattctgccttcattcagaatggaagtaaagcactttcttccactatttcgtcatcgactggaagaaattccagatccaatcacctgctaccagcaagaggatgagggcggcaaagaacaagacagcggccgcgagctgtgcgcccggcttcagtttgggatggctgagcttgggctctacgggaacggccggagcgctagcgctgcaaccggcgtctcctgggccgtagccgatgccgcgttcacacgcctggagcgacaccagggatttaagatactcggtctgcttttgcgactcttcgtagatgccggcgacggcgaaccagagggcgaacactacggacgtacacacaacccaggcgccggtcagcaggagggccagcgggccgatgacgaagacggtagcagccaggacgattgcgccgccccagatgatgaagccggccagaccattagtgatgtcgacacagaactttttcattttcagattccttcggttacgggatggaggggatttgaaactctgcgccgccgagaacatcaatgacgacttcccagagcgtcggaacagaccactggtaacggtcgaagtcggtttcaggatcgacgcccagcgtcacataggaagtggcaggccatttatgaacactgcctttccgcatgagagtcgccacgcggccgtcaccgagcggattcgtcctgtgcggaacgtacgcagacatcgaatattgctgcccggcgtcgacaacaaatctttgcctctggcgcagacatacagagcccacaggattccagccgcgaccgccgcaagcctggcgagccgaagaatgctcataaccttcgtgagtcatttcgccgaggcaagccgagcgatcctcgtaatagttgatgttctccatcgatccaaccagcaccagagactcgaaatcgaatcgatgatcgtggatggccgagtgattgaagcaaagccgacgcggcagctccgggtgccaaacatggaggcgaccggccggaagttggacctgaatgaaccccaggccgtgcagagtgatcttgtccttcatcgggtcatggacggtgctcatggataatcctcagtagcagaaatgcattgtgagagttacgattgacaagccggtcgcccatagaagggcgaaccaggccatggctttgatggtcgtgtagatcatccgaagaattttccggcacagatcgggccaatgcccatttcgatggatgcgtggttggtcaactcgcgaccgcagcaggagcactgaccagtcttccgaccgtaggcgactgccgattccatcggcttttcgaacatcttcagaacgtcgtcgtgctcagtgtcggtgcagtcgcggctcttgatgaatttgccattggtgatccggccgaggtagatgtctcccaggacatacagactcccggcgttccgactgttagcgctagcctctttcacaacaacgatgagcggctcctcgccttcgccagccaggcggattttcgggcgcttgattccagactctttcgccttctcaaatgctttctcgataccagaaatgtccagagtcggcgcagcagcttcctgcgcggccactttctcgcgatacttggcgaagttttcgatggcgcgcttcgcagcagcgatctgattttctgtcaaggagccgtatttatacaacgactcctgaaggctctgagcgaagctgaaggaatttccagtccaccactcgacgatgtccgggtgcgcggcttcgaaggccttaattttgaggtcgcgctcttgcgcagcgctacagattttctcgatgcgcttttctgccgccttagcacggctcttggcgcgctgctccgggctggttttgtactctttgtatccgacgccgccgcaggcaaagcaggcgcgaccataagacgaagggccacggtacaggccggtgcctgcgcatttggtgcacttgtcgcgatacagcttcacttccttccgggagttcgggcgggcacccattgacacgtcttccagggtcttcggcgcttcgttgttgatctctacggtagcgaagtcatcacccaggtcttcgaagccggtgaacagattctctgctgcgttcatatcgattctcctgtttggaaagttcgtttcgatgggttgactatacgccagaaatggcaaaacggtagcactttcgcactaccgttcgtcgggtcgcagacgatcaataaatatcgctattgatcttgaatccatgctcagcgccgtcgttgtagtcatactcagcatagccgtcgcagtagtcgttcaaatgctgaatgatgccaagaacgtcgttcgcggctttgtgtcgtttcgcggcgatggtcttggcgatgctgtcgccgacttccagggtttcggccgtccggcgatggatcagcaggcgactccaaagatagagccggacgcgacgaataatgtcgcgatggcgctccagtcgtccgtgcaacttttcaatttcgtgctcgcgagattttaatactcgtcgaagccgttgaacttccaactccaaatcggccttagtagccatgttcacctcagaaaggaaaatcgtctgagactccaggaagctcgacgattattgttgagcctgatcggtctagaatgcatccgaccgagccagccctgtgtggatagggtctacacgaactataacaggtgacttccatgactattcgccaggtcgatcctccacaccatctgcaaattggcgggcgcttcgacttcagttttcgttcgtccaggacggcgcgtctgtcgcaggaaaggcagcgtgccttaaccgacgtaaccatgggtatagtcgatcattcggatgagctcatcatcctctgattctctcgacttcagaccgcccaaagagtccgactggccgtcgcatttcgcatcgatatccatcgaagacaggaatcctgccgatactgcggtgatatcaactttgtcgccggccttcttgaagccttcgcactcagcatcgagggccacaattgcactcgctgccatgttcacgtgactgatgaggtcggggaagatcacaggaacttcacgcgacatgccacggaccgtcagcttcaggactacatacttcatactcactatcccttttgtatgtgaggaaagaacttgctgttttccggatgatggaagcgctcggccgcaggcggtctttcttccggacattgaatcgtcgaaggagggaaaaccgcgccggcgataatcgccgcgaggagtgcagcggatgtcgacatccagagggcggtttccaggctcacccgaacttccggacggcgcggcttcattcgctccaccctcttcccggttcataggatggtagatcgccgccgcgaacccagttgtcccacatatggttcagaccagtcggtggctggggcggcggactgtagaatccgggagtctcagtgctgctcaggaaataaggcgtgcaaacggcctggacgaccaattggtgccgctcccacatcttatcaatcgctcttagcatgacgtcttcgcactgagccttactgtcgaaccgtctgctagtatggtccggcatctggacgcagccgtctccagtgcaaaggaaagcagtagcaatccatacggtgatactcgccatttcgtcaccctctttagttgatgagcagagtctattccatctgctcgccaggagtaaagcgcttttcgtcgggataaatgccgatgatgtctgcgtcgagcatccaaatctccacggacggatcgtcgctgctgatttggtacaggttgtacagctcccgtccgccgacagcgcgctcgcctcgcggctcaaccgccagaaccttgccgtgcccttctccgtgctcgtccatgtatatgacgtgatcgccgacttcatagctttctttcgtgacgaggcgtgaacgcgagctgttctgcgattccaccatccaggaatccagcacgccgcctttcatgtcgcgaaacaatcttgccgatttgtcgcaatcgaatacgcccagaacttcgccgtctttcaacacgatatgtacgattggcaaaagagtattcatgtttaatctccattggttgataattagagtctaatctgccgaaaagttcccgtaaagaattattttctcataactgattagttgcaactgttaatctgatgtatatgtttgaatctcttttgaacgtttgatgtttcccctataataagcgcacacagccaacaaccacgtggaactacaatgtttaaactttcctggatattcgggcgcaaaaaggataatgctgcctgttctgaatcggcgccggagaaagtcgcacaaatccctcaacacgatccgctcgaccccatgatcaagctgggaaggattcgcggctggaacgtcgagccggagaaagccccggtcattcgtagtgtgaaagatttcctggagccgggcctatctgtcgcaatggatagtgcgtatggtgatggaccaaccccggccgcgaaggctgctgcgggcggccagaatccctatgtcgtcccgactatgttgcaggactggtacaattcccaagggttcatcggataccaagcttgcgcaatcatttcccaacactggttggtggacaaagcttgttccatgtctggggaagacgcagcacggaacggatgggaactcaaatcggacggcaggaagctatccgatgaacaaagtgcgctgatcgcccggcgcgacatggagtttcgcgtcaaagacaacctcgtcgaactcaacagattcaagaacgttttcggcgttcgcatcgcgctgttcgttgtggagtctgacgatccggactactacgaaaaaccgttcaatccggatggaatcacgcccggctcctacaagggaatctcccagatcgatccatactgggcgatgccgcagctcactgccggctcgacggccgatccgtcttccgaacatttctatgagccggatttctggattatcagcgggaagaaatatcatcgcagccatctagtagtcgttcgcggaccgcagccgccagatatcctgaagcctacatacatcttcggcggtatcccgctcacccagagaatctatgagcgcgtgtatgcggcggaacggacggcgaacgaagccccgctgcttgccatgtcgaagcgaaccagcaccattcacgttgacgtggaaaaggccatcgcgaatgaagacgctttcaacgctcgcctggcgttctggatcgccaatcgcgataaccacggcgtgaaagtcttgggtactgatgaaagcatggagcagttcgacacgaaccttgccgacttcgacagcatcatcatgaaccaatatcagctggtcgctgccatcgccaagactccagctacgaagctcctcggcacttctccaaaaggattcaatgccactggtgagcacgaaacgatttcttatcacgaagaactggagtccattcaagagcacatattcgacccacttcttgaacgccactatttgcttctggcgaagtcggaagaaatcgatgtgcagctggaaatcgtctggaaccctgtggactccacgtccagccagcaacaagccgaattgaacaataagaaagccgcgaccgatgaaatctacatcaactctggcgttgtgtcgccggatgaagttcgcgagcgtctgcgcgacgatccgcgttccggctacaaccgactcaccgacgatcaggcagaaaccgaaccgggcatgtctccggaaaacctggccgaattcgagaaggccggtgcacagtcggccaaggcgaaaggcgaagccgagcgagccgaagcccaggcgggcgccgtagagggcgcaggcgccccggttcccgccgctccacgcgggactaagcctctcgcgaaagcggccgaggaaggggccagcgaggccgctgaaccgccgtcgcggccggaccccaaggccgagctgcggaacttgttggtcgatcttttgtcgaagctccaagacctggacgacattaaggcgccggacggcgtagacatagagcacaatgatgcgcctggcttaaagcgcacgtccaaacctggcgtgtctggcatggagccttcggtgttttcgtccaaccgcatcgtcgggcctcgtgatcattcggaactccagagaatcaaggttaatggaataaccaccttgatcgaaaatcctcgcggaagcattcggcaaggaaaggatgggagttggcgagttcagatgaaacaccactacggattcatcaagggaacgaaaggcgctgatggggatgaagtcgattgcttcgtcggtccgaatctgggatccaaacgggtcttcgtcgtcaaccaggtgaacaaggaaggtcagtttgacgagcacaagtgcatgctcggcttcaacaacatcaacgatgcgaagtctggatatctgtcctgcttccgcccaggttgggatggtctcggctccatccatgaagttgacctacccgctttccgtcgctggctggcgaacggcgacacaaccaaaccgtttggaggcgagtgatggcattcaaggcctccaaaaagcgcgaacgccgggcacctcttccggtcggaagagggaagcccataattccatcggcaggaatcgaggcctggtatcgaaagcagatgaaggatatttccaagctcatgatcgccgactatcgaagcgagattgagaaggcactgtcccagcctgcggccgaacggttcttcgccagcgacgaatccgttaacgccctgttcaagatgacccttcgaagcctacagcagcgatggaaccgcatttttgaaggcttcgcggccaagatcgccccggagtttgtcaaccggaccgaagaagcggccaccgccgcgaccctgcacagtttgtctttggccggcgtcgatcagccaagagctgcgtacaatgagagcgtcaggaataccctggaggcagcaactacttacaaccatactctcatcaccaggattcaagaggaagtccacgagaagatttacacatcagtaatgttgtctctgacttccccaaatccggaagagcaaggaacttccggcataacgaacgcacttcgcaaagtcgggaagttctctgaagatcgaatcgaactcatcgcaagagatcaaaccagcaagctttacagttcgctgagcgatgagagaatggcggaaaatggagtcgaggaattcgagtggatgcactcttctgccggcaagactcctcgccatacccacctggagaaagatgggaaaaggttcaagctgaatgaccccagactttgggagggtccgaaggccgaccaggggccgccaggatgggcgattaactgtaggtgcagaaagataccagtcatttgacatcgataggagcgctatatgccgttagttcatggcacttccaatgaggctcgttctgaaaacatcaagcgggaaatcgaagccggtaaagacccaaagcaggctgcggccatcgcttattccatccagcgcagtgagaaagggaagacggcgaaagattgttcgcctgagctcgtcgccgatcttcgcgccatggtggacgctctgtcgaggctcgtgaaatgaaccgcaagacgtgccggcgccgactcgtggtcgatgtaatcagggccaatattcacggcggattcttcagcctgaagtttgccgccatcgatttggcaatcatcggcgtcgccatcttgatgacttttggccgataatgctgagaaaatctggattctgactaaaaattctagtccggatagccgcaagttaccgtttacggaaaatagcagtaatttggaaagcctactgccgcgaggctttaacagagccagttcctaatttccgatttagccgcatgcttcaaaagtatatagcctgggaaattagaagtaacgttacaatagaattcatctataagtaacgttataatataacgtcaatctatatgctctagacgtattgaaattcaatttttaatcgggaaattggtaatttgaattagtttaggagttgaaagcctcgcggcagtaggcttggacaaatcccgtcaagtttccatggtcaaattactggattttcgcggctgaggggctggtaattagatcataatacaaattataatgtaagataacagtcgcggctacatctaattattgttccgcttatttacccttagatgtcctgcgtatataatacagccatagtccacgactcttcgaattaacgatgacaaagtcgaaaagaaaaattgacgaaaatggatatatgaccatcgagggctgcccgatcagctcttatggcgttttccagtattctgctggtcaactcggtcttccgggcgatccgacgcggattgtcaacgtatatcgcccggagtctgccgtcagcgatcctgagtacatcgaatctctgaagaatctcccgttgatcgacgagcacgaaatgctgtcgggattcgacgacgatgacgacagcgtggcccccgaagacaaaggggtggagggtatcatcacctccaacgcttactacgaagccccatgggctcgcggcgatatccgcatctattcccgcaacatgcagaatcagctggaaaggggcaaagaagacctgtccctaggctatagttgccgctacactgagcaacccggcatctggaacggaacgccttatgaagtcgtccaggacaagatgcgcggcaaccacatcgccctggtaaaagagggtcgtgtgccgggggccagagtattggatggtctgtgttttgaccatctcagttttgatttcagaccatccgatgagggtaatgaaatgagtctcaagaaagccaagcggaagccccctgtccagcgcgtagggcaagctgctgactcggcggtcgaagagttgcgcaccctgtggccgaaactctctgcgtctgtccagaagttcctgggcgaagaagagcaggagccggagcatcaggaaggcgccgctccggccgaaccgaccgacagcgagcacctgaccgagcatccgactctggaaggcgcccagaaggacgacgaagagcaggaagaggagccttccgttgtcgatccggccgtggccgccgtcgagccggagcatcaagaaagcgccgcatccgaaatgtccggtgaaggcgaagtcgccgaactgatctctcaggtcaaagccattctggctcgactggagggaacggtagccgaaggggcagacgaagagcatggcgaaggtcaagatgtcgtcgagggtttggaggagcagagcagcctcagcggctcgcaaaccgccagcgacgatggtggtgagagcaaggataacagcgaggaacttcctgaaatggcacagaagaacgcgcaagatgctgcaattcgcggtctctatcgcgacattgctgctaaagatcgcctctacaagcgtcttagctccgtggttggtgcgttcgatcaccgagctatggactcggctgaagtcgctgtttacggcgtgaaaaagctgaacatcagctgtgcgaagggccaggaagctctggcgctcgacatgtacctgaaaggcgtcgaagcctcgcgcggcgcggccagccgtcaatcgaaagcccaggattcggccggttctgctccgcagtgcgccgagctggacagctacctgaagggggagtaactcatgttccagaaacaagtttaccgccagtacactcctggttttccgggcgatctgatcgaggacggcccgaagcgggcgcggccgggtcgaatcatgtctctgtctgccgtaaatccggctgccaccgccaccggccccaaccgcatcagtcgcgctttcggttacgccggtgacgtcagcgccctcggcgaaggtcagccgaagaccatcgcggctcgcgcttctgaagtcgtgatcggcggcgccaacttctttggtgtcctcggtcatccgaagcactatgcgctgttcggttcggccggagactccctggctcccagctatgatctgcccgatggcgccgaaggcgagttcttcgacatggccaccggcctggtcgtcgaaattttcaacggcgccgcaaccgccctggacctggactatggtgacctggtcgcctatgtaccaaacaacctgcctaccgccgacaacgcgcttggcctgccggccggcgccctggttggcttcaaggctggctccatgccgaccggcttggtccagattcccaacgcacgcatcgttaacgccatcagtctgccggcccagtcggcggggaatctggttgctggcgttaccatcgtccagctcacgcagtaaggaggcgtcatgagccagatcagcaagacccattcgcgcctcgcaggccgcaatgcgaaacctttcgacctgaaaaacatcaccaatgacgccgtggcgtctctgcgccgcatcggcctggtattcgatcacgccgtcgtccaggaccagatcaaggccttggcgaaggccggcgcgttccgctccggctcggccatggacagcaacttcaccgccccggtgaccacgccgtccatcccgactcccatccagttcctgcagacctggttgccgggcttcgtgaaggtcatgaccgctgcacggaagatcgacgaaatcatcggcatcgataccgttggctcctgggaagatcaagaaatcgtccagggcatcgtggagccggccggcactgcggtggaatacggcgaccacaccaacatcccgctgaccagctggaacgccaacttcgaacgtcgcaccatcgttcgtggcgagctgggtatgatggtgggcaccctggaagagggtcgtgcctcggccatccggctgaacagcgccgaaaccaaacgccaacaggcggccatcggtctggaaatcttccgcaacgccatcggcttttatggctggcagagcggcctgggcaaccgcacctatggtttcctgaacgatcccaacctgccgccgttccagaccccgccgagccagggctggtccactgccgactgggcaggcatcatcggcgatatccgcgaggccgttcgccagctgcgtattcagagtcaagatcagatcgatccgaaggcggaaaagatcaccctggccctggccaccagcaaggtggactacctgtcggtcaccacgccatacggcatttcggtttctgactggatcgaacagacctatccgaaaatgcggatcgtgtctgctccggaactgtcaggcgtccagatgaaagcccaagagccggaagatgctctggtgctcttcgtcgaagacgtgaacgcggccgtcgatggaagcaccgatggcggcagcgtgttcagccagctggtacagagcaagttcatcaccctgggtgtcgaaaagcgggcgaagtcgtatgtggaagacttctccaacggcaccgctggtgcgctgtgtaagcgtccgtgggccgtggtgcgctacctcggcatctaaccgatgcctattcaccaaaggccgggtttccggcctttgttcactctgactctgactcggttgtaggggccggttagggcataattactaggactacgccaatgactgtttacatcgtttccgccatgactcaatccgtgtcttacaatgcgtatgacacctctgatccgtccaatcctcgccttcagcggaagattctgattcgtggccgcgccggcatcgcatcagaaacttccggcttcggcgacatgatttccgacgcggccgggcgtccgatctggaccccgcagggcgattgtactgccgtgagcgattcggatttcgagctgctccaggccaacaagattttcatgcgtcacatggataagggttatctgcgagtcgtgaagaccgacatcaccagtgaccaccagcggatttccaaagagactcgcaccatggagcgcgatggattccagcctctggacgctgctcgtctgcagcagaaaatcaaggtgactaccgccagcgcttcccaggaacaagagttccggatttaaccgagggtttcggtatggtgattttcgacgaacataagtttcgcacgctgtttccggagtttgctgatccagccgcttatccggacgtgcgcctgcagatgtatttcgacatcgcgtgcgaattcatttctgatcgcgattcgccataccggattctcaacggcaaagccctggaagcgtgcctgtatcttctgaccgcccacctcctgtcgctgtccacgatgcaagttcagggcgcggctggaggtggcgtcactgccggtgggacccagggcggtttcatcaccagcgccacggtcggcgaggtcagcgtggccaagctcgcgcccccggccaagaatggttggcagtggtggctttccgggacgccttatggtcaagagttgtgggcgctcctcagcgtcaaagcggtgggcggattctacatcggcggtcttccagagcgccgaggcttccggaaggttggagggacgttctggtgatccctggtgcgaatcttctgcgaatggccttcggggtcatcggtactcaaattgtgaaatatcgcaagtttgagcagcgagtgaagaatgatcaagctcagtacgtttccatgttcgaggagcctttcgacctggcagcgtctgttcagcgagtccgacgcgatcagtatgtccagtttaatctggagttccaacggaattacgttatgatcttcgccaactttgagatggttgacttggatcgcgatgtggccggtgaccagttcctctggaccggaagagtctttcagctggagtctcaaggctcctggttttatcaggacggctggggagtttgcctggccgtggatatcggtgcggccaagctcactgatgacgggaaaccgactttctaggtgatgtatgtttgacggcgaactgatagcgaaactggttgtcgagttgaatgcggcgatgacatctgctcaagaggctttgcagttcccggattttgaagtcgtccagaaagctcagccgacccaacagggaacgtcaaccaggccgaccatctttttccagaaactgtttgacattcctcgcggctggcctgccaccgattggcacctggacaacacggcccgcaaatatgtagaaataactcgacagcatgtagagacgactttccagatcagttcccttcattggcagaatcctgaaataactcacgtggttacggcttctgatatcgccaactatgtgagggcttatttccaagctcgatccacgattgagcgcgtaaaggaactggacttcctcattcttcgcgtgtctcaaatttccaacgaagcattcgagaacgacaatcaccagttcgaattccacccaagttttgacatggttgtaacttacaaccaatatattcgcctgtacgaaaacgcagcatattcggccgatggggtattaataggcatatgagtctgaggcgcgattcagagctaatcgccgcgcacctccagatgttaagagccatgcgcggcaggtccgtttcagccggatggtattccacggctcgatatcctgacaaggcaggcggatcggtcggaatacaagtcgcgagaatcgcacgtctcaatgagtacggcggaactatcgaccatccgggcgggaccaggtatattagggacgccattgttcggggccggtttgttggcgttcggttcgtcagaaacgactttccgggagaaaccgaggtaactaagcctcacagaattaccatcccggctagaccgtttatgcgatatgcttggaacttgttttccgcagatcgcgccgcaatccagaaccggatagccatgaggctggccagaggacagatcactccagatcaagctcttgcccagatcggcctggcgttggaaggatacatagccagaagcatcaggaccgggccatgggtggctaactcagcatctacggtcaggagaaagggattcaacagaccgctggtcgatacggcgcacatgcttcaatcgattagcagcagagtaacataaccaggagatcatccagtgatcagtcagagccgttatatccggatcatttcgggcgtaggcgcaggcgctccggtcgcaggccgaaagctgattctgcgcgtcatgactaccaacaacgtcattccgcctggaatcgtcatcgagttcgacaacgccagcgcagtcttgtcatacttcggcgcgcagtcggaagagtatcagcgggctgcggcttatttcaagttcatcagtaaaagcgtgaattcgccgtccagcatcagcttcgctcgctgggtaaacaccgccatcgcgccgatggttgttggtgacaatctgccgaagaccatcgccgatttcgccggcttctcagcaggggttctgaccatcatggtcggcgcggcagaacagaacatcaccgccatcgatacgtccgccgcgacttctatggacaacgtggcgtcgatcatccagaccgaaatccgcaagaacgccgacccgcagctggcccaggctaccgttacctggaatcagaacaccaaccagttcaccttggtcggcgccaccatcggcaccggcgtcctggccgtggcgaaatctgccgatccccaggacatgtccactgccctcggctggtccacctccaacgtcgtcaacgtcgccggccaagctgccgatcttcccgacgcggccgttgccaagagcaccaatgtcagtaacaacttcggttcgttcctgtttgccggcgcgtcgctcgacaatgaccagatcaaggccgtgtcggcctggaacgctgctcagaacaaccagttcatctacacggtcgcaacttccctggcgaacctcggcactcttttcaccttggtgaatggcaacgccgggaccgccctgaacgtgctgtcggcgactgctgccaacgacttcgtggagcagtgccccagcgagattctggccgccaccaactacgatgagccgggtgcttcgcaaaactacatgtactaccaattccctggccgcaacatcaccgtttccgacgataccgttgcgaacaccgtcgacaagagccggggcaactacatcggcgtcacccaggccaatggccagcaactcgcgttctaccagcgcggcattctgtgcggcggtccgaccgatgctgtggacatgaacgtctatgccaacgaaatctggctgaagtcggctatcgctcaagcgctcctggacttgttcctgaacgtcaatgcggttccggcgagcagcactggcgaggcgatgaccctggcggtgctgcagccggttctggacaaggcgaccgccaacggcacgttcacctacggcaaggaaatcagcgccgtccagcagcagtacatcacccaagtcaccggtgatcgccgcgcctggcgtcaagtccaaaccctgggttactggatcaacatcaccttctccagctataccaacagcaacacaggcttgaccgagtggaaggccaattacacgctgatctattcgaagggcgatgccatccgcttcgtcgaaggatcggatgtgatgatctaatggtttgcggcggactcgatccgccgcgaccttccataaatggagtgaggaataaacaatgatcaacatttctgcgttcggctcgatctgccagttcacggcaagcagaactttcccgaacggattcaccgtcaccgagtttgccgacgatgcggaccccatcgacagcccgccgttcactgcggccgataccggcgtcggcctcaacggtgacatggtagtctggaaccgggcgaacatcctggaagtcgtcgtcaacgtcatcccgaacaccgagggcgagcgcaacctggcagtcctgctggatgccaaccgcaccgggaaagacaagtcgggcgctcgtgatgtcgtcggtttggtcgtggcgatgccggacggcagcaaaatcacctgcaccaacggcacccccatcgacggcgttctgatcaacgcggtggcaagcgtcggccgtctgaagaccaagccgtatcggttccgattcgaaaaagtgatcaaagccggtactagctgatgaagaaaattccgctgacagcagtccccaaccaggcgatctcattcaacgccggtagcagctattggaagattcgcctgtaccagaacatggacatgatgaatgccgatatcagccgcgacggcgtgatcgtttgccatggggtccgctgcttcggcgggattcctcttctccaatacagccatcagtaccgacctgactatggaaatttcgtcttcgaccgcgacgccgattggacattgttcggcgacggcatcaacctgttctatctggacggcgccgaattcgccgagtatcaggcgcttgccacgaggaaagaatgagcacatcaacgatcagaaccgggacgaacaacgatatccttttggacgacaatggaaacatggttatcctcagggatgtcgaagcgtgcgcccaggacgttcgggcggcgatgctcatgcgcaccggcgaaaacattttcgatgtgaactccggtgtgggatatttcgaatacatcttctcgccgcagaaaagctatgatgacgctcgcaaatccatcgcggatgcaattttatcctcaccggatgtgaccggcatcgagcagcttgacatcgacataaccggggaagtcttcggcgtcgatgcgaaagttatcaccatccacgggcctgttaccacaggagtttgaaatgagtaccatccgcatccaatacgccaacggcacccaactgttcctggacggcaaaaatccgccgcccctggacccgctgccctcgtttaacccgtctgtcgaagatctggaaggcctggaccgcgaaaagaacaccgacaagggcgactcctcgccggccggtcttcccgttcccccggtaaacgtcgattccaatgtcgacaacggcggaaccatcccggctccggtatcgaccgacgctcctgcggccgaatcggccccggaaggcgcccaggaagctcctgcagcgggccaaggcgacgagaaaggcgccgaggaagccccgactaccgccccagtagaaaaggccgaggaaacggcctcgccggccgctgaagaggaagccccggctcccgccaaggccacctctcgcaaaaccaccagcaagtaaggactcgacatgatcaacgtcagcggcttcggcacaggaattgtaatagtttccgcctcatcgttcccgatggggttttccttgtcgaagttcgctgatgatgagagtccgatatcctccaaagagctggagccgttcggatatgagatgctttatgacggcggcctattcgcctttgacaaggctgctcctctggaagtatctgtatccgtcatcgcagggagcgaggatgatattaaccttcgcacccttctcaattccaaaaagggatcattcagatttcttccgggaattatcccggacatgacgactctcgtggctactcttcctgatggcggccgcaccgttctgtccaatgggaccatcctcaagggtccggccatcgacaccatacagaacaccggacggcgcaaaggcaacacgtacactttcgttttcggtagctatcttggcgcccagactgcgcgtcaagccatttctaacgttatccaatcggtactggaggtggtctgatgttagggattttcaccagcctcctaagttcgcgatctttttcgattgtggaccaaaacacaaaccagctagttgctgcggatttgaggataagccgggtcaacacccggttttcttctgtagggcaacgccacatgctggaagatggtacgaccaagatggattccagaacgatccaccctatggaaatcatcgtcgaagtattttgcccttcaattgatgtcgtcgatcagatcaatcaattgctcctggatcgcgacacgctgtacaaagtcatcactcgcggcatggtattcgaacggatgatgtgtaccagcgaagcgctcaatcagactccggatatgatatcggcgactcctgcgcggctgacattctcccaagttctcgtccagaatcccaagcctataatgttcagaaatgcaggggactcttctatgatcgaccgagggctggccctagctgaagacgtggttggctcggccggcgatctgttcgactacgcagtaaacggcgtccagaacgccgcagacttgttctgaggtgccaattgaactctttcctcaagtctattctcaacacgcctactctcaccatacgcgatgatgtcaccaaacttcctgtctggaagagtcttcaagtcaagaaagtggaaatttactcgccggcttccgtagtgtcgaaacctctggcgacgaaagaccagacggaagctcaagtgtacaccgaagctctggacattgatgtgaagaatggaaagatcatccaaccggtgcgactccgcatcaatgctatctgtccggacctgtccaccgttgaaagtatcatgaacgctttcaatgataacacctcgactttcgctatcacttctaagtcgatattggccgataaaatggccatcatgacgctcgatgtagatcagtcgccagacatgttgaacgcggctgagatcaatatggaattcgagcaggttgagcctccagtattgaatgaattcgatcctgcgttccctcaagatagtccgacttatggggtacagattcaatctctttctgatgctaatttgctggatttgggcgccatcggcgattcgatatcttcggccgcaaaatcgctatataatcgcgtgaccagctacttctgaggatgtatcatgcttgaaatcaatcttcccgatggccgtcaaactcgcgtacaaatcgaggcgtggtcggcattggatggctgggaactccagcgccgtttcgtcgaattcgctgtcagccaagattccgacttccgccgctctttcaccatggaaatcctgggctatgcgaaagtgctgcttggcgacgatgacgccggcattccgctgaccaccgcggcagtcatcaacaaccacctcggccactggaagaacgtggaactggttttcaactctgttctcaagcacaatggcatcgacccggccacgcacgccgaccggccggactattgggaacaagtcggatcgcagatggccatcgcatttctggccgaggcgtccaagctcattggtccagcaatgaagatcgccgaaggactcgccaacaagccggagtgattcatgtctagtgatttggatgaattcatacttcggtatgaggccgatactgccagagccgagcgcaatctggagcgcctccagaaccagatcaggcgcgtgaacagcgcatcgacgagtggccttcaggatttgcgccacttcgcagacggcgcggccaccgaactcggcagagtcgttccgcagattgattctgtgacgagcgcaattcgcggaatgaacgcgcaactggcaataggcgccactggcgtggccctggtcgcggccggcgtcaaggcgttcatgaacaccagggaccagtacaatcagcagcgcatccaggcgatggacatcggcatcgccccggcacgcttggaagagtaccagagaaaattcgttcgccagtccggtggaaccatcagccgcgagcagggcgcggagatgaccaaaaatctggcagacactttccggcgtgcttatcgcgatatcgggcgagtcggcccggaagcgcgaattctgcgtatggccggcgtcgatgtcgggagcttccaaaagggcatgcggccgctcaacgacatcatcaccgatctggccacgaaaatggccaagctgaagccggacgaaatttctgcctacgctgatgcccttggcgtctcgcgagattacctgagcaccctggcgaagatcggcccggccatgggaaaagtcactgagatgacgactgcggaactccagtccagggtccagggcgagtccaacatccagaaattcaacgatgccctggcgaatctcaaccagacgttcactaccctggaaaaccgagtcggcgaaaagctcgcgcctgcgttcaccaagctgatcgaaatcatcgacaagatagtccaggctattcccaatgaagtggaaagcttcgcgaaggacaccaaatcccgttgggaagatggagtgctcgggaaggcgaccgttggcagtgatatcctatccctcctcagccccggcgccctgctcggtcgcctggcagcgtgggggactcgtcgcggcatggaagaatcagggctcatcgacaaggacaaggttcccggcgctcaaaccagcgaagacctggccaagaaacaagaagaccaggacaaggctactaagtccatgaaagagctagagaagctggctgaccagaccacgaagtctaccaatgattttgcggtggcgatcaacatgttcagtggcgcggtatcgtcgttcgcgaatgccgttgacgagcgccaagcttgggcagcctgggcgggggaaattggtcgggcggtcggcatgggaagcaccgcgccgacttcgcgggccaccggcgtctatccgcacgcgatctatgatcagtcgaagagtggcgcggccggacaagtcttcggcgagccaatcggcgcccagtctcttcgcaatcgcatgttctcgccgcagcgcaaggcagagccggtcaccgttccatcgtacatcaacgatatcatcaaagatgcttcgaagatgtacaacattcctgagctggacatcaagaaactcatatacaccgaaagccgattcaacgccagggccaccagcgaagccggagcgaaaggcctcatgcaactgatgccggaaatcgccaaggcgtatggtatcactgacgtatatgaccctcgccagaacatcctcggcggaacgcgcctactgcgtgaaaacctagatcgagcaaatggcgacatgcggttggccttgacatactatcatggcggactcgatccgaagaactggggcccaaggactcgcgcatatccgggtttggtaatgagcgctccaatcgagctgatggaagaggctcagcgcaagcagaaggctgcggccatgaccgtcgccaacgagacgttcgccccggaaggcggcgacatggacattcgtccctatgatggcgggcgactggaaaccccagaccagggcaagaaggaagatgagcgccgcgaagcccgtcgatatgacgacagggttgtgcgaccggaaattcgcatcatcgaccgcatgccagaccgcagcgacggcgaaatcctcaagatgtctaggcgtcaagaggccgaccgggcagactctggattccggaagttcccgaatcaggttcgcggcgagaccaagcagaacatccaggcccaactcactgccggagccatcgcgcaagtgatcggcgttaaccccaaccagatcatgcgccgcgaaatcagccgttctgacttgctattcggatacaaccaagccatcctgggcaagcagcaggagatcaaggccgccgcgaccgaagccaacaacgtattcctgtctccagccaagctcgccgaagccactgccaaggtgaacgccgcatcgcgagaaatggatattctcaggacgtacggcgagcaacttctgaagagcgctccagagcgcggccaggagctgaccatcggtcgaatcgatatgttggtcaacgttaccggcgcgaattctccggaagaggctcgcgagatattcagcaagcagactgcagaccagctgactacggcaatccaagatgcccaaaacgattccgcaactaagatactctactgatgaaaaagagaattctgcgagtaacattcaacatgccttatggacccgaagtcatccgagaggatttggatgttcgggtccggatcatgaaggctgcgttgcggattcagaaccgggcgactatggaaattttcggcctaaccactcagctgcgtgagtctcttctgtcacagttcaccgcgtggaagcaccggcaacgtcaagtcggcagggaagacgaattgatgatcaaagtgtcggtggaagccggctactctgaccaggggcgcgagcaagtttccagagtctttgtcggcgaagtggccattgtcgatatcatttcgccgccaccggacattggaatccgcatccagtgctacaccaggcaaatcgacaggacgaagaccattcgaaatatgccgcccgccaacacgacgttcgtcaagttcgtcgagtggggcgcgaacgaaatgggattgaacttcatctgcgataccagttacaacgatcaagttctgaagaatccgggccggtctatcactgtcgcgtcggcaatcctggcgtcgattcaggatatgtacatgccggacgtggccgcgttcgttgatgatgacatcttgatcgtgaaggatcgcgataaagtcattcgccctgatgaggtgaccaacgtcaattcgttcgttggaattccatcttggtctgaatggggcgttgaattccagtgtctgtttgagccatcgattcgcgtggctggaggcgtggcggtcgaatcgctcatgaacccgagcgtcaatggcaactatgtaatcactgctctggaatacgatttggccagtcgggatcggccgttctatatcaaagtcatggggagcccagcagcataatggccagggaaatcaaaccgttcaacatgttcggcgttcactatacttcgcggcaattctctgctgccgatgggctcagcatgatgtcggaaattcagagtgtgccgccagaagaactgctcaagggaaccagtgtattggcgcatccggaagatcatccggaaggcatctggcttcccttgaccgctgcgaacatcaatctttatgtagttgatcgggcgaaagtaatagctcccgtacaagttcttgcacttctgtccgaagtggtaattgactggaactttggtttcctcaaagactggaccggagtcaagattccatccagatttgtcgaagatatcaaaagcgtgaagacggcacattcgccttctgtagttgcgagtttggtagcgaacggctcagcctctatgcgcgagttggaagagtattattcgactcaagatgcatttaagatgatagacatcatgacggcgaagagcgtgaacgaggccttggcgtcagaggcatcgcacaacagaatcaaaaagggataattcctaaccgggcctgggaaggctatactagacctgccaaatcagaggctttcccatgtccaatatttctctaacatcagcaaaagctcccgacagaacgcgactgatcgccgctcttgacgctcggtcgcgacgggatgctctagatttcgaagtaatgataccggctcaggttgttcaatatgaccggaccgagaatatcgcgacgattcaacctctcatcacctgggttgacacggaacacaatgccgtccaaaggcaccagctggtggatattcctgtaatttccatgggggctggcggcttccacataagtttcccgattcagcaaggtgacataggctggatttatgcggccgaccgcgacacgtctcagttcctggagtcgttgtcaatgtcgaagccgaacaccggccgcatccataagttcgagcacggcctgttcatcccggacgtattccgtcgatacaccatcaattccgaagattcggccgctatggtcatacaatcgacttctggagcgaccagaatttcgattcgcggcgataacatcaagataactgcgccgtcgaacgttactgtggatactccgcaggcgaacttcaccggcaatgtgactatcgctaacaccctggtcgtaaacggcatcaacgtgaacaaccacggccacctcgaaaacaacccgcctgatgcccggacgaaaggcggcatggttgcttaaggagattttcatggcaagttttgatttttctgatttaacagcggggggggttgtaatggctaactacaactacatcgtcgatactggtgtgatagtcgcagataccgccgacgttctgagcgacgttgaggccgagttccgcgccgccctcggtgccaatatcaacttggccgcgagcactccgcagggatcgcttgtcgcggccgaggccatcgcccgttccagtgtcatgcggaatgaagcgcgaattgccaataccataaacccgaacgtttcattcggaacgttcctggacgcgatctgtgccttgatggggatcgagcgcggttctgatctgtcaaccttcggctatggagttcaagtcaccggccgcagccaaacccgcatttccaccgggtctagggtccagactccggccggcgcgatcttcacagtgatgagcgatgtcacgatccctgctggtggtgtcgcgaccatcgatatcaaatcgcaggagtatggcaacattcctctgccggtcgggaatctcatcatcatcgacggaacaattggatggtccggagcaaaagtcatcgcctccactcgcgtcgatccgggcagccgccaaatgagcgatgcagagttgaagaatgcccgcgttaatcgattggccatccaaggtcgcaactcgactatggccatcaaggcgtatgtgagcgccgttccaaacgtcacgtcggtgaacgtaatcgagaacaacaccggcgccgttcaagtggtgaatggagtctcgtttacccttccgtatgctgtttgggtctgcgtcgccggaaacccggataaacaagcagtcgccgatgcgttgtgggccgcccataacggcggaactccatgggactatggtgcgacgaacaacggcgtcccggtggacggtccgaatggcgttcctgtgcgcgatccggcgtccggtcgaaagtatgtcgtgaagtggaccactccaattatgtacgatggatatgttaacgtaacagtccagcaaggttcctcctctgtagctccggaagccattcagaacgcagtggtcaattacgcccaggggaaagtggaaggggaagaggggctggtggtgggcgcgagcctgtcggcattcgaagtcgccggcgccatcgctcgcgaaattcccggcatctacatcaaactctgccaggtcgcgtgcgtcgcggctggctcgccggctccggctccgggcgatttcacttcggaatacgtcatgagcgcattcggccaggctaccatttccgttggtaacgttcgggtgactttcgtatgactctgcctgcgtacaattcggacatccaacaagctctgaaatggctccataaccaggcgcctggaatcaccggcctgatccagagaaaggcgcaatggtatgacagattcagccgccaattctgggccaactgggagcgcgacgttttccacttgaaaactgccaacccgttcggccttatggtttggtgcatcatcctcggcacgccttcgaaagggttcggcctttatccaaaaaacagttcttgggcattcggtcggctacgccagaacttcatctatagcggtacacaagttccgccaccggcagacgcatcgcctggcggcaacttctacggtggcggcaatgccgaaattctcaacttggacgaaatcaggaaagtgcttcagctaagatatgtagcgctgatttctaacggctcgattgcatatgtcaatcgcatgcttcgttacatattcaatgatgatgagccatgggacgaggcgaccggtctgtacttctatctcatggactcaaccggcgagaatggccctgtggagaacttggcgatatatcggaaagattgggaaggtatggtgctgttgtccagttcgcccagagcgaaccacgtgctgacatcgacccctgccagcgacgccgattggccgggagtcgatccggccgcgagcggtattccggtaacggtcgaaacggcgtccgctacggccccggacggctccgctacggtgtgcaagcttactaagccggccgggagtaccgcttacgtctccgcgccgatagatgggccgctggggtccggtagcactgtaacgttctcgttcttcgcgaaagccggctccacccgtttcattgcaattcagtcggctgccgatttccccagtcgagccgatgccgttttcgacctggattccgggaacgtaatcagcgatcagatgctggacagcagcgtggtaagcgcccgaatgattcgtctggaaaatggctggtggcgttgcgttctcacgaccaagaccgtcagctcttcgttccgcgctgcttacgtcgctccggcagaaaccaacttcagctggattgattcgaattccagcgcggagattgacgtgcttatctggggcgctcagatcgaactgggtgatactccaactggatacttggaaactaccggggcgcccgtaaccatgaccgattatgttttgcagaacgcccagaccggaacagtcaagttcacacagccccttccgaccggagtagaagcgtattggactggagactggaaaggcgggactgcagcagaaccggccagattcgcagtcgggaatgggactcaggatacgtttactctgtcagaccccgcatacatcggcctacccaccagtggggcgttcaagctagaatacagggttggtccggcgcttaatctgtcgccgcaattgatcaacctcatgaatgaccgggcagttggtattatgccgacttgcgccggttgcgatgtcaaagtcattcaggagtaatgacgtgatcacacccgaactgatccccagtccgtttgccgctcagggcgataaagacccgattccacaaacctcctccactggcttcgcaaaccttcgcgacggctatacgccggactacgaaatcagcctggcgtcgaacaacccgcaggccaaagcggtcgagcggaagattcaaaaccaactcttcttcatcgctacccagaacgcacaggcgtggcagcgacaaatggcgccgccgtggtttcagggcatgcctggcggctacgaacagaatgcagaagtcgtgcgcgtcggaaatgacggcataatgcggcgctatcgttccatggtgaatgccaatgcgagcgaccctctcagcagcacgacttgggaagaacaacccgcatggtcggcgatgcgctccaacatcccgatgccggccggaggcccaggcctatcttctggcggagaagtcatcacgaccggccgcaacttcaacgacctgttaaatgggacgtgggagttcttctctgattcagtggttatcgcttctcagaatgcccccgtatatccggcttccgctggtgccgctgctggcatgttggaggcgaaatcttgggtgtccggagccaatacgttctgcgtccaacgctacactgatcgcgtcgggaacgtcgctgtgcgcgggcttaatgccggagcgtggaccaactggatgtatgcggtaaacgtcatggcccttcaacaaggtcgggtcacctatggagtcgcggccggatcggcgaacgcttacacgttgacgctagttccgcagctccaaggcggcctggtggatggcatgattcttcgggtcaagttcaacaccatgaacaccggcgcctccaccatcaacgtctccggactcggcgccaaagccatcgtcggcgcggccaacttccctctcaccggcggcgaacttggccaaggactcatcgctgagcttgtattcgacgcagcaggcgaccgctggagaatcctcgcaggcgcgccacgcatccaagttggcaacgccgatcaagattaccaggcccccagctggaaacaggtgaaggattacgtcgcgtcccaaaagctgactgaagtggactgggctgacgtcgtcaacaagccgaacgtcgctatccaagacactacgccgtggttcgccaatctggagttgtctgacgctcggcctttcatcgatttccacttcaacaacaaccgcgccaaagacttcgactatcgctttatctctgaagctgatgggtcgatggcgttctactctcgccaggggtcagctggtcctacccaggatatcctgttcagcaggtcgaatgttacattcctccagccgcgactggatgttgcgaaaaacctcgcgtacatcgcgaactctggccccctttggcagaacaccactgccgatcagcctggttggaaattcaccttcgcacaaggtgtggacgccaacaacaacgcggttatcgcagtcaataccaccaatccggacggctcctatcgctcacagatcatgcgatgggactgggcgtccacgaacgtcatattcaacaatcgtccgctctttgccggtcaatacactccttgggattctggaaactttgatccctccaccaagttgactgtgaatgccacgaaccaaatcgccggcccgaccgggattcggaatacaaacggcaacaccggcaacatgaacacatggggctccagttccacgacggcttcatacggaaacgctgctcttcaaatcttcgggaaaggtggtggcgagcctgccgcgctttatttcgacaactcccagacaggatggtatctggggatggacaaggatggacagctcaagcgggccggctggtcgctcggcaataacgcctacgtgattaccgacgaatccaacattcgtttccacgtgaattccatggctggcactcctgtttggggcggaaacgaattctgggggccgtggaactttaatccgaacaccaagctgaccatcaaagccggcacccaggaaactagcagcactgcgatattcagcggaactatgccattcgctccaatcgcatcgctgtccgattattctcaggcccctttgacggtttacaacgcgccaaccggtccgtctgcaaaaccggccgtcatcgcgttcattcgtcctggcaactggggcgcgttcttcggcatcgataccgacaacaagctgaaatggggcggcggatcgctcggcaacagttccagggaaatcgccgattccagcaacatcatgaatctttgggcggccaacccgaccgcgccgtcctggaacggccaaaccgtttggcgatccggaaactttgatccggcgacgaaagtggatttgaacgccgcgaacgccaccaacggcaacatggtcttcaaccgcatttctggaactggtagcggcatagcttcgtcaggtcgagttggcgccatcaacctgcagaatggggcgcattcggggcaagcggcagcagtcactttcgagcggggcggcagtatcttcgtcaacttcggcttggataccgacaacgttctcaaagtaggtggcggaaacctgggggcaaatgcctatccggtcatccacgccgggaactacaataactacatcaaccaggcgctggttcaggtgggtcttggcggagtcggttcctatggcatctttgcggttctggacaatgccgctccaaccgcgaccgttcgaccgggagtggttgtggacggttccattctcatctactcgtcttgcgccgcaaactacaatagcggtcaaaggcctgccggaacttggcgctgcatgggatatgtagtcaaccgggatgccaacactcctgactccgcgacccttttccagcgagtgacgtaaaatgaaatggacgcggatcagaaaccctcgttggctggatgaaacaaacatccacgccatggtgactttcgaggggatcggggaagttcctttcactgccaatccgcacgacgtggaggcccatggaagggccatccacgctgcgatcctgtccggggagcacggacctatcgccccggtagattcgacgcgggagaaggccttgcaggacgctatacgagcaagggaaaagcgggctatccttcgcgatacccgctggcccatagatcgtcacgacgagcagaggcggctgggtatcgaaaccactgacggacctgggctgatagcagctcttgtttcctggaggcagcagattcgcgattggaatagcggggatcggccgcgacttcccatggctctgaaaacgatgtttaaaaatcaggagtattgatgaaaatcacgaaggatattctgatcaccggaaccggttgcaccacggatcgggcgatcaagtggctggatgatgtccaggcggctatggacaagttccacatcgagtcgccgcgagccattgcggcctacctagccaacatcggcgtcgagtccggtggactggtgagtctggtggagaatctcaactacagcgcccaaggattggccaacacatggccgcgccggtacgcagtagacccgcgagtccgcccgtatgtcccgaatgctctggcgaatcgtctggcccgaaacccggttgccatcgccaacaacgtgtacgcggatcgcatgggcaatggatgcgagcaggatggcgatggttggaagtatcgcgggcgcggcttaatccagctgaccgggaagtcgaactattctctgttcgccgaagactccggcatggacgttctggagaagccggagcttctggaaactccggccggcgcgtcgatgtcttcggcctggttcttctggcgcaatcgctgcatccccatggcggaatccaacaacttctccatggtcgtgaaaaccatcaacggcgccgcgccgaacgatgcgaaccatggccagctccggatcaaccgttatatgaagaccatcgccgcgatcaatcaaggctcctgatattcgcccaaaagaaaaggccgcttattcagcggcctttttgctttccggctttgcctcttcaaccatcttgacttcaaccggcgcggcggactcttcctgagtgaccgaatccacatagttccctagtgaactcagaacgccgattaacagcgctcttactaccttgtccttgactgtctcgcctatgatcttggtcagaacggatattaactcttcccggagtctggggctgattcttggccgaaagcgcttgcgatgctctttgcgtttcatgtttagtcctctgtctgcggtcttctcctcaccccgataatggcttggggatgcgctgtgttaatcggaaggttcgggcgctattataactcgtcgaaaatgctcgcgcttaactgtttaacgatacgcaccgcgatattaaatcgccttctttctggccaaggaactctggcggccgggtccggtctaaggcctaatttgtcgacattaaaacgagaaaacccggatcgcctgtagggcaatgcgtccgggtttatttctatctagtgtacgctaggatcagtgacttccgccccacccgtccagccagcaatcgaagacggcgtgcctcggcttgtccttggcgccatgggagaagtgcttgaaccggatgacctggcccttgagatactccctgtcattccagcggcgctgtttctcgtcgtgggtcaggctggaggccgacacgttgaaagtgactccaggccacagacgttcgttgcggcagactaacgcaccgaccattccggacggcgacaggttttctgcgtggctggagcgggccgtgtggccaagttcattgatgaaagcttcattgttgttgtgcatcaactcttccacgtcgatgatctcagcttcatcgtagtcgtatcgcttgactttcacacagtgcccttccttggcagtcgagcgaccgaacttgtacagcccatcagcgcgcttgcccatggaaccttcgaatcccagcattgtgtggcggcgctcgacttcgctgaactgttcgatggaagtcaccagttcctgctcgaccaggtgaatcctctcatagccgaggcagtgacgaaggaagttcacgcgctcggccgccctggctaggcgatcttcggtcggtgcgcgaggatcggtgaaatcatcgaacacatggaaagaccagtccggctcaccgctgtggcggcgaagatcgccggacgacttctggaaaactttcgggtcgctgatgtcgccgcagaccagctcgccgtccaggccgttgaacagtttatcgctgaggtattcgtagatcgattgattgttctgccgcttgagttgacgagtcagcgcctcgccttcgaatacgaagcagcgaaatccatcgatcttcggcgagaaatacatcggcagttggccttccagcagcttcgggtcaaaattcgatgcgagcatgggtttcatacagttctccagaaaagaagcccggcgaaccgggctaaatggcggtaagccggctcagatggtttcgttggcgtggttcagttcggccatgatcgacgcatagcgctcgtccgactccttgatgaacacgccgtcgtacatgacgcctttgcgatccttgatggtgtcgtaggccgcagcgtagcaggcgagcatggtagtgtcgtgctcttccgtcacatcgaacagagtcatgacggccaataccaggctcttgatggctaatccatgatttccgcgtgccagcgcgccggccagatgtccgaggtgctgcaaatcgtcgccgtaggtgggatgaacttcgacagtctcgctgaagaccgatagatgatcgaacagattttcaccgagttgcgcggccatgatcgtggcaaccaccattacgtcgccgatgccgtctttcacctcgactggtttgttataaacccaggcttcgcaaacttctgcgaactcttcgaccaacttcaggaattgatccttggccgaagagcctttgatcaggttccggtcggaaccccatttaacaaccaggtcgtgaagttcgcgactcatgatttgttcgatattcattctttcgattccttttggatttgggattttactgcgttgattatggacgccgtgctctggcgcgatccatccttggtggtgccgaagtagaaggccattaccgacttcagctcggcgaaccaatagccgatgatggtgccgatggcgaccgaggatgttgggtccatcagagcctcgcggccgaatgtgaagattgcgatgatgatgagaatggagcctgtcagaagagcgaatgtaatcgccgggcgaacgaaatcgttctgctgcgccgcaagcctcctcgcagaatccctgtcggccgcctctgcggcgaactggctaagctcggcctggagctggttctgctcagactgaaggcgattttgttcggcttgaatcgcaagctcctggagacgaacgcgctcggcgctctggagttcggcgagacgcgctagagcttccggattcgcgtctagagcgctagcgaccgaggctgggtcggccttcgaccccagcgccgtcgcgacgatagcacccacggcggcgcctgcaggcccacccaggagcgaccccagagccggggcagccgcgccgatcttactacctatgtctttccagtccatttcgactcctcaaaagaaaggcgccattacagcgcctttctccggccggtgattcagaactcttcggcttcggtcgcatcgccgacgccaccggcgtcactgcgaggctgttcctgcttgctgtagtccaccttcacctcgccgccgacgaacgacttgtacaggtcggccgcagccttgaagtgatccgggttcttcaccaggccttccagctcgaactggacgccggaccagctacccttgtcgttcgacatgcctacggtggtcatgcggaccaggttggcgaaagtcggcggggtgcgcaggccctgcggggtctgaacctttttctgggacagcgcggtcatgagcttcttcgaggccttgatctgcgaagacgacagggagatcagagcctggccgaaatcgccggtgtccggatcgatgacgatgacgtaatgaccacgggtgtcggcgaagtagtcagacttcttgtcgctgaccgaaccgtcttcgttcggcgcgtacaggcgtccttcgacttccttcaccttggtcgggtctttcatcatttccttgaagtcttcgacgctgatggcgcccttgaaaccgccctcggcctcgcgaccggcccagcggatgaactcgcggcggtacgcggccggaatgatcagcaggccggtcttgccgtcgtaaatcttgccggtgacggtgttcaggaacatgccggccttcgcgccttcgatgtacttcgggtcatcttcatcgacctggggagacatcttctgcagaacctggatgaaggggatggcataggactcggcatcggcgccttcgaagcctgcgccgtcatacgatcccaaatccatgaagtcgggaacttcggtagttgcgacggcgccgccaccggtggcaactgctacggccttggtttcttcggttgcttcggaagtttcggttttcttaccagccatgttaggctccttgtttgtcgaatttcagttatcgctaactgtgggtttataataacggaagttgcaactaagtaaagcaaattacatattaagatttgctctttttcatcttcggtttcgtgatcttggcctctttgtattcgtgcacgccgatgaaatctggcagctcttcgcccttctccagatactcgcggccgaacgcctggagggtctggtaatggacatcgcggttgatggtggcgtcatagccggcttcgatgatggcctcggccgccttcttcgcatcttccatttcgccgcgaccgaactcggccagaaccttggtcttgatgatgccgtcgttgtctgtgtcttccagccacttccagaacttcgatttgttctcttccttgacggaaatgatggccttcggctcgactttgaccgtgcgaccgtccgccagagtagtggtcttttgaccaagctcctccaacagctccggaatggtgttgcgcttgagggttttcagctcctcttccttttcggccagcgccttttgaagatcgaggatttcgacgtccagctgcgaagccttgtccaccaggttcagcagtcgatggccgatgtcggtagcttcgaccgccatttcatccatgacgccaaaatagtcgatttcgcccggtgcgttctctttcaggtattccgggatttcaagctcttgctctttcatgtccgcctccaacttagtgatgttcccttacttgaactaagtattgagtagatattatgccgcatcttccttgatacggctactgatttacatattaaatttcgtcgcgagtgctaacgtcagcctcaaacactccatcaacgacataacttgccaggttgcgcttccactccaagctgacctggattttctcgtcgatggaatccagacagatcaggtcgaagtacaaaaccgagttgacggtgccgattcggtgatttcggtcttcggactgcatccgcaactcgttgtcttcgtcggtcgtgtagtaaatggccacgtctgcggcggtgagcgtgatcccgatccctgctgcggccgggttgcccaggaacacctggacgcgcttggcctggaaatcgtcgatcaatttttcccgctcggcctctttggtctcgccgtagtatgtgccaaacgaaattccttgggcctccagatacgccttgatctggtcgatttcctgaatgcgcatggcccagatgatgatggagcgctccgggtcttcctccagcagaccctccagaagatcagtaaacacggcgaatcgcgggttgtcttcgggcggcaggatcaccggctcgccatagacgttgatatagccggatgcaacttgcttgagcttcgaacgcgctgccgcagcatcgaaagatacgtccagcatgaagtcttcgttcttgagaacgaagtggtagtcttcttccacgcgctggtaaacttttcgttgctccggcgacatttcgaagtatatgcgcttgtacaccttgtccggcaggaatgggagtgcttccttcttcgtgacccggaaactgtgcggctcgatcagggaccgcagcttgtccaggttccggaataccgggcgcccacgctcgtctttttcgaccagttgcggcggcatggtttgcttcccttccagcttgcgcatgatagcgatcattcgaggatcgtcactgggaaccaaaacggaaaattcggccacgaacgcccgataggatttcgttccaagaattccatcgcgcaagaattggaactgcatgaacaaatcggtaggcgcccgcgttagaggagttccggaaaggatgcgacgggccacggccttctcacccagctttacgatctttttcgcacgcttggcttgcgggtttttgatcctcgtggactcgtcaacaattgcgcaaaccttgaaagtttcaaggaatcgcaagacttcatcatagccagcctggtgattgatggcgtcaacgttgatggcgaagacgcgaagaactttttcatctgcgaacgtctcggcatacagacgatccaagcgcgccctggcctttttggaagtcggtcggccgcgccaatccacgctcaaagtcttgatcgcgacgtgggtgggaatctcgcgcagaatccagttggtgtggacgcccttgggggcgacgatgagcagcgcgtccacgcgcccctgtaggaagaggcgaacggcatcggccaaagtcgtccaagtcttcccggtgccctgctccatcaggtatgcgaaattccgtttgttcagggacgcggccagggcattgaactggtgctgcatggcctcggtcttcatgcccttgacgggatatgttttggctttcatttgttctccaaatcggcgaggaactgaacaatgttatccagtccttctgcatagctcgcaatttccaccaagtcgcggctgttaagctcgaacaaatcgagcatgggattcagcagcagccaatcggtcccgatcttggccaggacgaagccccggccgccccagccgatccgttcccgaaggaaagggatttgcccaggctcgaaacatctggccattgggcaggtggaggcgcgtttcggccactcctccaacgccttgaactcgacccagaactggacacctcgacgattcaggcaaatcgaatcggacataccagaccgccgcgtctccagaaagtcgatcaggattcggccgagtgagcgttgcttaaacgcattcgccgctttcgtttcgcgatcattcatcgccttcgccctctttggaaactttctctgcttgcgctgccagctttgctttttcgcgttcggtcaaaatcctcttgacggccttcacgatgaacatatcgattccgctgagcttccagcctttgatgaggaaccaagagcctgtcggcgttccttcggcaatctgctttccgtattgcagatatttttcaggcctaattctgaaacgtatcggctgatcaaccgagtcgtcaacacacatgatgtcgaggaactgcgactggcccttgtacaccgggtttttcccttgatctgccctcttcttctggcgaatcggttcgttctcatcagacagaacttttttcaccatcttgacaatgaccaggccatcgtctccatcgcggatatcccgaatgttctggatggggtttccggaagttactccaaccaactccggattgtcataagcatgaccccagagcgtgtgagcttcgttcaaatctgcgaattgaacttcagaattcgacagactcgcggcgactttctcccaatcctgaagcgtcttcaggtgggttccggccagctctttatattgagctttcagctccctaagatcggcctttaactccttcagatcggccttcaacagtttttccagttctttgtcttggctgattttcgccgaaagaatctgggcttccagcgctgctacatcagcagccttgtcctcaacatcctgtgccgatatcgggcaattggccagggcgatcctcgcggccttgacgtcatcacgaaggcgcaggaacttctctgccttcgccgggccgaagcctttggcgttcatgatgccgccgatcaggcgcccgtccgccactacccagttaagttcggaatgctccgggtccagggccgtatattctacgccttccttggccaattcgcgaaggatggacacagtttgctggtcgtctttcgccgcccgaagacacgctgccgcgtattccaggcgatgataccgcttcatgtagcaggtccagtacgtcaccacagcgtagctgaccgagtgggagcggttgaatccccaggcgccgaatgtcaccatttcctgccacacacggtgagcatcgtccggggcgacgcctatggtcttggcaccctcgatgaacaattcccggcgcttgttgaagaactcttcaccctttcgcgcagacatggctttccggattgccgatgtctgctcccagtcgaactgtccgatgtccttgacgatggacatgatctgttcctgatataggaagacgccgtacgtccctgacagatattgctcgacctgcggaatggtataggtcacaggctcgcggccggccacgcgctcgatatacttggtggccataccagaagacaacggacccggacgggctagcgccgtgatgtggtcgatgttttcgaacgcggtgatattgatcgcgtttgcgaccgaacgaactgcctgcccttcgaactggaaaatgccggacattttgtcttcgttgagaacatccaggaccgccttgtcgttcaaaggcaagtcgtacaactcctgcgcagtcacacagttcgcgtcctggatgacgcccagagttcgaaggccgagcgcatcgatcttgaggagattcaaatattccgaatccggcttatcgagctgcgcgacgccttcagaagttaccgtacagaagtcgataacttcatcgttgcagaccaggatgcctgccgcgtgtacgccagagtgggatgggtgaatttcgaggtcgcccatgcaggcggacgcgatctcatacttttcgcggaagtcgcggccgggctgagttttctcgaaagtgtcctccaatccttttccatatcgttcgtccgccgacgtatattcaatgatcgagtttttgatgttgtctgtatcgtggaaggggatgccgaagcgctttccgacgtgagcgataaccgacgcggccttgagcgtgttgatgttgcccaacttcaccacgttccaagtgccatacttctgctggagatattcgaacactagatagcgatgggtatcggcgaagtcgatatctatatcgggaagatcggaccgggaaatgtcgataaagcgctggaagagaaggcgatgagggagcgggtcaacctcggtaat

SEQ ID NO: 41 - DNA, 66883 bp, synthetic construct
  source 1..66883: mol_type = other DNA
aatcctaatagaaaaaatctatcacggacgttacctatctttaaaattaataaaattaatagtaatttggtaatttggtatactttggtattgaaagcctcgcggcactaagcttgtacatatcccgtcaagtttccgattccggccagctcgcggcagggtcgccggaaacttccagacttacaatccatgggtcgcggcaacaccacggcggactaagcggcaagcgccaaaactcgacgaacggaaccggaaatttgggagcgcgacagaatcgctcagctggacatatttctaacattcgatttaacactcctcccaaacactcaccaccatcctcacccaccaaccgccgactcgaccctcacccaccagcagaccgcccatataacatcctataacaccacctaacactcattcaccatcaaacccacccagacctacaggccacccacaagcagcccatagacgcgatccctggccccatagtacaatcgcgccatactcagtgtcgcggcagagcaccaggggccatccgccaaccaagccaccacgacgactccagaatcgaactcagggacgcagcaccaaatgaccaaattctacagccccgacgatctagtcacgccacaggaattcgcagacccgcatttcgcggcgatcaaccaaaagcgattcgacctgtacatcgacctgcgcgtccaaggttacagctcctggcgggtcttccgggccatctggggcgaggagcatatggacggtcccgcgcaggcccgcatcttcgcgatggagtccaacccgtactatcgcaagcagttcaaggccaagttgaacgcgaccaaaacgtccgatttgtggaatccaaagacggcgctccacgaactcctccaaatggttcgtgaccccaccgtcaaggactccagccgtctgtcggccatcaaggaattgaacgttctggctgaaatcacgttcgtggacgagtcgggcaagacccggatcggtcgcggtttggccgatttctacgcatcagaagccgaggctcagaccgcgaccgtcgctgctgcggccgaagccaatggctatgtgccggaaggtgaagagggagatttcccgtctccgtctccggaaccgaccgaggaagaccgcgccaaccccatttagacataaaataacggctaaggatttaaggtaaggaggtttatttatgcatccgtttgaccaagctgtggttaaggatcctaccgcaagctatgtagatgttaaagcacgtcgtacctttctgcagagcggtcagctggatgatcgtctgaaagcagcactgccgaaagaatacgactgcaccaccgaagcgaccccgaacccgcagcagggtgaaatggttatcccgcgtcgctacctgtctggtaaccacggtccggttaatccggactacgaaccagttgttaccctgtaccgcgacttcgaaaaaatctctgcgaccctgggtaacctgtacgttgcgaccggtaaaccagtgtatgcgacctgcctgctgaacatgctggacaaatgggcgaaagccgacgcgctgctcaactacgatccgaaatctcagagctggtatcaggttgaatggtctgcggcgaccgctgcattcgcgctgtctaccatgatggcggaaccgaacgttgacaccgcgcagcgtgaacgtgttgttaaatggctgaaccgcgttgcgcgtcaccagacctctttcccgggtggtgatacctcttgctgcaacaaccactcttactggcgtggtcaggaagccacgatcatcggtgttatctctaaagacgacgaactgttccgttggggtctgggtcgttacgttcaagcgatgggtctgatcaacgaagacggttcctttgttcacgaaatgacccgtcacgaacagtctctgcactaccagaattacgcgatgctgccgctgactatgattgcggaaaccgcctctcgtcagggtatcgacctctacgcctacaaagaaaacggtcgtgacatccactctgcgcgtaaattcgtttttgcggcggttaaaaacccggacctcatcaagaaatacgcgtctgaacctcaggacacccgtgcgttcaaaccgggtcgtggtgacctgaactggatcgaatatcagcgtgcgcgtttcggtttcgcggacgagctgggtttcatgaccgttccgatcttcgacccgcgtaccggtggctctggtacgctcctcgcgtataaaccacagggcgccgccgcacaagcaccggtgagtctcgagcaccaccaccaccaccactgaagaagcgacaaagccccggactctagttcagaatccggggttttcttttgggcgccttattcgccagcttcgatgatttcgaagttgtatttgacgccttcgtgctcgaaagtcattttgccagccgccttcagctgcatgcggaagcggatgtgtttcgaagaaggcaggccgaactcgatgaatgctgcgttggtggaccggaactcgccgcgcttgcctttgacagtcacagccacgccatggcgctgagtgcgtttcttggaaacttccgggtctttccaggagttggcgatggctgccgacaggtctttggactctttggctttctccggagcgttcttggcctcttcgcgcatcttccggatttcttccagcgcttcctcttcggtgatctcttcttcaggcttcagattctcttcctcggccttctcttcttccttcttcttcttggaagtgcgggttttgtagactttggccggggcttcctcttcctgaaaggcttcttcctcggccggcagagcattcaggatggcgaggcagcgacgctcagcagtcttgcggtcagagaaacgcttgacggtcgcatcggcgttgtgagcgttgtagaaggcgaccagttctttcatttctgcgttctggatgtcgccgaaggttttgatggagttggtcattttgcgatcctctgttttggaagatttcgttcgggcttcggtttgtcgccctgttgaaagagattatgcctaggtcgatgctgcgtgtctacatttatttcatcagattgatcgcaaagccgacgaacggttgtctgatgtgaaaacaccgcagagcaggttgcggtgtttggtgggcgagggcgatggtcagaaagtcgggactgtgatcggctcgattggcgggtcgccgggcctgtcgttgtccgatgcgggcgccgggctggaagggatcgcacccgaccgaagcgccagcgattccgactgcctgcttacctgcggagctggaggcgcttttggcgcatgaggcgcgggcggaaccggcaggcctggaggagccatcggcgccctgggcggctccggaagatcgggcagatcaggaagactcggcgctatgccgccaaaggaccgctgcgacggattgtcgccgaacatttcggcggatcggttgtccttgatgacttgacctatggcagtcttgtcgccacccggttctgctggatcgaagcccgtgaatggagtggtaacgcagcgcatgttcggatgggtcggcagattgttcaggacgatggagtccgcccagacatacgggtttttgtggttgccgggtccgtggctgatgatctcggcaggaatatggccgttcatggtgagccattccgccatcccttgccgagtcagcgggcttaccacgatctgaccagtggactctttggcgatggcgaacagatcaccgaattcgaatccgatgattgtgtagttggacctggactcgccgacgaaagccagagtttcgatgttgtggtggatatcttggtcttcccagatgtacagcatggttcgctcctcaataaggttgcttttggtgttcgaccagagacataccggccggaactttgaagcggacgtattcgatcatcatcgccgttcgacgccgattcgtgcccgactcgtcattgacgaatagttcgcactggtgcggaatgactcgcgtcaccaggtcttcgcctttcgagccgtagaacttgatgtaggatgcgacgcctcgcgtcatgttcagacggatcgtttcgcagagtcgctgcgcggccgacgcgctagacagatcggtcggactgaccgtcacccagtaatggccactttgttctttatcggacataagctgccctccaatgagaaagcctctgcgactcggcagaggcttgttgttgttagtcgcgcttcaacagaacgactttgtcatatgcgcgatatttaccgcgccagtcttcccagtagtcgccggccgggcaggtaagctccagggtgatttcgtcgcgccagcattcgacagaaaggacaattgccttgttcctggctgcggaatccgccctgagcttaatcagaatttcgtcgccagttttcaactcatcaactcttacaacttttgccatggtgttctcctattgggcagcgccgcgagggcggatcgggtcgatgtcatgtaagcagatggtaggatagtccctggccaacttgagcttgaagtccacccagtcagcgccgatgagtgccgagacttcgatgcttactttgctgtgcggcgcagctccagatcgcaggactgtggcccgacgccgaacgggatcgttgacgtcaacatgagtgagtatttcgtcgccgacgagcaactcacaggccatcaatattttggccatcatacacccctatgagaaggcgcgcccaggacgatcccagccgcgccgatggattaacgtttgtgaaggatggacactgcgtccacgtcgaggatgctaatggtacggcgacggcgcggattgctgcgttcatggatgcgaatcaggttcgcagctggagcttcgtccaccacccatacgtcttccggtttctgcgtccggagcaggaccgtcacttcagtattctgggcgaggccgttgcagatgaaagtgaacttggacgagggagttctgtacatttcgagattcctttttggacttctggtccggcttctcagccggtgaagagattatgccctgattctcaccgccgagtaaagcatttgtgtaccaattctcccgtcaggtggaaccaaagtgcggtatcgcttatggctacgctaccgcgccatggcccttcttgctcgcacactgcgaaccacaggctgatttccatccttgccaggactcggccgaaagattcgaacctgcgccgactggacaggatgtcgacattcactcgtcgattgacctcataccggcgaccgttgatgacgaagaccagccgcagggtttgtccgtcaagacactcccagtatctggtttcatatcggagccaatagcgcttgccagccgggcctaccatggtcatttaatcgatgctcctggccgcgccacgcggtccggtcggcgggacgggatcgaaccgacccaggatgtagtcgggccggcgcgcttcctgaggacacacggcgagaaggcgccatcctgcgtccagggcagactggagttcgtccgtgcagcagtcttccttgagcagcagacggttgacgttctggagattcggaccaggtatggccgatcctgtgagtgagttccaaccctcgattccactcaccatctccggttggttgatgtagcttacggacataccggccaaccggctcgcggccagctccagacgctccagcatgggtcgcagagcagcttccgggtcaatgtcgtcccagagaaggaccaggctgatgatggtatacggatagtccttgtccagatcccaggctgaagcggtcaggcggcccaggccgatttcattacacataacgggaacgtcgttgctccaggtggacggctcccagttcccctcaccaggattcccgattgttacgccttccaggttccccaggagaacgtggagcttgctgacatattccgcctccaaggctttccgctcttcgtcggtctggttgtggcgatagaaggatggagggctgactttggcatggtagagtttcataactgttcctcggttttggaagatttgaaagttagagaatggtgtcgcagtatttctcgaaaggactctggcgcttcttctcgcagatcgcgcaggtgatttccaggtcgggcagctcgctgtaagtcttgccgagatacagccagcgcttgcacagactgcggccgtccgacgtgaagaagtggactttgcgagcattgccgggttgcggccagccgcttggtgccggcttcctgctcataccatcaccacgtcaatttcgtcggcgaagaagttaaagccaactccatctgcgtagccagtgtaacgcagacgagtcgtcccatcaatgtgggcttcctcgacgccgatgacttccagggtggtatcgttgcagtacagcttgacgaacatcttgatgccggagccaatcgccgcgaaggcgatctgcttgtacaggtcttgcttgatcatgctttacgctcctgtttgcggatgtattctgccctgacttcggcttcgaacttcgcccagagcgcgttgtctactggaccccagggaccggtctgagttccgtccaccggcgcgaacttgccaccggcgcgacgatacttggacagcgttctcaggctgatgattttctcttcttgggaatcgaattggacgatcacttgacatacttcccgaagtagcaggtgtggagtatttccaggcctttggagatagccttcagcttgatgccgaaattcttgatcgcccagtccagatcgtggtgatagaactcgatgatgttgacgatttgaccggcgctgtagtggatgacgcgaaccttgccgttccagcggaaatcttcgcggctgtttacggcctcgactgcgatggtgtcgtttctgccgatgttccatttggagctagtcatgtcgcaatcctctttttggagtgtttcgcgttcgatgaggtaactatacctcagccacctcatcgagtaaagcattttcttcagattatctgaaaccttttgaagacaagaattgccgccagagccagtcgatgtgttcgttgcagtaacgctcgccatcggacgacatagataaggcgccatcattgatgccgaagtgggcagcagcgagacattcgaactcgaactggagcgttcctgggcgagggatatgggacatggcgtatttctgcacggtcagtgatcctcagaaggtttagcgtttgcgatagccgctactttctgcataccgaggcgatagaaatcggcttctttcctggcttttgtaagctgctccatggcgtcgcacgccgtcttgtgctgggcattggcgttcttgatgctgccttccaggctcttgtccagctcttcccggagcgccttctgcgatgctagctctgcctccaaatcctggattctgagctggagctggcgatttgtctcgccaacctggttttcgcgggcgatggagttctgaaggcattcgtcaaggcgagtattttcgcgcaccagctgatgcttttcgactttcgcctttctgcacgtctctcgcatttctgaaagctcaatcgcatgcagatcgtcatccgggtctttacgctcttccttcgactccatccgcaggtagtactggccggctgcgaaggcgagcactgcctggtcggcatacgctgcggcatcggtcatgtatctggatttgtagcgaggcagaaacttgcactcctctggatcccagaggagactatcggcaataggccagaatttgcggaagccatcaggatcgacttctacattgaccatttgcagctggccggcctccacttcgacttccagaggaacctgaatggcgccggtgatgtactggaagtacactatgctagacataacacaatcctcataagaagtcgcggccgggaccatcccagccgcatcgtaatcactcttcgccttcgtccgcgctcagccactcttcgaaggcgaaatttaccttagactcgacccaatcttgaagctcatcggcgaactcgtcactgtcgatgtccatcggaatgcccagagtctcttcgttccacagttcggcattcagttcgaactggatagccggttcgccatccacattcagcaggatgcggtctgcgacttcatattcgtcgacatcgaagaggaaaccgccgctgatgatgtgctggatgaaagcttcgtcgaagttgctgatgccgatattgatctgcttagtcattttttctggccccttatttggcgagtttgtactgagctttgagggtggtcagcttagctttcagggcgatcatagcctggccgcgcaggccttccatttctgcctcgctgatggcgatcttggcggagcggatttgatcgttgatctgggatttggtcatttctgcgttcctctgttttggagtgtttcgcgttcgatgaagagattatgacgctattcagaatggaagtaaagcagaattgtgaaatatttctcaaagtggacgaacggtatgccccgtcaggaatatttcctcccatggaaggcatttccgcatccgaatgttgattaggtatcccaaagcgcgcagtggcgaatgtgagtccgcacgtacatagggttgtattgtgcgaagtgctcgacggtcgcatccaaggctctgctattgccgcacccttccgctttgcgagccaggaagaatgcttctatttgctggtttgcgttcatcgtcttaccctccaggtgtttgttcgtttcgatgaagagattatgccgttggtcagaatggaagtaaagtgtattaacaataaaattatgttcaccgacgaacggttgtgctcgaccgtccgttgcggcgtcgatatactcgacctattgctgacaccggattgattagaatgtacaaactcaaccctgcactgcgagcagtctggcgaactcgcgcccgttacaaagtcatttatggcggccgggcgtcttcgaagtcacacgacgcaggcggtatcgccgtttacctcgcggccaactatagactcaagttcctctgtgctcgccagtttcagaaccgcatcagcgaatcggtctacacgttgatcaaggacaagattgagaattctgagtacaacggcgagttcattttcacgaagaactcgatcaagcacaagatgaccggatcagaattcctattctatgggatcgcccgtaacctgtcggaaatcaagtctaccgaaggcatcgacattctctggcttgaggaagctcactacctgacccaggagcagtgggaagtcatcgagccgaccatccggaaagagaactcagaaatctggatcatcttcaaccctaacgaagtcaccgatttcgtgtatcagaacttcgtggtcaagcccccgaaagactcctgcgtcaagatgatcaactggaacgaaaatccgttcctcagtgagacgatgctcaaagtgattcacgaagcctatgaacgcgaccgggagcaggccgagcacatttatggcgggattccgaagactggaggcgacaaatccgtcatcaacctcaagttcattctcgcggccatcgacgcccacaagaaactcggctgggagccggccggatcgaagcgcatcggcttcgacgttgcggacgacggcgaggatgcgaacgccactacgctcatgcacggcaacgtcatcatggaagttgacgaatgggacggcctggaggatgaactgctcaagtcgtccagccgcgtttacaacctggcgaagatgaaaggcgcatcggtcacttatgactccatcggcgtcggcgctcatgtcggttcgaagttcgccgagttgaacgatgccagcccagacttcaaactgatctatgacccattcaacgcgggcggcgctgtcgataagcctgatgacgtctacatgaagctgccgcacacgattatcaagaacaaagaccacttcagcaacatcaaggcgcagaagtgggaagaagtcgcgacccgattccggaagacttatgaagcggttgagcatggaaaggtttatccatttgacgaattgatttcgatcaactctgaaacgattcacccggacaaactaaatcaactgtgtatcgaactttcgtcaccgcgcaaagacctggacatgaacggccggttcaaagtcgagtccaagaaggatatgcgcgagaaacgcaaaatcaagtcaccgaacatcgctgactcggtgattatgtcggccattctgccgatccggaagcccaaaggcttcttcgacttataaacatagaaaagcccggatcgctccgggcttcgggtcttactcggtgcggttcctggcgctgagtgtcgacgcaacggcctcgccgactcccagggcttcctggccggccgcgagcgcttcggcttccgactcgacgatgaaatcatcaccttggccatcgcctggcggaacctcgaccagcacggcttcttcgccttcgaaccgcaggtcataggtcttttcgacggacagaccgtaacgagcgttgagcgcgtcccagagctgggcctcataggtccgcaggtcttgcagagctttctggtggctgagcatggccatgtcaacggcccgttgcagggtttcgtccaggacgttgaaccgaatgcgaagagaacgaatccgctcgacgacttccgcatccactacatgtctttcgatcattacttttcacctttgctgaatgtaacgttgtagccgttgtcggccaggtaggtcagggcgccttcgaaggaagttccgacgaggtgctttagcttcatttcgcgttgcgcggccagccagaatgcagttccggagaactcggcgcggccttcggccaagaccctgccatcaggcccggcgatccgtacatgcacggaagatagcttgatcggcatcagtgaatacctccactggcttgcgacggcatgctttcggcgcgtgcggcttcgcagtccgggcagggacatgcctggcggacgcgctccagctcgtcggcatccatgacatagagcttcccatcggcagtgtcgtgcgccatggcgatgttcgggaagtcggtggcgctcaggccggcgacagcgcggatttcgtcccaaagcaccagatgctcggcattcagtcgggcggcgagcgcttcgtgctctttagcgacgcgcgccatgaactcgtccacccggaatgcgaattccgcatcgatggcacgggccgaggccatggagctgagtcgaatcggttctttcttcatgatgattctcttttggttggcggttgttcgctgctcaggcctattacagtctgagcagcatgatgaagatgaacgcaaggaacgcaaacggcacaagtatgccggacatcagctttgacaggcgctgcatctcagcgtatttctcggttgacattccgtgctgcgccgcctcagctgcgaagcgggctttcgcctcgataacttccgggcgtagcgacaggacatattctaaggcctcttcccgcgctttttcggcctcgaccgacctagggtcgcgggcagagacttcgctgtgccctggcctcgcgggatgggcttgcagagatggaggaagttcagcagccacgactccatagtcggcgcaggcccaagcgatcccgatgaggatcgcgaggatggattggacgattcgcagcatcactttgtcgctagggaagttcataatcaatcctccaccgaccgaacgatttccatattgcgcccggcattggcccctgcattgaaggcgcgccgaccgtcgctatcgtccagacgcatgagcttcgtaacattggacttcttgtagccaggatcgccgaaatgttcgtgaaccgcagcttccttcaccacaaccagagacgttccggcagaagataccagctccatacgcttcctggttatggactgaaggcgatagctgatttcctgggtcgcggccagtttgaattgcgcggcaacctttacgttgaaacgttcgtacccttgcgccttctgatactcccgacacagacgatcaatggcctcgaccagggagttgaacatgttcaccgccagctcaacgtccgacttgtagcctttgaagcgtacggcatgaccccagcgcttggtagtgcttccgtcgcgggcgctcctggatgccttagccgatgctctgtggttgttgatgccaccggcgaaatccatgatgcagtcattgtatgtcgccacggccactgagaaaaacttcatccagttcgggattgcggaatagtaacgagtggcaatttgctcatcgaactcttcgcgaatctcgccggtagcttcgaagtcgtgaaggtcatatttgtccttcaacttcttcacacgctcggctgcgatggccgcttcgtgcggactggaagagtcggctgccatggcggtcagtttgcggatgcggtctttcgccttctcgatggcttcaggggtgaattcgttctggtcggtcatggtcggttccttttgtctgaagggtttcgcatttcaatggagctattctgccttcattcagaatggaagtaaagcactttcttccactatttcggcatcgactggaagaaattccagatccaatcacctgctaccagcaagaggatgagggcggcaaagaacaagacagcggccgcgagctgtgcgcccggcttcagtttgggatggctgagcttgggctctacgggaacggccggagcgctagcgctgcaaccggcgtctcctgggccgtagccgatgccgcgttcacacgcctggagcgacaccagggatttaagatactcggtctgcttttgcgactcttcgtagatgccggcgacggcgaaccagagggcgaacactacggacgtacacacaacccaggcgccggtcagcaggagggccagcgggccgatgacgaagacggtagcagccaggacgattgcgccgccccagatgatgaagccggccagaccattagtgatgtcgacacagaactttttcattttcagattccttcggttacgggatggaggggatttgaaactctgcgccgccgagaacatcaatgacgacttcccagagcgtcggaacagaccactggtaacggtcgaagtcggtttcaggatcgacgcccagcgtcacataggaagtggcaggccatttatgagcactgcctttccgcatgagagtcgccacgcggccgtcaccgagcggattcgtcctgtgcggaacgtacgcagacatcgaatattgctgcccggcgtcgataacaaatctttgcctctggcgcagacatacagagcccacaggattccagccgcgaccgccgcaagcctggcgagccgaagaatgctcataaccttcgtgagtcatttcgctgaggcaagccgagcgatcctcgtaatagttgatgttctccatcgatccaaccagcaccagagactcgaaatcgaatcgatgatcgtggatggccgagtgattgaagcaaagccgacgcggcagctccgggtgccaaacatggaggcgaccggccggaagttggacctgaatgaaccccaggccgtgcagagtgatcttgtccttcatcgggtcatggacggtgctcatggataatcctcagtagcagaaatgtattgtgagagttacgattgataagccggtcgcccatagaagggcgaaccaggccatggctttgatggtcgtgtagatcatccgaagaattttccggcacagatcgggccaatgcccatttcgatggatgcgtggttggtcaactcgcgaccgcagcaggagcactgaccagtcttccgaccgtaggcgactgccgattccatcggcttttcgaacatcttcagaacgtcgtcgtgctcagtatcggtgcagtcgcgactcttgatgaatttgccattggtgatccggccgaggtagatgccgcccaggacgtacaggctaccggcgttccggctgtgagcgctagcctctttcacaacaacgatgagcggctcctcgccttcgccagctaggcggattttcgggcgcttgataccagactctttcgccttctcaaacgctttctcgatgccggaaatgtccagagtcggcgcagcagcttcctgcgctgccactttctcgcgatacttggcgaggttttcgatggcgcgcttcgcagcagcgatctgattttctgtcaaggagccgtatttatacaacgactcctgaaggctctgagcgaagctgaaggaatttccagtccaccactcgatgatgtccgggtgcgcggcttcgaaggccttaattttgaggtcgcgctcttgcgcagcgctacagattttctcgatgcgcttttctgccgccttagcacggctcttggcgcgctgctccgggctggttttgtactctttgtatccgacgccgccgcaggcaaagcaggcgcgaccataagacgaagggccacggtacaggccggtgcctgcgcatttggtgcacttgtcgcgatacagcttcacttccttccgggagttcgggcgggcacccatggacacgtcttccagggtcttcggcgcttcgttgttgatctctacggtagcgaagtcatcacccaggtcttcgaagccggtgaacagattctctgctgcgttcatgtcgattctcctgtttggaaagttcgtttcgatgagttgactatacgccagaaatggaaaaacggtagcgatttctcactaccgttcgtcgggtcgaagacaatcaataaatgtcgctattgatcttgaacccatgctcagcgccgtcgttgtagtcgtactcagcatagctgtcgcagtagtcgttcaaatgctgaatgatgcctagaacgtcgttcgcggcattgtgccgtttcgcggcgatggtcttggcgatgctgtcgccgacttccagggtttcggccgtccggcgatggatcagcagacggctccaaagatagagccggacgcgacgaatgatgtctcgatggcgctccagtcgtccgtgcaactcttcaatttcttgctcgcgagatttcactactcgtcgaagctgctgaacttccagttccaaatcggccttagtagccatgttcacctcaaaaaggaaaatcgtctgggactccaggaagttcgacgattattgttgagcctgatcgatccagaatgcatccgaccgagccagccctgtggggatagggtctacacgaactataacaggtaacttccatgactattcgccaggtcgatcctccacaccatctacagactggtgggcgcttcgacttcagttttcgttcgtccaagacggcgcgtctgtcgcatgaaaggcagcgcgccttaaccgacgtaaccatgggtatagtcgatcattcggatgagaccatcatcctctgattccctcgacttcagaccgcccaaagagtccgactggccgttgcatttcgcatcgatatccatcgaagacaggaatcctgccgatactgcggtgatatcaactttgtcgccggccttcttgaagtcttcgcactcagcatcgagggccacaattgcactcgcggccatgttcacatgactgatgaggtcggggaagatcacaggaacttcacgcgacatgccacggaccgtcagcttcaggactacatacttcatactcactatcccttttgtatgtgaggaaagaacttgctgttttccggatggtgaaaacgctcggtcgcaggcggtctttcttccggacattgaatcgtcgaaggcgggaaaaccgcgccggcgataatcgccgcgaggagtgcagcggatgtcgacatccagagggcggtttccaggctcacccgaacttccggacggcgcggcttcattcgctccaccctcttcctggctcataggatggcagaccgccgccgcgaatccaattgtcccacatacggttcagaccagtcggtggctggggcggcggactgtagaatccgggagtctcagtgctgctcaggaaataaggcgtgcaaacggcctggacgaccaattggtgccgctcccacatcttatcaatcgctcttagcatgacgtcttcgcactgagccttactgtcgaaccgtctgctagtatggtccggcatctggacgcagccgtctccagtgcaaaggaaagcagtagcaatccatacggtgatactcgccatttcgtcaccctctttagttgatgagcagagtctattccatctgctcgccaggagtaaagcgcttttcgtcgggataaatgccgatgatgtctgcgtcgagcatccaaatctccacggacggatcgtcgctgctgatttgatataggttgtacagctcccgtccgccgacagcacgctcgcctcgtggctcaaccgccagaaccttgccgtgtccttctccgtgctcgtccaggtatatgacgtgatcaccgacttcatagctttctttcgtgacgaggcgtgaacgcgagctgttctgcgattccaccatccaggaatccagcacgccgcctttcatgtcgcgaaacaatcttgccgatttgtcgcaatcgaatacgcccagaacttcgccgtctttcaacacgatatgtacgattggcaaaagagtattcatgtttaatctccattggttgataattagagtctaatctgccgaaaagttcccgtaaagaattattttctcataactgattagttgcaactgttaatctgatgtatatgtttgaatctcttttgaacgtttgatgtttcccctataataagcgcacacagtcaacaaccacgtggaactacaatgtttaaactttcctggatattcgggcgcaaaaaggataatgctgcctgttcggaatcggcgccggagaaagtcgcacaaatccctcaacacgatccgctcgaccccatgatcaagctgggaaggattcgcggctggaacgtcgagccggagaaaaccccggtcattcgtagtgtgaaagatttcctggagccgggcctatctgtagcgatggatagtgcgtatggtgatggaccaactccggccgcgaaggctgctgcgggcggccagaatccctatgtcgtcccgactatgttgcaggactggtacaattcccaagggtttatcggataccaagcttgcgcaatcatttcccagcactggttggtggacaaagcttgttccatgtctggggaagacgcagcacggaacggatgggaactcaaatcggacggcaggaagctatccgatgaacaaagcgcgctgatcgcccggcgcgacatggagtttcgcgtcaaagacaaccttgtcgaactcaacagattcaagaacgttttcggcgttcgtatcgcgctgttcgtcgtggagtctgacgatccggactactacgaaaagccgttcaatccggatggaatcacgcccggctcctacaagggaatctcccagatcgatccatactgggcaatgccgcagctcactgctggctcgacggcagatccgtcttccgaacatttctatgagccggatttctggattatcagcggcaaaaaatatcaccgcagccacctagtggtggttcgtggaccgcagccgccagatatcctgaagcctacatacatcttcggcggtatcccgctcacccagagaatctatgagcgcgtgtatgcagcggaacggacggcgaacgaagccccgctgcttgccatgtcgaagcgaaccagcaccatccacgttgacgtggagaaggccatcgcgaacgaagaggccttcaacgctcgcctggcgttctggatcgccaaccgtgataaccacggcgtgaaagttctgggaattgacgaaggcatggagcagttcgacacgaacctggccgacttcgacagcatcatcatgaaccaatatcagctggtcgcggccatcgccaagactccagccacgaagctcctcggcacttctccaaaaggattcaatgccactggtgagcacgaaacgatttcttatcacgaagaactggagtccattcaagagcacatattcgacccacttcttgaacgccactatttgcttctggcgaagtcggaagaaatcgatgtgcagctggaaatcgtctggaatcctgtagactccacgtccagccagcaacaagccgaattgaacaacaagaaagccgctaccgacgaaatctacataaactctggcgttgtgtctccggatgaagttcgcgagcgtctgcgcgacgatccgcgttccggctacaaccgactcaccgacgatcaggcagaaaccgaaccgggcatgtctccggaaaacctggccgaattcgagaaggccggtgcacagtcgacaaaggcgaaaggcgaagccgagcgagccgaagcccaggcgggcgccgtagagggcgcaggcggcccggttcccgccgctccacgcgggactaagcctctcgcgaaagcggccgaggaaggggccagcgaggccgctgaaccgccgtcgcgaccggaccccaaggccgagctgcggaacttgttggtcgatcttttgtcgaagctccaagacctggacgacattaaggcgccggacggcgtagacatagagcacaatgatgcgcctggcttaaagcgcacatccaaacctggcgtgtctggtatggagccttcggtgttttcgtccaaccgcatcgtcgggcctcgtgatcattcggaactccagagaatcaaggtgaatggaataaccaccttgatcgaaaatccgcgcggaagcattcgacaaggcaaggatgggagttggcgagttcagatgaaacaccactacgggttcatcaagggaacgaaaggcgctgatggggatgaagtcgattgcttcgtcggtccgaatctgggatccaaacgggtcttcgtcgtcaaccaagtgaacaaggaaggtcagtttgacgagcacaagtgtatgctcggcttcaacaacatcaacgatgcgaagtctggatatctgtcctgcttccgtccgggctgggatggtctcggctccatccatgaagttgacctgcccgctttccgtcgctggctggcgaacggcgacaccaccaaaccattcgggggcgagtgatggcattcaaggcctccaaaaagcgcgagcgccgggcacctcttccagtcggaagagggaagcccataattccatcggcaggaatcgaggcctggtatcgaaagcagatgaaggatatgtccaagctcatgatctccgactatcgaaacgagattgagaaggcgctgtcccagcctgcggccgaacgtttcttcgccagagacgaatccgttaacgtcctgttcaagatgacccttcgaagcctacagcagcgatggagccgaatttttgaaggtttcgcggccaagatcgccccggagttcgtcaaccggaccgaagaagccgctaccgccgcgacccttcacagcttgtcggtggccggcgtcgatcagccacgagctgcgtataatgagagcgtcaggaacaccctggaggccgcaaccacttacaatcatactctcatcaccaagatccaagaggaagtccacgagaagatttacacatcagtaatgctgtctctgacttccccgaatccggaagagcaaggaacttccggcataactaacgcacttcgcaaagtcgggaagttttctgaagatcgaatcgaactcatcgcaagagatcaaacaagcaagctttacagttctctgagcgatgagagaatggcggaaaatggagtcgaggagttcgagtggctacactcttctgccggcaagactcctcgccacacccacctggagaaagatgggaagaggttcaagctgaatgaccccagactttgggagggtccgaaagcagaccaggggccgccaggatgggcgattaactgtagatgcagaaagataccagtcatttgacatcgataggagcgctatatgccgttagttcatggcacttccaatgaggctcgttctgaaaacatcaagcgggaaatcgaagccggtaaagacccaaagcaggctgcggccatcgcttattccatccagcgcagtgagaaagggaagacggcgaaagattgttcgcctgagctcgtcgccgatcttcgcgccctggtggacgctctgtcgaggctcgtgaaatgaaccgcaagacgtgccggcgccgactcgtggtcgatgtaatcagggccaatattcacggcggattcttcagcctgaagtttgccgccatcgatttggcaatcatcggcgtcgccatcttgatggcttttggccgataatgctgagaaaaatctggattctgactaaaaattctagtccggatagccgcaagttaccgtttacggaaaatagcagtaatttggaaatcctactgccgcgaggctttaacagagccagttcctaatttccgatttagccgcatgcttcaaaagtatatagcctgggaaattagaagtaacgttccaatagaattcatctataagtaacgttataatataacgtcaatctatatgctctagacgtattgaaattcaatttttaatcggtaaattggtaatttgaattagtttaggagttgaaagcctcgcggcagtaggcttagacaaatcccgtcaagtttccgagaccaaattaccggattttcgcggctgaggaactggtaattagatcacaatacaaattataatgtaagttaacagtcacggctacatctaattattgttccgcttatttacccttagatgtactgcgtatataatacagccatagtccacgactcttcgaactaacgatggcaaagtcgaaaagaaaaattgacgaaaatggatatatgaccatagagggctgcccgatcagctcttatggcgttttccaatattctgctggtcaactcggtcttccgggcgatccgacgcggattgtcaacgtatatcgcccggagtctgccgtcagcgatccggagtacatcgaatctctgaagaatctcccgttgatcgacgagcatgagatgctgtcgggattcgacgatgatgacgatagcgtggcccccgaagacaaaggggtggagggcatcatcacatccaacgcttactacgaagccccatgggcacgcggcgatatccgcatctattcccgcaacatgcagaatcagctggaaaggggcaaagaagacctgtccctaggctatagttgccgctacactgagcaacccggcatctggaacggaacgccttatgaagtcgtccaggacaagatgcgcggcaaccacattgccctggtaaaagagggtcgtgtgccgggggccagagtattggatggtctgtgttttgaccatctcagttttgatttcagaccatccgatgagggtaatgaaatgagtctcaagaaagccaagcggaagccccctgtccagcgcgtagggcaagctgctgactcggcggtcgaagagttgcgcgccctgtggccgaagctatctgcgtctgtccagaagttcctgggcgaagaagagcaggagccggagcatcaggaaggcgccgctccggccgaaccgaccgacagcgagcacctgaccgagcatccgactctggaaggtgctcagaaggatgacgaagagcaggaagaggagccttccgttgtcgatccggccgtggccgccgtcgagccggagcatcaagaaagcgccgcatccgaaatgtccggtgaaggcgaagtcgccgaactgatctctcaggtcaaagccattctggctcgactggagggcacggtagccgaaggggcagacgaagagcatggcgaaggtcaagatgtcgtcgagggcttggaggagcagagcagcctcagcggctcgcaaaccgccagcgacgatggtggtgagagcaaggataacagcgaggaacttcctgaaatggcacagaagaacgcgcaagatgctgcaattcgcggtctctatcgcgacattgctgctaaagatcgcctctacaagcgtcttagctccgtggttggtgcgttcgatcaccgagctatggactcggctgaagtcgctgtttacggcgtgaaaaagctgaacatcagctgtgcgaagggccaggaagctctggcgctcgacatgtacctgaaaggcgtcgaagcctcgcgcggcgcggccagccgtcaatcgaaagcccaggattcggccggttctgctccgcagtgcgccgagctggacagctacctgaagggggagtaactcatgttccagaaacaagtttaccgccagtacactcctggttttccgggcgatctgatcgaggacggcccgaagcgggcgcggccgggtcgaatcatgtctctgtctgccgtaaatccggctgccaccgccaccggccccaaccgcatcagtcgcgctttcggttatgccggtgacgtcagcgccctcggcgaaggtcagccgaagaccatcgcggctcgtgcttctgaagtcgtgatcggcggcgccaacttctttggtgtcctcggccatccgaagcactatgctctgttcggttcggccggagactccctggctcccagctatgatctgcccgatggcgccgaaggcgagttcttcgatatggccaccggcctggtcgtcgaaattttcaacggcgccgcaaccgccctggacctggactatggtgacctggtcgcctatgtccccaacaacctggctaccgccgacaacgcgcttggcctgccggcaggcgccctggtgggcttcaaggccggctccatgccgaccggcttggtccagattcccaacgcacgtatcgttaacgccatcagtctgccggctcagtcggcggggaatctggttgctggcgttaccatcgtccagctcacgcagtaaggaggcgtcatgagccagatcagcaagacccattcgcgcctcgcaggccgcaatgcgaaacctttcgacctgaaaaacatcaccaatgacgccgtggcgtctctgcgccgcatcggcctggtattcgatcacgccgtcgtccaggaccagatcaaggccttggcgaaggccggcgcgttccgctccggctcggccatggacagcaacttcaccgccccggtgaccacgccgtccatcccgactcccatccagttcctgcagacctggttgccgggcttcgtgaaggtcatgaccgctgcacggaagatcgacgaaatcatcggcatcgataccgttggctcctgggaagatcaagaaatcgtccagggcatcgtggagccggccggcactgcggtggaatacggcgaccacaccaacatcccgctgaccagctggaacgccaacttcgaacgtcgcaccatcgttcgtggcgagctgggtatgatggtgggcaccctggaagagggtcgtgcctcggccatccggctgaacagcgccgaaaccaaacgccaacaggcggccatcggtctggaaatcttccgcaacgccatcggtttctacggctggcagagcggcctgggcaaccgcacctatggtttcctgaacgatcccaacctgccggcattccagaccccgccgagccagggctggtccactgccgactgggcaggcatcatcggcgacatccgcgaggccgttcgccagctgcgtattcagagccaagatcagatcgatccgaaggcggaaaagatcaccctggccctggccaccagcaaggtggactacctgtcggtaaccacgccttacggcatttcggtttcggactggatcgaacagacctatccgaaaatgcggatcgtgtcggctccggaattgtccggcgtccagatgaaaaaccaagagccggaagatgctctggtgctcttcgtcgaagacgtgaacgcggccgtcgatggcagcaccgatggcggcagcgtgttcagccagctggtacagagcaagttcatcaccctgggcgtcgaaaagcgggcgaagtcgtatgtggaagacttctccaacggcaccgccggtgcgctgtgtaagcgtccgtgggccgtggtgcgctacctcggcatctaaccgatgcctattcaccaaaggccgggtttccggcctttgttcactctgactctgactcggttgtaggggccggttagggcataattactaggactacgccaatgactgtttacatcgtttccgccatgactcaatccgtgtcttacaatgcgtatgacacctctgatccgtccaatcctcgccttcagcgaaagattctgattcgtggccgcgccggcatcgcatccgaaacttccggcttcggcgacatgatttccgacgcggccgggcgtccgatctggaccccacagggcgattgtactgccgtgagcgattcggatttcgagctgcttcaggccaataagattttcatgcgtcacatggagaagggttatctgcgagtcgtgaagaccgacatcaccagtgaccacaagcggatttccaaagagactcgcaccatggagcgcgatggattccagcctctggatgctactcgcctgcagcagaaaatcaaggtgaccacggccagcgcttcccaggaacaagagttccggatttaaccgagggtttcggtatggtgattttcgacgaacataagtttcgcacgctgtttccggagtttgctgattcagccgcttatccggacgtgcgcctgcagatgtacttcgacattgcgtgcgaattcatttctgatcgcgattcgccataccggattctcaatggtaaagccctggaagcctgtctgtatcttctgaccgcccacctcctgtcgctgtccacgatgcaagttcagggcgcggctggaggtggcgtcactgccggtgggacccagggcggtttcatcaccagcgctactgtcggcgaggtcagcgtggccaagctcgcgcccccggccaagaatggttggcagtggtggctttccgggacgccttatggtcaagagttgtgggcgctcctcagcgtcaaagcggtgggcggattctacatcggcggtcttccagagcgccgaggcttccggaaggttggagggacgttctggtgatccctggtgcgaatcttctgcgaatggccttcggggtcatcggtactcaaattgtgaaatatcgcaagtttgagcagcgagtgaagaatgatcaagctcagtacgtttccatgttcgaggagcctttcgacctggcagcgtctgttcagcgagtccgacgcgatcagtatgtccagtttaatctggagttccaacggaattacgttatgatcttcgccaactttgagatggttgacttggatcgcgatgtggccggtgaccagttcctctggaccggaagagtctttcagctggagtctcaaggctcctggttttatcaggacggctggggagtttgcctggccgtggatatcggtgcggccaagctcactgatgacgggaaaccgactttctaggtgatgtatgtttgacggcgaactgatagcgaaactggttgtcgagttgaatgcggcgatgacatctgctcaagaggctttgcagttcccggattttgaagtcgtccagaaagctcagccgacccaacagggaacgtcaaccaggccgaccatctttttccagaagctgtttgacattcctcgcggctggcctgccaccgattggcacctggacaacacggcccgcaaatatgtagaaataactcgacagcatgtagagacgactttccagatcagttcccttcattggcagaatcctgaaatcactcacgtggttacggcttctgatatcgccaactatgtgagagcttatttccaagctcgatccacaattgagcgcgtaaaggaactggacttcctcattcttcgcgtgtctcaaatttccaacgaggcattcgagaacgacaatcaccagttcgaattccacccaagttttgacatggttgtaacttacaaccaatatattcgcctgtacgaaaacgcagcatattcggccgatggggtattgataggcatatgagtctgaggcgcgattcagagctaatcgccgcgcacctccagatgttaagagccatgcgcggcaggtccgtttcagccggatggtattccacggctcgatatcctgacaaggcaggcggatcggtcggaatacaagtcgcgagaatcgcacgtctcaatgagtacggcggaactatcgaccatccgggcgggaccaggtatattagggacgccattgttcggggccggtttgttggcgttcggttcgtcagaaacgactttccgggagaaaccgaggtaactaagcctcacagaattaccatcccggctagaccgtttatgcgatatgcttggaacttgttttccgcagatcgcgccgcaatccagaaccggatagccatgaggctggccagaggacagatcactccagatcaagctcttgcccagatcggcctggcattggaaggatacatagccagaagcatcaggaccgggccatgggtggctaactcagcatctacggtcaggagaaagggattcaacagaccgctggtcgatacggcgcacatgcttcaatcgattagcagcagagtaacataaccaggagatcatccagtgatcagtcagagccgttatatccggatcatttcgggcgtaggcgcaggcgctccggtcgcaggccgaaagctgattctgcgcgtcatgactaccaacaacgtcatcccgcccggaatcgtcatcgagttcgacaacgccaacgcagtcctgtcatacttcggcgcgcagtcggaagagtatcagcgggctgcggcttatttcaaattcatcagtaaaagcgtgaattcgccgtccagcatcagcttcgctcgctgggtaaacaccgccatcgcgccgatggttgttggtgacaatctgccgaagaccatcgccgatttcgccggcttctcagcaggggttctgaccatcatggtcggcgcggccgaacagaacatcaccgccatcgatacgtccgccgcgacttctatggacaacgtggcgtcgatcatccagaccgaaatccgcaagaacgccgacccgcagctggcccaggctaccgttacctggaatcagaacaccaaccagttcaccttggtcggcgccaccatcggcaccggcgttctggccgtggcgaaatctgccgacccccaggacatgtccactgccctcggctggtccacctccaacgtcgtcaacgtcgccggccaggctgccgatcttcccgacgcggccgttgccaagagcaccaatgtcagcaacaacttcggttcgttcctgttcgccggtgcgccgctcgacaatgaccagatcaaggccgtgtcggcctggaacgcggctcagaacaaccagttcatctacacggtcgctacttccctggcgaacctcggcgctcttttcaccttggtgaatggcaacgccgggaccgccctgaacgtgctgtcggcgactgctgccaacgacttcgtggagcagtgccccagcgagattctggccgccaccaactacgatgagccgggcgcttcgcaaaactacatgtactaccaattccctggccgcaacatcaccgtttccgacgataccgttgcgaacaccgtcgacaagagccggggcaactacatcggcgtcacccaggccaatggccagcaactcgcgttctaccagcgcggcattctgtgcggcggtccgaccgatgcggtggacatgaacgtctatgccaacgaaatctggctgaagtcggctatcgctcaagcgctcctggacttgttcctgaacgtcaatgcggttccggcgagcagcactggcgaggcgatgaccctggcggtgctgcagccggttctggacaaggcgaccgccaacggcacgttcacctacggcaaggaaatcagcgccgtccagcagcagtacatcacccaagtcaccggtgatcgccgcgcctggcgtcaagtccaaaccctgggttactggatcaacatcaccttctccagctataccaacagcaacactggcttgaccgagtggaaggccaactacacgctgatctattcgaagggcgatgccatccgcttcgtcgaagggtcggatgtgatgatctaatggtttgcggcggactcgatccgccgcaaccttccataaatggagtgaggaataagcaatgatcaacatttctgcgttcggctcgatctgccagttcacggcaagcagaactttcccgaacggattcaccgtcaccgagttcgccgacgatgccgatcccatcgacagcccgccgttcaccgctgccgataccggcgtcggtctcaacggtgacatggtagtttggaaccgggcgaacatcctggaagtagtcgtcaacgtcattccgaataccgagggcgagcgcaacctggcagtcctgctggatgccaaccgcaccggaaaggacaagtcgggcgctcgtgatgtcgtcggtctggtcgtggcgatgccggacggcagcaaaatcacctgcaccaacggcacccccatcgacggcgttctgatcaacgcggtggcaagcgtcggccgtctgaagaccaagccgtatcggttccgatttgaaaaagtgatcaaagccggtactagctgatgaagaaaattccgctgacagcagtccccaatcaagcgatctcatttaacgccggtagcagctattggaagattcgcctgtaccagaacatggacatgatgaatgccgatatcagccgcgacggcgtgatcgtttgccatggggtccgctgcttcggcgggattcctcttctccagtacagccatcagtaccgacctgactatggcaatttcgtcttcgaccgcgacgccgattggacgttgttcggcgacggaattaacctgttctatctggacggcgccgaattcgcagagtatcaggcgctcgccacgaggaaagaatgagcacatcaacgatcagaaccgggacgaacaatgatatccttttggacgacaatggaaacatggtcatcctcagggatgtcgaagcgtgcgcccaggacgttcgggcggcgatgctcatgcgcaccggcgaaaatattttcgatgtgaactccggcgtgggatatttcgaatacatcttctcgccgcagaaaagctatgatgacgctcgcaaatccatcgcggatgcaattttgtcctcgccggatgtgaccggcatcgagcagctggacatcgacatcaccggggaagtcttcggcgtcgatgctaaagtcatcaccatccacgggcctgttaccacaggagtttgaaatgagcacaatcagcatccaatacgccaacggcacccaactgttcctggacggcaaaaatccgccgcccctggacccgctgccctcgtttaacccgtctgtcgaagatctggaaggcctggaccgcgaaaagaacaccgacaagggcgactcctcgccggccggtcttcccgttcccccggtaaacgtcgattccaatgtcgacaacggcggaaccatcccggctccggtatcgaccgacgctcctgcggccgaatcggccccggaaggcgcccaggaagctcctgcagcgggccaaggcgacgagaaaggcgccgaggaagccccgactaccgccccagtagaaaaggccgaggaaacggcctcgccggccgctgaagaggcagccccggctcccgccaaggccacctctcgcaaaaccaccagcaagtaaggactcgacatgatcaacgtcagcggcttcggcacaggaattgtaatagtttccgcctcatcgttcccgatggggttttccttgtcgaagttcgctgatgatgagagtccgatatcctccaaagagctggagccgttcggatatgagatgctttatgacggtggcctattcgcctttgacaaggctgctcctctggaagtatctgtatccgtcatcgcagggagcgaggatgatattaaccttcgcatccttctcaattccaaaaagggatcattcagatttcttccgggaatcatcccggacatgacgactctcgtggccactcttcctgatggcggccgcaccgttctgtccaatgggactatcatcaagggtccggccatcgacaccatacagaacaccggacgacgcaaaggcaacacgtacacttttgttttcggtagctatcttggcgcccagactgcgcgtcaagccatttctaacgttatccaatcggtactggaggtggtctgatgttagggattttcaccagcctcctaagttcgcgatctttttcgattgtggaccaaaacacaaaccagctagttgctgcggatttgaggataagccgggtcaacacccggttttcttctgtagggcaacgccacatgctggaagatggcacgaccaagatggattccagaacgatccaccctatggaaatcatcgtcgaagtattttgcccttcaattgatgtcgtcgatcagatcaatcaattgctcctggatcgcgacacactgtacaaagtcatcactcgcggcatggcattcgaacggatgatgtgtaccagcgaagcgctcaatcagactccggatatgatatcggcgactcctgcgcggctgacattctcccaagttctcgtccagaatcccaagcctataatgttcagaaatgcaggggactcttctatgatcgaccgagggctggccctagctgaagacgtggttggctcggccggcgatctgttcgactacgcagtgaacggcgtccagaacgccgcagacttgttctgaggtgccaattgaactctttcctcaagtctattctcaacacgcctactctcaccatacgcgatgatgtcaccaaacttcctgtctggaagagtcttcaagtcaagaaagtggaaatttactcgccggcttccgtagtgtcgaaacctctggcgacgaaagaccagacggaagctcaagtgtacaccgaagctctggacattgatgtgaagaatggaaagatcatccaaccggtgcgactccgcatcaatgctatctgtccggacctgtccaccgttgaaagtatcatgaacgccttcaatgataacacctcgactttcgctatcacttctaagtcgatattggccgataaaatggccatcatggcgctcgatgtagatcagtctccagacatgttgaacgcggctgagatcaatatggaattcgagcaggttgagcctccagtattgaataaattcgatcctgcgttccctcaagatagtccgacttatggggtacagattcaatctctttctgatgctaatttgctggatttgggcgccatcggcgattcgatatcttcggccgcaaaatcgctatataatcgcgcgaccagctacttctgaggatgtatcatgcttgaaatcaatcttcccgatggccgtcaaactcgcgtacaaatcgaggcgtggtcggcattggatggctgggaactccagcgccgtttcgtcgaattcgctgtcagccaagattccgacttccgccgctctttcaccatggaaatcctgggctatgcgaaagtgctgcttggcgacgatgacaccggcattccgctgaccaccgcggcagtcatcaacaaccacctcggccactggaagaacgtggaactggttttcaactctgttctcaagcgcaatggcatcgacccggccacgcacgccgaccggccggactattgggaacaagtcggatcgcagatggccatcgcatttctggccgaggcgtccaagctcattggtccagcaatgaagatcgccgaaggactcgccaacaagccggagtgattcatgtctagtgatttggatgaattcatacttcggtatgaggccgatactgccagagccgagcgcaatctggagcgcctccagaaccagatcaggcgcgtgaacagcgcatcgacgagtggccttcaggatttgcgccacttcgcagacggcgcggccactgaactcggccgagtcgttccgcagatcgattctgtgacgagcgcgattcgcgggatgaacgcgcaactggcgataggcgccactggcgtggccctggtcgcggccggcgtcaaggcgttcatgaacaccagggaccagtacaatcagcagcgcatccaggcgatggacatcggcatcgccccggcacgcttggaagagtaccagagaaaattcgttcgccagtccggtggaaccatcagccgcgagcagggcgcggagatgaccaaaaatctggcagacactttccggcgtgcttatcgcgatatcgggcgagtcggcccggaagcgcgaattctgcgtatggccggcgttgatgtcgggagcttccaaaagggcatgcggccgctcaacgacatcattactgatctggccacgaaaatggccaagctgaagccggacgaaatttctgcctacgctgatgcccttggcgtctcgcgagactacctgagcaccctggctaagatcggcccggccatgggaaaagtcaccgagatgacgactgcggaactccagtccagggtccagggcgagtccaacattcagaaattcaacgatgctctggcgaatctcaaccagacgttcaccaccctggaaaaccgagtcggcgaaaagctcgcgcctgcgttcaccaagctgatcgaaatcatcgacaagatagtccaggctattcccaatgaagtggaaagcttcgcgaaggacaccaaatcccgttgggaagatggagtgctcgggaaggcgaccgttggcagtgatatcttatccctcctcagccccggcgccctgctcggtcgcctggcagcgtgggggactcgtcgcggcatggaagaatcagggctcatcgacaaggacaaggttcccggcgctcaaaccagcgaagacctggccaagaaacaagaagaccaggacaaggctactaagtccatgaaagagctagagaagctggctgaccagaccacgaagtctaccaatgattttgcggtggcgatcaacatgttcagtggcgcggtatcgtcgttcgcgaatgccgttgacgagcgccaagcttgggcagcctgggcgggggaaattggtcgggcggtcggtatgggaagcaccgcgccgacttcgcgggcaaccggcgtctatccgcacgcgatctatgatcagtcgaagagtggcgcggccggacaagtcttcggcgagccaatcggcgcccagtctcttcgcaatcgcatgttctcgccgcagcgcaaggccgaaccggtcaccgttccatcgtacatcaacgacatcatcaaagatgcgtcgaagatgtacaacattcctgagctggacatcaagaaactcatatacaccgaaagccgattcaacgccagggctaccagcgaagccggagcgaaaggcctcatgcagctgatgccggaaatcgccaaggcgtatggtataactgacgtatatgaccctcgccagaacatcctcggcggaacgcgtctattgcgggaaaacctggatcgagccaatggcgacatgcggctggccttgacctactatcacggcggcctcgatccgaagaactggggaccaaggactcgcgcatatccgggtttggtgatgagcgctccaatcgagctgatggaagaggcgcagcgcaagcagaaggctgcggccatgaccgccgccaacgagacgttcgctccggaaggcggcgacatgtacattcgcccctatgatggcggacgattggaaactccagaccagggcaagaaggaagatgagcgccgcgaagcccgtcgatatgacgacagggttgtgcgaccggaaattcgcatcatcgaccgcatgccagaccgcagcgacggcgaaatcctcaagatgtctagacgtcaagaggccgaccgggcagattctggattccggaagttcccgaatcaagttcgcggcgagaccaagcagaacatccaggctcaactcactgcaggagccatcgcgcaagtgatcggcgttaaccccaaccagatcatgcgccgcgaaatcagccgttctgacttgctgttcggatacaaccaagccatcctgggcaagcaacaggagatcaaggccgccgcgaccgaagccaacaacgtattcctgtctccagccaagcttgccgaagccacggccaaggtgaacgccgcatcgcgagaaatggatattctcaggacgtacggcgagcaacttctgaagagcgctccagagcgcggccaggagctgaccatcggtcggatcgacatgttggtcaacgtcaccggcgcgaattctccggaagaggctcgtgagatattcagcaagcagactgcagaccagctgactacggcaatccaggacgctcaaaacgattccgcaactaagatactctactgatgaaaaagagaattctgcgagtaacattcaacatgccttatggacccgaagtcatccgcgaagatctggatgttcgggtccggattatgaaggctgcgttgcggattcagaaccgggcgacgatggaaattttcggcctcaccactcagctgcgcgagtctcttctgtcgcagttcaccgcgtggaagcaccggcaacgtcaagtgggcagggaagatgaattgatgatcaaggtgtcggtggaagccggctactctgaccaggggcgcgagcaagtttccagagtctttgtcggcgaagttgccattgtcgatatcatttctccgccacctgacattggaatccgcatccagtgctataccaggcaaatcgacaggacgaagaccattcggaatatgccgcccgccaacacgacgtttgtcaagttcgtcgagtggggcgcgaacgaaatgggattgaacttcatctgcgataccagttacaacgatcaagttctgaagaatccgggccggtctatcactgtcgcgtcggcaatcctggcgtcgattcaggatatgtacatgccggacgtggccgcgttcgtcgatgatgacatattgatcgtgaaggaccgcgataaagtcattcgtccggatgaggtgaccaacgtcaactcgtttgttggaattccatcttggtctgaatggggcgtggaattccagtgtctgtttgagccatcgattcgtgtggctggaggcgtagcggtcgaatctctcatgaatccaagtgttaatggtaactatgtaataactgctctggaatacgatttggccagtcgggatcggccgttctatatcaaagtcatggggagtccagcagcataatggccagggaaatcaaatcattcaacatgttcggagttcactatacttcgcggcaattctctgctgtcgatgggctcagcatgatgtcggaaattcagaacgtgccgccagaagaattgctcaagggtactgatgtattggcgcatccggaagaccatccggaaggcatctggcttccattgactgctgcgaacatcaatctttatgtcgttgatcgagcgaaagtaatagctcccgtacaagttcttgcacttctgtccgaagtggtaatcgactggaactttggttttctcaaagactggaccggagtcaagattccatccagatttgtcgaagatatcaaaagcgtgaagacggcacattcaccttctgtagttgcgagcttggtcgcgaacggctcagcctctatgcgcgagttggaagagtattattcgactcaagatgcgtttaagatgatagatatcatgacggcgaagagcgtgaacgaggccttggcgtccgaagcatcgcacaacagaatcaaaaaggataattcctaaccgggcctgggaaggctatactagacctgccaaatcagaggctttcccatgtccaatatttctctaacatcagcaaaagctcccgacaggacgcgactgatcgccgctcttgacgctcggtcgcggcgggatgctctagatttcgaagtaatgataccggctcaggttgttcaatatgacagggccgagaatatcgcaacgattcaacctctcatcacctgggttgacacggaacacaacgccgtccaaaggcatcagctggttgatattcctgtaatttccatgggggctggcggattccacataagtttcccgattcagcaaggtgacataggctggatttatgcggccgaccgcgacacatctcagttcctggagtcgttgtcaatgtcgaagccgaacaccggccgcatccataagttcgagcatggcctgttcatcccggacgtattccgtcgatacaccatcaattccgaagattcggccgctatggtcatacaatcgacttccggagcgaccagaatttcgattcgcggcgataacatcaagataactgcgccgtcgaacgttactgtggatactccgcaggcgaacttcaccggcaatgtgactatcgctaacaccctggtcgtaaacggcatcaacgtgaacaaccacggccacctcgaaaacaacccgcctgatgcccggacgaaaggcggcatgattgcttaaggagattttcatggcaagttttgatttttctgatttaacagcgggggggggttgtaatggctaactacaactacatcgtcgatactggtgtgatagtcgcagataccgccgacgttctgagcgacgttgaggccgagttccgcgccgccctcggtgccaatatcaacttggccgcgagcactccgcagggatcgcttgtcgcggccgaggccatcgcccgttccagtgtcatgcggaatgaagcgcgaattgccaataccataaacccgaacgtttcattcggaacgttcctggacgcgatctgtgccttgatggggatcgagcgcggttctgatctgtcaaccttcggctatggagttcaagtcaccggccgcagccaaacccgcatttccaccgggtctagggtccagactccggccggcgcgatcttcacagtgatgagcgatgtcacgatccctgctggtggtgccgcgaccatcgatatcaaatcgcaggagtatggcaacattcctctgccggtcgggaatctcatcatcatcgacggaacaattggatggtccggagcaaaagtcatcgcctccactcgcgtcgatccgggcagccgccaaatgagcgatgcagagttgaagaatgcccgcgttaatcgattggccatccaaggccgcaactcgactatggccatcaaggcgtatgtgagcgccgttccaaacgtcacgtcggtgaacgtaatcgagaacaacaccggcgccgttcaagtggtgaatggagtctcgtttacccttccgtatgctgtttgggtctgcgtcgccggaaacccggataaacaagcagtcgccgatgcgttgtgggccgctcataacggcggaactccatgggactatggtgcgacgaacaacggcgtcccggtggacggtccgaatggcgttcctgtgcgcgatccggcgtccggtcgaaagtatgtcgtgaagtggaccgctccaattatgtacgatggatatgttaacgtaacagtccagcaaggttcctcctctgtagctccggaagccattcagaacgcagtggtcaattacgcccaggggaaagtggaaggggaagaggggctggtggttggcgcgagcctgtcggcattcgaagtcgccggcgccatcgctcgcgaaattcccggcatctacatcaaactctgccaggtcgcgtgcgtcgcggctggctcgccggctccggctccgggcgatttcacttcggaatacgtcatgagcgcattcggccaggctaccatttccgttggtaacgttcgggtgactttcgtatgactctgcctgcgtacaattcggacatccaacaagctctgaaatggctccataaccaggcgcctggaatcaccggcctgatccagagaaaggcgcaatggtatgacagattcagccgccaattctgggccaactgggagcgcgacgttttcaacttgaagaccgccaacccgttcggccttatggtttggtgcatcatcctcggcacgccttcgaaagggttcggcctttatccaaaaaacagttcttgggcattcggtcggctacgccagaacttcatctatagcggtacacaagtcccgccaccggcagacgcatcgcctggcggcaacttctacggtggcggcaatgccgaaattctcaacttggacgaaatcaggaaagtgcttcagctaagatatgtagcgctgatttcgaacggctcgattgcatatatcaatcgcatgcttcggtatatcttcaacgatgatgagccgtgggacgaggcggccgggttgtacttctacctcatggactcgaccggcgagaatggtcctgtggaggatttggccgtatatcggaaagattgggaagggatggttttattgtctagctcgcccaggacgaaccatgtgctgatatcgactcctgccagcgacgccgattggccaggagtcgatccggccgcgagcggaattccggtaacggtcgaaacggcgtccgctacggccccggacggctccgctacggtgtgcaagcttactaagccggccgggagtaccgcttacgtctccgcgccgatagatgggacgctggggtccggtagcactgtcacgttctcgttcttcgcgaaagccggctccacccgtttcattgcaattcagtcggctgccgatttccccagtcgagccgatgccgttttcgacctggattccgggaacgtaatcagcgatcagatgctggacagcagcgtggtaagcgcccgaatgattcgtctggaaaatggctggtggcgctgcgttctcacgaccaagaccgtcagctcttcgttccgcgcggcttacatcgctccggcagaaaccaacttcagctggattgattcgaattccagcgcggcgattgatgtgcttatctggggcgctcagatcgaactgggtgatgctccaaccggatacttggagactaccggaacgcccgtaaccatcaccgattacgttttgcagagcgcccagaccggaacggtcaagttcacacagcctcttccgaccggagtagaggcgtattggactggagactggaaaggtgggtctgcgaccgagccggccagattcgcagtaggggatgggactcaagatacattcaatctgtccagccctgcatacatcggcctacccactagtggggcgttcaagctagaatacagagttggtccggcgcttaatttgtcgccgcaattgatcaacctcatgaatgaccgggcggtcggtatcatgccgacttgcgccggttgcgatgtaaaagtcattcaggagtaatgacgtgatcacacccgaactgatacccagtccgtttgctgcgcagggcgacaaagacccgatcccgcaaacctcttccactggctttgccaaccttcgcgacggctacacgccggactacgaaatcagtctggcgtcgaacaacccgcaggccaaagcggtcgagcggaaaattcaaaaccaactcttcttcatcgcgacccagaacgcacaggcgtggcagcggcaaatggcgccgccgtggtttcagggcatgcctggcggctacgaacagaatgcagaagtcgtgcgagtcggcaatgacggcataatgcggcgttatcgttccatggtgaatgccaacgcgagcgaccctctcagcagcacgacttgggaagaacaacccgcatggtcggtgatgcgctccaacataccgatgccagctggaggcccaggcctatcttctggcggagaagtcatcacgaccggccgcaacttcaatgacctgttgaatgggacgtgggagttcttctctgattcagtggtcgtcgcttctcagaacgcccccgtatatcccgcttcggctggtgcagcagctggaatgttggaggcgaaatcctggatatccgggtccaatacattctgcgttcaacgctacactgatcgcgtcgggaacgtcgctgtgcgcgggcttaatgccggggcctggaccaactggatgtacgcagtaaatgtcatggccctccaacaaggtcgggtcacctatggagtcgcggccggatcggcgaacgcttacacgttgacgctagttccgcagctccaaggcggcctggtggatggcatgattcttcgggtcaagttcaacaccatgaacaccggcgcctccaccatcaacgtctccggactcggcgccaaagccatcgtcggcgcggccaacttccctctcaccggcggcgaacttggccaaggactcatcgctgagcttgtattcgacgcagcaggcgaccgctggagaatcctcgcaggcgcgccacgcatccaagttggcaacgccgatcaagattaccaggcccccagctggaaacaggtgaaggattacgtcgcgtcccaaaagctgactgaagtggactgggctgacgtcgtcaacaagccgaacgtcgctatccaagacaccacgccgtggttcgccaatctggagctgtccgatgctcggcctttcatcgatttccacttcaacagcaatcgcgccaaagacttcgactatcggctgatatccgaagcggacggatcgctggctttctattcgcggcagggatctgctgggcctacccaggacatcctgttcaaccgaaattccgtgactttcttccagccgcgactcgatgtggcgaaaaacctcgcgtacatcgcgaactctggccccctttggcagaacaccaccgccgatcagcccggttggaaattcacctttgcacaaggcgtggacgcgaacaacaacgcggtgatcgcagtcaataccaccaatccggacggttcctatcgttcacaggtcatgcgatgggactgggcgtccacgaacgtcatattcaacaaccgtccgctcttcgccggtcaatacaccccttgggattctgggaacttcgatccttccaccaagttgacggtgaatgccgtgaaccaaatcgccggcccaaccgggattcggaataccaacggcaacaccggcaacatgaacacctggggttccggctccacgacggcatcctatggcaatgctgccattcaaatcttcggaaaagggggcggtgagcctgccgcgatctatttcgacaactcccagaccggatggtatctgggcatggacaaggatggacagctcaagcgggccggctggtcgctcggcaataactcctatgtgatcaccgacgaatccaacatccgaacccatatcaacacaatggctgcgcgcccgatttgggggaatgtcgagttctggggtccgtggaacttcgatccgaatcttaaactcactttgaacgctttcaatgatagctcatacaccaggatgaccaacagcggcgcgaaagacgttggtatcgcgtccatgacgagttatgctgatgcggccatgtcattcttcaactatgaagcctcgaatccgaccgggccgcgcgcggccgttatttcgttcgtgagaaatggatcgcgtggagtgctattcggcttggattctgacaacaagctgaagtggggcggatattccctaggggccgtcgcgttcgagattgccgactccaacaacctcatgagcctgtggtcatcccacgctgccgcgccgaactggaacgggcagaccatctggaggtcgggaaacttcaacccagacaccaaggcgactttggcagctcgcaatacgacgtcatcccctacaatattcagttatggggcgtccggaatcgcatcaaccggacaggtcggtgcgttggttgtggaaaacaacagcgtcaccaataccgcagccgccatcacgttccattcgccgcaaaaatatcaggtcaacttcggcctggatgcggacaacgtggtaaagatcggtggcggcacaatgggcggcgtagcatatcccatcatccacgccgggaactacaataactacatcaaccaggcgctggttcaggtgggtcttggcggagtcggttcctatgcgatccttgcagtatttgacacctccgcgccggcagcgtccattgcccccggaacgatcatggacagttccaagctgttctattcgtcctgcgattcgacctatcgcagcagcgccagtccgacgggcacctggcgctgcatggggtatgtgtataaccgagactccaccaacggcgactcggcatccctattccagcgggtaacgtaacatgaaatggacgcggatcagaaaccctcgttggctggatgaaacaaacatccacgccatggtgactttcgatgggatcggggaagttcctttcaccgccaatccgcacgacgtggaggcccacggaagggccatccacgctgcgatcctatccggggcgcacggatctatcgccccggtcgatgcgaagcgggagcaggccttgcaggacgctatacgggccagggaaaagcgggctatccttcgtgatacccgctggcccatagatcgtcacgacgagcagaggcggctgggtatcgaaaccacggacggacctgggttgatagcagcccttgttcactggaggcagcagattcgcgattggaatagcggggatcggccgcgacttcccatggctctgaaaacgatgttcaaaaatcaggagtattgatgaaaatcacgaaggatgttctgatcaccgggaccgggtgcaccacggatcgggcgatcaagtggctggatgatgtacaggcggccatggacaagttccacatcgagtcaccgcgagccatcgcggcctacctcgccaacatcggcgtcgagtccggcggactggtaagtctggtggagaatctcaactacagcgcccaagggttggccaacacctggccgcgccggtacgcagtagacccgcgagtccgcccgtatgtcccgaatgctctggcgaaccgcctggcccgtaacccggttgccatcgccaacaacgtgtacgcggatcgtatgggcaatggctgtgagcaggatggtgacggttggaagtatcgcgggcgcggcctgatccagctgaccgggaagtcgaactattcactgttcgccgaagactccggcatggacgttctggagaaaccggagcttctggaaactccggccggcgcgtcgatgtcttcggcctggttcttctggcgcaatcgctgtatccccatggcggagtccaacaacttctccctggtcgtgaaaaccatcaacggcgccgcgcctaacgatgcgaaccacggccagctccggatcaaccgctatatgaagaccatcgccgcgatcaatcaaggctcctgacattccacccaaagaaaaggccgcttattcagcggcctttttgctttctggctttgcctcttcaaccatcttgatctcgaccggcgcggcggactcctcctgagttaccgaatccacatagttccctagtgaactcagaacgccgattaacagcgctcttactaccttgtccttgactgtctcgcctatgatcttggtcagaacggatatcaactcttcccggagtcttgggctgattcttggccgaaagcgcttgcgatgctctttgcgtttcatgtttagtcctctgtctgcggtcttctcctcaccccgataatggcttggggatgcgctgtgttagtcggaagggtcgggcgctattataacccgtcgaaaatgctcgcgcttaactgtttaacgatacgcaccgcgatactaaatcgccttctttctggccaaggaactctggcggcctggtccggtctaaggcctaatttgtcgacattaaaacgagaaaacccggatcgcctgtaggacaaggcgtccgggtttatttcgatctagtgtacgctagaatcagtggcttccgccccaaccgtccagccagcaatcgaagacggcgtgtctaggcttgtccttggcgccatgggagaagtgcttgaaccggatgacctggcccttgagatactccctgtcattccagcggcgctgtttctcgtcgtgggtcaggctggaggccgacacgttgaaggtgactccaggccacagacgttcgttgcggcagacgaacgcaccgaccattccggacggcgacaggttttctgcgtggctggagcgggccgtgtggccaagttcattgatgaaagcttcattgttgttgtgcatcaactcttccacgtcgatgatctcagcttcatcgtagtcgtatcgcttgactttcacacagtgcccttccttggcagtcgagcgaccgaacttgtacagtccatcagcgcgcttgcccatggacccttcgaatcccagcatcgtgtggcggcgctcgacttcgctgaactgttcgatggaagtcaccagttcctgctctaccaggtgaatcctctcatagccgaggcagttacgcaggaagttcacgcgctcggccgccctggctaggcgatcttcggtcggtgcgcgaggatcggtgaaatcatcgaacacatggaaagaccagtccggctcaccgctgtggcggcgaagatcgccggacgacttctggaaaactttcgggtcgctgatgtcgccgcagaccagctcgccgtccaggccgttgaacagtttatcgctgaggtattcgtagatcgattgattgttctgccgcttgagttgacgagtcagcgcctcgccttcgaatacgaagcagcgaaatccatcgatcttcggtgagaaatacatcggcagttggccttcaagcagcttcgggtcaaaattcgatgcgagcatgggtttcatacagttctccagaaaagaagcccggcgaaccgggctaaatggcggtaagccggctcagatggtttcgttggcgtggttcagttcggccacgatcgacgcatagcgctcgtccgactccttgatgaacacgccgtcgtacatgacgcctttgcgatccttgatggtgtcgtaggccgcagcgtagcaggcgagcatggtagtgtcgtgctcttccgtcacatcgaacagagtcatgacggccaagaccaggctcttgatggctaatccatgatttccgcgtgccagcgcgccggccagatgtccgaggtgctgcaaatcgtcgccgtaggtgggatgaacttcgacagtctcgctgaagaccgatagatgatcgaacagattttcaccgagttgcgcggccatgaccgtggcaaccaccattacgtcgccgatgccgtctttcacctcgactggtttgttataaacccaggcttcgcaaacttctgcgaactcttcgaccaacttcaggaattgatccttggccgaagagcctttgatcaggttccggtcggaaccccatttaacaaccaggtcgtgaagttcgcgactcatgatttgttcgatattcattctttcgattccttttggatttgggatttgactgcgttgattatggacgccgtgctctggcgcgatccatccttggtggtgccgaagtagaaggccatgaccgacttcagctcggcgaaccaatagccgatgatggtgccgatggcgacagaggatgtcgggtccatcagagcctcgcggccgaaggtgaagattgcgatgatgatgagaatggagcccgtcagaagagcgaatgtaatcgccgggcgaacgaaatcgttctgctgcgcggcaagcctcctcgccgaatccctgtctgccgcctctgcggcgaactggctaagctcggcctggagctgattctgctcagactgaaggcgattttgttcggcttgaatcgcaagctcctggagacgaacgcgctcggcgctctggagttcggcgaggcgcgctagagcttccggattcgcgtctagagcgctagcgaccgaggctgggtcggccttcgaccccagcgccgtcgcgacgatagcgccaacggcggcgcctgcaggcccacccaggagcgaccccagagccggggcagccgcgccgatcttactacctatgtctttccagtccatttcgactcctcaaaagaaaggcgccattacagcgcctttctccggccggtgatttagaactcttcggcttcggtcgcatcgccgacgccaccggcgtcactgcgaggctgttcctgcttgctgtagtccaccttcacctcgccgcctacgaacgacttgtacaggtcggccgcagccttgaagtgatccgggttcttcaccaggccttccagctcgaactggacgccggaccagctgcccttgtcgttcgacatgcctacggtggtcatacggaccaggttggcgaaagtcggcggggtgcgcaggccctgcggggtctgaacctttttctgggacagcgcggtcatgagcttcttcgaggccttgatctgcgaagacgacagggagatcagagcctggccgaaatcgccggtgtccggatcgatgacgatgacgtaatgaccacgggtgtcggcgaagtagtcagacttcttgtcgctgaccgaaccgtcttcgttcggcgcgtacaggcgtccttcgacttccttcaccttggtcgggtctttcatcatttccttgaagtcttcgacgctgatggcacccttgaaaccgccctcggcctcgcgaccggcccagcggatgaactcgcggcggtacgcggccggaatgatcagcaggccggtcttgccgtcgtaaaccttgccggtgacggtgttcaggaacatgccggccttcgcgccttcgatgtacttcgggtcatcttcatcgacctggggagacatcttctgcaaaacctggatgaaggggatggcataggactcggcatcggcgccttcgaagcctgcgccgtcatacgatcccaaatccatgaagtcgggaacttcggtagtcgcgacggcgccgccaccggtggcaattgctacggccttggtttcttcggttgcttcggaagtttcggttttcttaccagccatgttaggctccttgtttgtcgaatttcagttatcgctaactgtgggtttataataacggaagttgcaactaagtaaagcaaattacatatcaagatttgctctttttcaccttcggtttcgtgatcttggcctctttgtattcgtgtacgccgatgaaatctggcagctcttcgcccttctccaggtactcgcgaccgaacgcctggagggtctggtaatggacatcgcggttgatggtggcgtcatagccggcttcgatgatggcctcggccgccttcttcgcatcttccatttcgccgcgaccgaattcggccagaaccttggtcttgatgatgccgtcgttgtcggtgtcttccagccacttccagaacttcgatttgttctcttccttgacggaaatgatggccttcggctctacttttacagtgcgaccgtccgccagagtagtggtcttctgaccaagctcctccaacagctccggaatggtgttacgcttgagggtcttcagctcctcttccttttcggccagcgccttttgaagatcgaggatttcgccgtccagctgcgaagccttgtccaccaagttcagcagtcgatggccgatgtcggtggcttccaccgccatttcatccatgacgccaaaatagtcgatttcgcccggcgcgttctctttcaagtattccgggatttcaagctcttgctctttcatgtccgcctccaacttagtgatgttcccttacttgaaccaagtattgagtagatattatgccgcatcttccttgatacggctactgatttacatattaaatttcgtcgcgagtgctaacgtcagcctcaaacacgccatcaacgacataacttgccaggttgcgtttccactccaagctgacctggattttctcgtcgatggaatccagacagatcaggtcgaagtacagaaccgagttgacggtgccgattcgatgatttcggtcttcggactgcatccgcagctcgttgtcttcgtcggtcgtgtagtagatggccacgtctgcggctgtgagcgtgatcccgatccctgctgcggccgggttgcccaggaacacctggacgcgcttggcctggaaatcgtcgatcaatttttcccgctcggcctctttggtctcgccgtagtaggtgccaaacgaaatcccttgggcctccaaatacgccttgatctggtcgatttcctgaatgcgcatggcccagacgatgatggaacgctccgggtcttcctccagcagaccctccagaagatcagtaaacacggcgaatcgcgggttgtcttcgggcggcaggatcaccggctcaccatagacgttgatatagccggacgccacttgcttgagcttcgagcgcgctgccgcagcatcgaaagatacatccagcatgaaatcttcgttctggagaacgaagtgatagtcttcttccacgcgctgataaacctttcgttgctccggcgacatttcgaagtatatgcgcttgtacaccttgtccggcaggaatggcaatgcttccttcttcgtgacccggaagctgtgcggctcgatcagggatcgcagcttgtccaggttccggaataccgggcgcccataatcgtctttttcgacgagttgcggcggcatggtttgcttcccttccagcttgcgcatgatagcgatcattcgaggatcgtcactgggcaccaagacggaaaattcggccacaaacgcccgataggatttagtccccagaattccattccgcaagaattggaactgcatgaacaaatcggtcggcgcccgcgtcagaggagttccggaaaggatgcgacgggccacggccttctcgcccagctttacgatctttttcgcacgcttggcttgtgggtttttgatcctcgttgactcgtccacaattgcgcaaactttgaatgtatcaaggaatcgctcgacctcatcatagccagcctggtggttgattgcgtcaacgttgatggcgaagacgcgaagaactttttcatctgcgaacgtctcggaatacagacggtccaagcgcgccctggcctttttggaagtcggtcggccgcgccaatccacgctcaaagtcttgatcgcgacgtgggtgggaatctcgcgcagaatccagttggtgtggacgcctttgggggcgacgatgagcagcgcgtccacgcgcccctgtaggaagaggcgaacggcatcggccaaagtcgtccaagtcttcccggtgccctgctccatcaggtatgcgaagttccgtttgttcagggacgctgccagggcattgaattggtgctgcatggcctcggtcttcatgcccttgacgggatatgttttggctttcatttgttctccaaatcggcgaggaactgaacaatgttatccagtccttctgcatagctcgcaacttccaccaagtcgcggctgttaagctcgaacaaatcgaacataggattcagcagcagccaatcggttccgatcttggccaggacgaagccccggccaccccagccgatccgctcccgaagaaaagggatttgcccaggttcgaaacatctggccattgggcaggtggaagcgcgtttcggccactcctccaaagccttgaactcgacccagaactggacacctcgacgattcaggcagatcgaatcggacatgccagaccgccgcgtctccagaaagtcgatcaggattcggccgagcgagcgctgcttaaacgcattcgccgctttcgtttcgcgatcattcatcaccttcgccctctttggaaactttctctgcttgtgctgccaactttgacttctcgcgctcggtcaatatccgcttgacggccttcacgatgaacatgtcgatgccgctgagcctccatcctttgatcaggaaccaagcgccggtcggcgtcccttcagcaatctgctttccgtattgcagatatttttcaggccgaattctgaaacgtatcggctgatcaaccgagtcatcaacgcacatgatgtcgagaaactgcgactggcccttgtacaccgggtttttcccttgatcagccctcttcttctggcgaatcggttcgttctcatcagacagaacttttttcaccatcttgacaatgaccagaccatcatctccatcgcggatatcccgaatgttctgaatggggtttccggaagttactccaaccagctccggattgtcataagcatgaccccagagcgtgtgagcttcgttcaaatctgcgaattgaacttcagaattcgacagactcgcggcgactttctcccaatcctgaagcgtcttcaggtgggtgcctgccagctctttatattgagccttcagctccttaagatcggccttcaactccttcagatcggccttcaacagtttctccagttctttgtcttggctgattttcgccgaaagaatctgggcttccagagctgctacatcagcagccttgtcctcaacatcctgtgccgatatcgggcaattggccagggcgatcctcgcggccttgacttcctcacgaagacgcaggaaccgctcggccttcgccgggccgaagcctttggcgttcatgatgccgccgatcaggcgcccgtccgccaccacccagttgagttcggaatgctccgggtccagggccgtatattctacgccttctttggccaattcgcgaaggatagacacagtttgctggtcgtccttcgccgcccgaaggcacgcggccgcgtattccaggcgatgataccgcttcatgtagcaagtccagtatgtcaccacggcatagcttaccgagtgggagcggttgaatccccaggcgccgaatgtcaccatttcctgccaaactcggtgagcgtcttccggggcgacgcctatggtcttggcgccctcgatgaacaattcccggcgcttgttgaaaaattcttcgccctttcgcgccgacatcgctttccggatcgccgacgtttgttcccagtcgaactgaccaatgtccttaacaattgacatgatctgttcttggtacaggaacacgccatacgtccccgacaaatactgctcgacctgcggaatggtataggtcacaggctcgcggccggccacgcgctcgatatacttggttgccataccagaagacaacggacccggacgggcgagcgccgtgatgtggtcgatgttctcgaacgcggtgatgttgatcgcgtttgctaccgagcgaacggcctgcccttcgaactggaagatgccggacattttgtcttcattgagaatgtccagaaccgccttgtcgttcaaaggcaagtcgtacaactcttgcgcggtcacgcagttcgcgtcctggatgactcccaaagttcgaagtccaagcgcgtcaattttgaggagattcagatattccgaatcgggcttgtcgagctgcgcaacgccttcggaagtcaccgtacagaagtcgatgacttcatcgttgcagaccaggatgcctgccgcgtggacgccagagtgggatgggtgaatttcgaggtcgcccatgcaggcggacgcgatctcatacttttcgcggaagtcgcggccgggctgagttttttcgaaagtgtcctccaatccttttccatatcgttcgtccgccgatgtatattcgatgatcgagtttttgatgttgtcggtgtcgtggaatggaatgccgaagcgttttccgacgtgagcgataaccgacgcggccttgagtgtgttgatgttacccaacttcacaacgttccaagtgccatacttctgctggagatattcgaacactagatagcgatgggtatcggcgaagtcgatatctatatcgggaagatcggaccgggaaatgtcgataaagcgctgaaagaggaggcgatgcgggagcgggtcaacctctgtaatgccaaggagatagcagaccaaagagccggccgaagagccgcgagctggaccgacaagcatgtgcttcttggcaaacgcgaccagatctgccacgaccaggaagtagctgtcgaaatctttcagctgaatctgcttgatctcttcttggaatcgatcctcatactcctgggtccattccttgatgtggccgcgactgaggcggtaggcttgcccctcgcgagccagagcgacgatatcaccatccaagtggatcatcggcgccttcgccagtttcacatccgccaaccgctcgactaccgcacgagtattggctgcggcagtatcgaactcttcgcgagtcatgatgtggcgtaaacggctccacagctcctcttcggtggcgatgtggcgaaggccgaccgattcccgcaccttccaggccgacgcgaaatcagcatggtcgatggatggcatgtcgttgtaagaggtaattaccaccggctttccgaatgccctggccgtctccatagcgccgtgcgcggcgaccatcgacgcgggattgatgtcaatgtagtcgattccggccagatccagatgggcataggcctcgccagcgaatttgatgacgccgtcagcttcctggaattcttgcggagtcaatccttgattctggaccgacttggaagtcaagcggtagaacttcttggtgtccttggcgagcacccaggctttgagcttcaactctttctcgccatcgtcggcgcatttgatcgggatttccatgccgaatccgcgaggcagttctgccttggcagcggcttgttcccaacggacgtggccccatgttccgtcatcgacgatggcgacgaatggggattcgatctctttggcgcgctcgatgatctccgggaatcgaccatatgcggcgccgtaggagtaaccagagcgaacgcggagctgagggaaagacatcatgcggcctccattgcttgatacgcccgatacactcccatgcgcttgcagacttcgtggagcagccgcacgtcgtcgagcgcccggtgtttctgtacatatgggccgcagtagtgctcataaagatgttgcaaccgcatgcggtggccgaacaacggcgccgactcttccacagtacagatatcgagtgatgggaagttgacttcttccaggccgagctttccgcgagccaaatcgcaggtaagcatgaacttatcgaatggcaggttgtgggcaatattcgcgtcggctctggaaaagaagtcgcgaactttctggcgctgatcgaggaaagatgggtgcttgaccaggtcttcgttcttcaacccggtgatcttggtgatgatttcctcgataacgattccaggattgcagatgaactctacttcatccaaaatcttttcgccatcagttatcacgccggcgaattcgatgattctcggctgctttctcagactcaccctttggtggaacgggagccctgtggtctcagtatcccatacagcgaatatcatgtttgttccctcttatgtcgaaaggccggctgctttcgcgaccggcctgaggagtataccgcgacggctgaagatttacgccttctgtccgtctttcggcgtgatgcggccggagcgcatggtggcgtgaacaaacgccgaatagttgatcgagtccaaggccgaatcggcatccttgaacccgctattcgccaggcgagtgagtttgcccaccatgtgcatcacgaacagggcgagtcgatggtcatcggcggttttcgccaccaggccgttcgggaagaggatttccatgatctttccgtacatcagatcattgcgaccataggtgctctggcggtcgcggaagacttctgctgcggcgtacagattgttgagaacatcttccgcgaaatcatctggatgggaatcatcttcgcccggccagacggattccatggcgaacggcgcggcgtcttcggtcgggtcttcggactgagccgtttcagcgagcggagacggggctttcgcaaacgcctcgtcgagggtaggggcggagttcggggcggccgggaacggctcgcctgccatgtcgttgggcgcgctatcggggtcgctatcggccgcgacggcgaagaacggcgcatcgcaaccttccaggttcaggatgtaggagtcgatccccaggctattgtaggcatcgatgatgtcctggcgatcatcgaacgccgcgacgatcttggtgacgccttcgattttcttcagtatgtcgagcgcgactgcccgcttgaactgaggcgccggctcggtgttaccatacggccgcatgatgagttcatactcgcgatgttcggcgatgccgagttcgcggtggagcttggccctggtctggaaaaagtggttgtcggttcggccggtgacgaagaaaatcatgaggtcggcgtcgatggcattcctgatgcgacctacagcgtgcgggttgagagtgtccttgtcgagacgagaatgatactcgtcccattgccgttccaaggcgaagctcttgcggtggctatcgtcgaatacgcagccgtccaggtcgaagatgatgatgccattctttggtttgcgttccatattcagatttccttactggttgctttctgggtgacggttttatcgatgaacgtcccatcagaagtgaggcggaaaacttcgccattctggatgaaatcgaacgattgcacgttcatcgtgatgcgaatggattcgctgccgttggtcacttcgacttgtgcgatgtcgccaactttctcgacaatgatcttcatgttacatggacttcccattgacggccacagggttggcctcttgtttttccgatccccagaaatcgcggcgcagttcttcctgctcggccgagcgatccatccaggggcgatagaacttgcactggtagataggttccaacggaacatcaatcacaggaatctgacctggctttgtctccagagcggccatgaaccggtcataggatttctgctggatttcctcttcattcatcaccttcgacccatagcgcgggaaggcgcaggagccggtggcgacgcagtgcggctggagcaggctgtcgaacataggatagacttccagaaccagccggcgcatttcgcggaatacttcctgatattcaccctgggtccgaacgcacaggcgaaccttcgccatgtcgctgagagtccgcagattgaacttggccgcgatcttcgtttccatgttggaagggatgatggcacgagcgtcctggagcgacgcgccggcctccagaagcttctggtagctggtttgcgcgtcggcaatggcgtcatgccacagacggttcagctcttcgcggacatggtaggtcgggtcaggctcgccatttaccgtagccggttcgtcgaattcccagcggaaggcttccggctgaacgacggcgctgatttccagagcgcgactggtttcctgctggtaagccccggtacgagtccgaacgagttgatgggtgaagttcttgctgacaccctcgatctggaaaatgaagtccacgaactcgaacggcgagcggatggtgtccagcatgtacttccagtggtcaagcttttcggcctcggtcatggtcgccgggtcttggccgcgcatgcgagtggatttcgtccccaggagaagttcccaggcgttctgggtgtaactgatcagagaaattttcatcagaaatcttccggaattggcgtgaagtggaattttttggttagagccagggccaggccttgggcttgctctttacgaatgccatactgctctatctcttccttgagcagttcgcaggcctccagacgcgactcatactcttcagcctcctgaacggatgagaaaacggttccatcagaggttctgtacacaagttcaatcgacatgatgacctcagtagcagcggatgatttcggcgcggatatctcgacggtcgaggtagtgctcacgaatcttatcgcgggcgcgctcggcctcttctcgactgccgaacgacaggttgaacgaagtgaaaggcttatcgtccaggcgcccatcgccaatcaggtacaggatgcctaccagcacgaaagacggcgctgtctgtcgcgtttgcggcgggtcgatttgcatttcgaggaaagacatgggaacctcttcaggatgatctggtgcgtacattaatagcgctcctgctgagcagctacggtttccggctcatagatgagcatgtcaacgatttccgggcactggcctttcacccagtcgatggccgcgaccagtgtggtggaagcggagaaagagaaagtgcggtaagactcatggatgtacggcgaccccatcgaatcgcgctcggtcgtgcgagaaatgactgctttgatattaacgatccggcccatcttcggcctccactttagcgattatatctgacaggctcagtttctcgccattcaggaaataactggcgcgaaacttcctgtcaccctctggcccgacgatccgggccgttatggtgagactcccgccgccaagggcatcggtgtccctgaagaaagccagcagcgcccgcttgagcgctgcctcgcgaggatcgacggccattaacctaccacgttccagccgtgctgagcgcaccaaaccgcaccggcccctgcaggaaggctattcagaaggaacacaggagtcaggcgaccgtcctcggtcatatgtatgaagtagcgggcgccttcaccgagccactcggccttggcgatagcgcgttcgagattggccttggtggcgtaggttttggtgtggttcttgtcggtggagaaggttacttcgcgggccatttgtagattccttttggttgaagggtttcgcgtttcgatgagggaatattacgcccacctgatccagaagtaaagcacttttgtaaattacttcacgaacattttcttggccttctgataagacgaagaagtcatcaggcgctcgatgacgtccatgtccgaaaccagatcatccagaaggacgttgcgccaggtagcgaaccggccgagcgagaagatgccagcctcatgggtgagattccagatcatggattcgcgctcgtcgcgaccgagcggaatgattttgcctttggtctggatggtcggctcgccatcttcgatgagctgtttccttctgatgccgaaggccgcgcaaacgtaatccatatcccagtcgctgtcccattcgatggtttcgattttaccatctaaagtctccactatccctttagtgatggattcgacgatcagagtatcaccggtgatggacgctcgaaacgttcccactttaggaccagggaaatacacggtctggaagacatcacaggggatggagagcttgtatcgactcacgatgatggaggttccttcaccgaatgacgggtcgattcccaggtccagccctgccgcagccagattggcgcggaacggcgcggtgctgatgatattcacgtggtcatcttgccggcgaagatactggaagaaagaggcgtcgaaaggacggctccaagtgatacgattcgcaagcttagccaccagctgctcatagtagtcggccggtgcgatccaacgcttttcagtcgccagattccagatggaccggtccgacaggccgcccgttactttcctggagtacatgttgcagtggtcgatgcgcggctgggaaatgaactcgccatcaatgtagatggccttgtgtacggtgacttcgcggaatgggatgccggtgagttggccgatgactggtgagcggaaccgcaagagcgcgttgtggcgttccttgctcgtcggcgtcgccgcgtcgatgatttgggcttgaggaaagcgatgcgcggcgatcaggccggcgagtccggctcctacgatgattactttctgatcaggaatcatgatgtgtcccttatgagtgtacaaaacttgagaggataaaaaagggacccattttcatgagtcccttgaagagctagacgattcaggctcagaggagcggcggcttactcctcctcaccttcggaaccatcggcgccctgatcttcaccgccgtgctcctggccttcgtcatcggccttctcgtcatcgccctggccagcttcgtcttccttcgaagcgatggcaaccagatcgacccagcccatgatttccagcttgctcaggtagctgcggaccgaggtgccatagagaagatgggccaccttatcgccgaaggattcgatttcgaccggctcaccaacggtgcagtgctcgttgatgtgtgcgaacaccttgccgcgagtcgagaaggcctgcggagtgccatggccgtcgccggtcgggatgaagtgagttgcgcgggggcgacgcgagccgttggacttcaggtcttcgcggcgggcttcggccttcttgcggcgctcttcctgctcttccttgcggcgctgcttctcggcttcgcgctctgccttcttctgctcggccaggcgcttgcgctcttcttcgcgtgcggctttctgggcttcctgcgcggccttcttctcttcggccttcttggcgcgctcggcttccttctcggccttcttctgctcgcgctcggcttccttcgccttcgccttctcggcctgctcagcttccttcgccttggccttttcagcgcgctcggcttccttggcggcggccttttccttcgccttctcggcgcgctcggcttctttcttctcgcgctcggctttgcgcttctcttcgcgctcggctttcttctgctcggcttccttggccttggcttcggccttctcggcgcgctcgcgctctttacgttggcgctcagcggccttctcggccttgcgcagggcagcggcttgttccttggtcagctcttcgccttgggcctgttcgttctggttcttctgttccatgttcttactccgggaatgtttaaagggatggcttattggcctgtgaggggattatctctaaactaattgaagaagggaatacccttagcctgaactttcctaaatattttctttcgggaaagtccaaactctagggaacttatttatgttcgagaagttcctagcttttacgcaagaacagtaagtattcaattgcacgagtgatcccagtatacatcaactgactataagggatggacggcaagttctcttccaacatggcgactcgtttccactccgacccctgcgacttgtggaacgtcatcgcccatccgaagtcgaatccgccaatagccttctgcgcctccagccgcacgtcttcctcggccgaaaagctcaagggattgaacttcacccagcgctcatagttcgtgccgataatgcgaactttggcaaacagcatttcatccggctcgtcatcatcttcttggccttcggggaccggcttgaagtccagcagaatcgcttgctcgccgttcatgatgccatattcgtgctggttcccggtgcacaccagcttctcgccgatttccggttgtacacctttgtagccgaggatgcggcgcgccctggcgttcaagcggcggcgagtattgttgtaggcgcaaaggatcacgccatcgtcatccaggaacgtccgcatttcgtcgtccgacatatcgaagccagcccggactaggatatcatcatactcgcgacagggcaggcgtttgccctggcggacgaacatcgacgctcgaacgatattcccggcgttacgctcgatttcagtcatgactgtgtcgcagctatgttcgtggaaaacctgaacgccgcgcacagggggaacttggccaaagtcgccgatctccagaaccggaattcgatgcgccaacaagcgctcttcatcccactcaccggtcattgacgcctcgtcgagcacgaccaacttcggcttctcgtcgagcgagtctttattggcgaacatgatttcgccgtcttcatcctcgccaatcggccgatagatgaagctgtggagggtccgggcattggtgcaacccttctcgcgaagccgcgctgctgccttcccggttggcgcgacgaagaccgtccagtccatcgagcagcaaagttcggcgatgatcttcgcgatggaagtcttgccagttccggcgaaaccagcgagtcgatagacctggcggcggtgcgctcgatcacaccaaccgcgataccagtccacaacggaattgatcgcgtcgatctgctgactgtttggtcgaaagccgaatcgctcttcgatctgatcgacggtgaagttagatgctgacatatttgcgttctccaacgctaggtttaattgaatcgaggctcagtttaagcacgccgtccacagaccagccagtatcacgacgatacttgcggccttgcggatcgacatagaagttcttcgtgcgccgcagcagaacataatgccaagcagctccaagcgcgtggacccttcctttatacgggaaagccttcgcctgctctgcggcctctttggccccagggagccagcggacggtcgaaaggaccaggaccgcacccttaatagcctgggaagcggcgcggccgtcctgtgggctatagcgatgtctatcgaagtctacccagtggtggttgccgcgccggagcttgaccgttcgggatcgcccctcgaacaccaccgtgccttcgtgagtaaaaatatgttccgccatcgaatgttcctttataacgtacagttatgctttacctctgcgcaggaagagtatactatcagctgactcgccaaagcgagcgaatttaatccaactttacttcggcaggaaagtggccgatactagcgccgccgcctgtactgccctccaaaacagaggatacattaaatgcaagaatgcaagatttcccgcgaccaactcccggtcggtaatccgaatcccaatgtcgacaagacccgcgacccgaacctgaagcccggtttcctgcgccgcagccgcgagctggacccggcgctggcagttcgcattcgtcgcgagctgatccacgccgaagcgtccgacttggccaaggccggatgggtcaattcacagtccagcctctatggatcgaaagccttcccgcgccattctgtagttcgcgtgaccggagttccggaagatggagctttcatcggcatgctgatcggcttcatcgagcaccgcgagcatggcgaatgggcggtcatggaagccggaacgaaagaaggcggcgccgtcatcattccagtcgatcacatcatgcgagcgtcattcgccgaagccgaagagttcgccgaaaagtgggagcggaacttggggtggcgtctcctgcgccagctccgcgagtgcggcgccctggccgggactgaagacgagttcctgcggcggatcatcaatcgatacgttcgtgatcgcacgatcctcgatcaccacaaagtcggcgcggacaaagactacactgatgcagtactcaaaagcatcggcgaaacatggccgaaaattccttcggggaaattcgtcggacaccgagtcgcgcagctcctgatcggccacaagctaggtcgagcggggaccattctgaatgacctggtggacttcctggagaagttcgcggccgggcgcgataaaattctcaacatcgccatctgtaattgaggtgaatgaaatggttgacttggaaaagctgagtccaaagctgagtcctcggcagcatgccgttctactggagatgtacaggcatcctgagcatccagttcacagatcgccaacgaatttaactcttaaggctttgagacgaagggggcttgtcgagctatcctggaaggattccgtggctggatatatgttcggtcgccaaccttgctggaaaataactgatgccggcataaggcgaatcctgggagtgctgggggaataatatggaaaaagaacaaagcgaagatcgcccaagcatccctgagtttgagaagaccgacgccaacaaactctatgatgctctggagacgatttcactgctggagaagaagttggacgaatccgaaaagcgcgggagcgagctggccgcgagctattgtgacggcgtagtcggcgatgaatacggccatccttattgtcgttataaagtggaacgcgacgccgccttggccgaagtcgagcgcctgcgagaatcaaaaggcgatccctctggcagcttcgacagatgtatgaaggtgatgtacgagcgcgacgagaatgcaaaacaactcgacgccgccttggccagggtcgcggagctggaagggaagttgacggactgggtgcacgaagggttccggctcaacgaggcgctagcggtcgccaaggctcaacccagcgtgccggaaatatctggcatcggtcgcgatgccgaacatcccagagctgtagtgctgtatctgcgtaacgaacccagcgatgaagatatgcgagcaattcagaactttttgcgcgccatggccgcccccgctcagcacagcgtgccgaaagcatggctcgacgttcaggcagagcgccgccggcaggtcgaggcccaggcgctaaggcaggaagtcgcagcactgcgcgcaagggcggatgttttgccggaggtgttcgggcttgagcggtaccgcgtagaaaaaactgggaagggtttctggccatactgcgtgcgtgcgggggatggaacgcgtgaactgttcgtcggccacttgaagcagtgtcagcgggtagcgaccgaattggctacggcgtttgaagatgggaagtttatcgccgcgcccggcagctcggctcagcacagcgtgccggaggggtggaagctcgtaccgatggacccgacatcgcagatgacctatgtcggtcagtccctgcgttatgacgcggtaaacagcatcggcgagatttaccggcaaatgctcgccgtagctccctcacccatcgatccggccgcgcatcctcagccgtgccagcaaccacaggcccatcctgcccgctgcgggtgcgagcggtaagtgccaagtaaggaattcatgtaatggaaccgaagaaaccttcaccagtagatggagtcatcatgaccagcctcgacgttctcaggaaggcaaagcctgaagctcaggacgagtatgccctgtccatgttcgcaacggcgatccgccagaagttacagcgctcccgcgataagggccgaggtggctggatcgactgcgacgaaaatgtcctgctggatggattcgccgagcatgcgctgaagggcaatgagaacaacctcctggacctggcgacgttcctgatgttcatgtgggtgcgcggcatcgatgatgcgaagattcccccggcgctcgaaaaggcgcgacagcacaagatcatggaagcctggagtcgaatccatgaagatggcctaaactccgccagaaaggcgagtgcggcgcgacagttcgtggaagttcctcgacgcaaggggcgcccggagcgacttgcatgaagcctcacgaaataagactggcccaggccgaagagttcctgcgcgaactcggccgagggattccggacgacgaacgggtgatggtcggctacgctgaagaggccacggtccaaaccgacgagaacggccgcaagctcaacgccggctggtggcctgtgccctggaaggaaggcaagtacatcaattccaggtccaacgcctatgcctgtatctcgtcatccatcaagacgcccaacccgaagaccggccagatgcgatactggcgcggcgaggcctctttcggccacggcctggcgttaatggtagatgacatcggctccggcaaagggtccaagggtgacttcgaccgcgacgagttccgcgagcgactggagccgaccgcgattgtggagacttcgccgaacaactaccagttctggtatttcttcaaagagccgatgtcccacatgctccagttcaaggcgctgctctattcgttcgtggaccaggtgctaaagaaaggcggcgacaacacagtcaaggacgtcagccgttacggccggatgcccttcggcttcaacaacaagcgcgggaaagacggcaagttcaaatatgccgacgaaaacggcaagcccgaactcgtgcgcctgtacagcgccgactattccaagcgctactcgccggaagagatcgcccaggcattcggcgtccgcatcatcatgccacagatgaagaaggtggagataaaccgcgacgattgggtgtatgaccaagtatggctgaagtatgccgagcacatctgcacgaaatacaagatgggcgaagcggcaggcggccaggtccagcagaatatgtccggcaaataccgcatccgctgtccatggggcgacgagcacaccaacggcgatcctttcggagcatactttcgcggaccgatacctggcgccgagcacgaatatgtgttcggttgcgggcacgatacttgccgcaaagagcatcgccggacttgggcggccttcacggatgaagtcgtgctaccctatatcgtcgaacaattagaaagaatcaaccgccgtcatatcggtgaggagtagacaatatgcaaaacgatcctggaatcctgattaccgccatcggcttgctgttcctcggccttatcatcttcttcgaaggcctaaaggggtggaaaatacaagtcgcaaacttcctcgcgtcgcttctgtgcttcttcttcggcctttctgctttgacgttctggttcgtcgttgcgtttgatgtattttaatcgacgaacggtacagaaattttcggatggggacggaacttattagctatgccggtttaggtaggagataatagccgtccctttcgcctcaatgtgtagaggcaatgttgaatccgatcatgtaaagcagaaggcggcaaacctaacatgattatcgacgacgataacattcttgatgatgacgaatcggggtccagtgagttcgatctcacacagatagaagatgctggaatggaccctttgatgaccgccgcaagtaaagcggccgacgatgcgattgcgaggaatgagacttaccgagcgcaaaaggcagcaaagtatgcagaggcgtatgcggaaccagatttgaagaagcgagcgcgattgttgatgctcgatcaggcctttgatcttccggtcagccggctggtgaaaggaccgttcgacgacttcatcaccaagtacagctcgacttcagacagcaactacctcgcggtctatgatacgttgttctgtaagggcgacggaactgtcccacacccgcacttcgacgagtttcgcggccggctggtggaccaccgaggcgtggcgttcaacaacaaaaccctcgatccgattgacctgatgggcgccctcgcggctgcggccttggacgatccctcgattaagaagacgattgagacttgctgcgtgtgggcgcgtcgatatcgccgcaactctttgatcgaaacgtttgagaagaagataccggattgggacggcgaagagcggatcgaaacgctgctgatcgacttgttcaaaccgttcgacaccgagcttaaccggatggtgagcaagtatttctggctgagcttgtactgccgcatcaactaccctggaatctcggcgccgatctcgttggcgttgattggtgggcaggatgctgggaagacttacttttcaatcttgatctgtaaagagttgtcgagcgaccgaaagttatcgccggtccagcttgacctgagccgtcatgaccagacgccatttttgcgcaatatcactggcaactcggtgatcgcgaacgtcggcgaaatgtccggcttcaaaaagggcgacatggaacgcattaaagagttcctggtgcgatccgatgatactttcgatcagaagtttgaaccaggcgaaactatcagtcgacaatggatcaccatcatggacggcaacggctatgatggtcttcaacgggatgagtcaggaaaccgtcgattttatccaatgttcgtggcgcaacttcccgacgaggatggcaagccgaattgggttaaaccgggcgatggaaatgaaactttccgcgttgacttcaccgacttcggccgcaaattctggcaagccatggctgagtgccgcgcctggattaaggcgaatggcgtggagggatatctcagtctagttcgggcgaccaacaacgaagtccagaaattctctatttcggaaatggagaatgcgcgtggcgtggttcgtgatgacacgattgatatgtatctgatcaacgtgctgatcagttgcgagttcgaagagatcaagcctggcaggaattcaaagaatcctggatggagagtcaacaccatcgaaatcctgaaatggttcgatattctcgccaggaagaagccgatttctcgccacttaactccgcacctgaaggcgctaggatttgttccgaataagaatggcttgaatggctggtgcctgcctgtagataaggttgcgcctggatggaccagagatatgcacacgacgttgccgccgttcaatgatgtgcttgtatacttgctgaggaaggttgattctgaggtgactgatgaagaggcaatgattcaaatccgcaaagttaaggccgagcgcgcaaggatattgggtgaggatttctgatgtagtgatggagtatacttggactaggccgccttcgggcggtcttttctttggtgcggagtacattcgatttcggttgtggccgagtgagattcggaagctatctggtaattagggtttggtggcgatggcgcgttgtggaaagttcgtgaacgttggatcaaggattttgtgcggtgattggatgaattgtggaaaatcgacgattctgactggatttttggggtcggccgcgccggtcttactggtaattaccgaaaccgggaatttgggtcgagccttagtgccgcgtgggcttgaagcgcttattcggatacttcccggtttcggatgcagccgcaaaagtatactacagcgaaaatcgattgcac

SEQ ID NO: 42 - DNA, 66882 bp, synthetic construct
  source 1..66882: mol_type = other DNA
aatcctaatagaaaaaatctatcacggacgttacctatctttaaaattaataaaattaatagtaatttggtaatttggtatactttggtattgaaagcctcgcggcactaagcttgtacatatcccgtcaagtttccgattccggccagctcgcggcagggtcgccggaaacttccagacttacaatccatgggtcgcggcaacaccacggcggactaagcggcaagcgccaaaactcgacgaacggaaccggaaatttgggagcgcgacagaatcgctcagctggacatatttctaacattcgatttaacactcctcccaaacactcaccaccatcctcacccaccaaccgccgactcgaccctcacccaccagcagaccgcccatataacatcctataacaccacctaacactcattcaccatcaaacccacccagacctacaggccacccacaagcagcccatagacgcgatccctggccccatagtacaatcgcgccatactcagtgtcgcggcagagcaccaggggccatccgccaaccaagccaccacgacgactccagaatcgaactcagggacgcagcaccaaatgaccaaattctacagccccgacgatctagtcacgccacaggaattcgcagacccgcatttcgcggcgatcaaccaaaagcgattcgacctgtacatcgacctgcgcgtccaaggttacagctcctggcgggtcttccgggccatctggggcgaggagcatatggacggtcccgcgcaggcccgcatcttcgcgatggagtccaacccgtactatcgcaagcagttcaaggccaagttgaacgcgaccaaaacgtccgatttgtggaatccaaagacggcgctccacgaactcctccaaatggttcgtgaccccaccgtcaaggactccagccgtctgtcggccatcaaggaattgaacgttctggctgaaatcacgttcgtggacgagtcgggcaagacccggatcggtcgcggtttggccgatttctacgcatcagaagccgaggctcagaccgcgaccgtcgctgctgcggccgaagccaatggctatgtgccggaaggtgaagagggagatttcccgtctccgtctccggaaccgaccgaggaagaccgcgccaaccccatttagacataaaataacggctaaggatttaaggtaaggaggtttatttatgcaccccttcgatcaagcggtcgtgaaggatccgaccgcgtcctacgtggacgtcaaggcgcggcggacgttcctgcagagcggccaactggacgatcgcctcaaggcggcgctgccgaaagaatatgactgcaccaccgaagcgacccccaatccgcagcaaggggaaatggtcatcccgcggcgctatctgtcggggaaccatggcccggtcaatccggattacgagccggtggtgaccctctaccgcgacttcgagaagatcagcgcgacgctgggcaacctctacgtggcgaccggcaaacccgtctatgccacctgcctgctgaatatgctcgacaaatgggccaaagcggatgccctgctcaattatgatccgaaaagccaaagctggtatcaggtcgagtggtcggcggcgaccgcggcgttcgccctgagcacgatgatggcggaacccaacgtcgacaccgcccaacgcgaacgggtcgtgaagtggctcaaccgggtcgcgcggcaccaaacgtcgttcccgggcggggacacgtcgtgctgcaacaatcacagctattggcgggggcaagaggcgacgatcatcggcgtgatctccaaagacgatgaactgttccgctgggggctcggccggtatgtccaagccatggggctgatcaacgaggatggcagcttcgtccatgaaatgacgcgccacgagcagtcgctccattatcaaaactatgccatgctccccctcacgatgatcgccgagaccgcgtcgcgccagggcatcgacctctatgcgtacaaggaaaacgggcgggacatccatagcgcccgcaaattcgtcttcgccgccgtgaaaaatccggacctgatcaaaaaatacgcctccgaaccgcaggatacgcgggcgttcaagcccgggcggggcgacctcaattggatcgaatatcaacgggcccgcttcgggttcgcggatgagctgggcttcatgaccgtgcccatcttcgatccgcggaccggcgggtcgggcacgctgctggcgtataaaccccaaggcgcggccgcccaggcccccgtcagcctcgaacatcaccatcatcatcattgaagaagcgacaaagccccggactctagttcagaatccggggttttcttttgggcgccttattcgccagcttcgatgatttcgaagttgtatttgacgccttcgtgctcgaaagtcattttgccagccgccttcagctgcatgcggaagcggatgtgtttcgaagaaggcaggccgaactcgatgaatgctgcgttggtggaccggaactcgccgcgcttgcctttgacagtcacagccacgccatggcgctgagtgcgtttcttggaaacttccgggtctttccaggagttggcgatggctgccgacaggtctttggactctttggctttctccggagcgttcttggcctcttcgcgcatcttccggatttcttccagcgcttcctcttcggtgatctcttcttcaggcttcagattctcttcctcggccttctcttcttccttcttcttcttggaagtgcgggttttgtagactttggccggggcttcctcttcctgaaaggcttcttcctcggccggcagagcattcaggatggcgaggcagcgacgctcagcagtcttgcggtcagagaaacgcttgacggtcgcatcggcgttgtgagcgttgtagaaggcgaccagttctttcatttctgcgttctggatgtcgccgaaggttttgatggagttggtcattttgcgatcctctgttttggaagatttcgttcgggcttcggtttgtcgccctgttgaaagagattatgcctaggtcgatgctgcgtgtctacatttatttcatcagattgatcgcaaagccgacgaacggttgtctgatgtgaaaacaccgcagagcaggttgcggtgtttggtgggcgagggcgatggtcagaaagtcgggactgtgatcggctcgattggcgggtcgccgggcctgtcgttgtccgatgcgggcgccgggctggaagggatcgcacccgaccgaagcgccagcgattccgactgcctgcttacctgcggagctggaggcgcttttggcgcatgaggcgcgggcggaaccggcaggcctggaggagccatcggcgccctgggcggctccggaagatcgggcagatcaggaagactcggcgctatgccgccaaaggaccgctgcgacggattgtcgccgaacatttcggcggatcggttgtccttgatgacttgacctatggcagtcttgtcgccacccggttctgctggatcgaagcccgtgaatggagtggtaacgcagcgcatgttcggatgggtcggcagattgttcaggacgatggagtccgcccagacatacgggtttttgtggttgccgggtccgtggctgatgatctcggcaggaatatggccgttcatggtgagccattccgccatcccttgccgagtcagcgggcttaccacgatctgaccagtggactctttggcgatggcgaacagatcaccgaattcgaatccgatgattgtgtagttggacctggactcgccgacgaaagccagagtttcgatgttgtggtggatatcttggtcttcccagatgtacagcatggttcgctcctcaataaggttgcttttggtgttcgaccagagacataccggccggaactttgaagcggacgtattcgatcatcatcgccgttcgacgccgattcgtgcccgactcgtcattgacgaatagttcgcactggtgcggaatgactcgcgtcaccaggtcttcgcctttcgagccgtagaacttgatgtaggatgcgacgcctcgcgtcatgttcagacggatcgtttcgcagagtcgctgcgcggccgacgcgctagacagatcggtcggactgaccgtcacccagtaatggccactttgttctttatcggacataagctgccctccaatgagaaagcctctgcgactcggcagaggcttgttgttgttagtcgcgcttcaacagaacgactttgtcatatgcgcgatatttaccgcgccagtcttcccagtagtcgccggccgggcaggtaagctccagggtgatttcgtcgcgccagcattcgacagaaaggacaattgccttgttcctggctgcggaatccgccctgagcttaatcagaatttcgtcgccagttttcaactcatcaactcttacaacttttgccatggtgttctcctattgggcagcgccgcgagggcggatcgggtcgatgtcatgtaagcagatggtaggatagtccctggccaacttgagcttgaagtccacccagtcagcgccgatgagtgccgagacttcgatgcttactttgctgtgcggcgcagctccagatcgcaggactgtggcccgacgccgaacgggatcgttgacgtcaacatgagtgagtatttcgtcgccgacgagcaactcacaggccatcaatattttggccatcatacacccctatgagaaggcgcgcccaggacgatcccagccgcgccgatggattaacgtttgtgaaggatggacactgcgtccacgtcgaggatgctaatggtacggcgacggcgcggattgctgcgttcatggatgcgaatcaggttcgcagctggagcttcgtccaccacccatacgtcttccggtttctgcgtccggagcaggaccgtcacttcagtattctgggcgaggccgttgcagatgaaagtgaacttggacgagggagttctgtacatttcgagattcctttttggacttctggtccggcttctcagccggtgaagagattatgccctgattctcaccgccgagtaaagcatttgtgtaccaattctcccgtcaggtggaaccaaagtgcggtatcgcttatggctacgctaccgcgccatggcccttcttgctcgcacactgcgaaccacaggctgatttccatccttgccaggactcggccgaaagattcgaacctgcgccgactggacaggatgtcgacattcactcgtcgattgacctcataccggcgaccgttgatgacgaagaccagccgcagggtttgtccgtcaagacactcccagtatctggtttcatatcggagccaatagcgcttgccagccgggcctaccatggtcatttaatcgatgctcctggccgcgccacgcggtccggtcggcgggacgggatcgaaccgacccaggatgtagtcgggccggcgcgcttcctgaggacacacggcgagaaggcgccatcctgcgtccagggcagactggagttcgtccgtgcagcagtcttccttgagcagcagacggttgacgttctggagattcggaccaggtatggccgatcctgtgagtgagttccaaccctcgattccactcaccatctccggttggttgatgtagcttacggacataccggccaaccggctcgcggccagctccagacgctccagcatgggtcgcagagcagcttccgggtcaatgtcgtcccagagaaggaccaggctgatgatggtatacggatagtccttgtccagatcccaggctgaagcggtcaggcggcccaggccgatttcattacacataacgggaacgtcgttgctccaggtggacggctcccagttcccctcaccaggattcccgattgttacgccttccaggttccccaggagaacgtggagcttgctgacatattccgcctccaaggctttccgctcttcgtcggtctggttgtggcgatagaaggatggagggctgactttggcatggtagagtttcataactgttcctcggttttggaagatttgaaagttagagaatggtgtcgcagtatttctcgaaaggactctggcgcttcttctcgcagatcgcgcaggtgatttccaggtcgggcagctcgctgtaagtcttgccgagatacagccagcgcttgcacagactgcggccgtccgacgtgaagaagtggactttgcgagcattgccgggttgcggccagccgcttggtgccggcttcctgctcataccatcaccacgtcaatttcgtcggcgaagaagttaaagccaactccatctgcgtagccagtgtaacgcagacgagtcgtcccatcaatgtgggcttcctcgacgccgatgacttccagggtggtatcgttgcagtacagcttgacgaacatcttgatgccggagccaatcgccgcgaaggcgatctgcttgtacaggtcttgcttgatcatgctttacgctcctgtttgcggatgtattctgccctgacttcggcttcgaacttcgcccagagcgcgttgtctactggaccccagggaccggtctgagttccgtccaccggcgcgaacttgccaccggcgcgacgatacttggacagcgttctcaggctgatgattttctcttcttgggaatcgaattggacgatcacttgacatacttcccgaagtagcaggtgtggagtatttccaggcctttggagatagccttcagcttgatgccgaaattcttgatcgcccagtccagatcgtggtgatagaactcgatgatgttgacgatttgaccggcgctgtagtggatgacgcgaaccttgccgttccagcggaaatcttcgcggctgtttacggcctcgactgcgatggtgtcgtttctgccgatgttccatttggagctagtcatgtcgcaatcctctttttggagtgtttcgcgttcgatgaggtaactatacctcagccacctcatcgagtaaagcattttcttcagattatctgaaaccttttgaagacaggaattgccgccagagccagtcgatgtgttcgttgcagtaacgctcgccatcggacgacatagataaggcgccatcattgatgccgaagtgggcagcagcgagacattcgaactcgaactggagcgttcctgggcgagggatatgggacatggcgtatttctgcacggtcagtgatcctcagaaggtttagcgtttgcgatagccgctactttctgcataccgaggcgatagaaatcggcttctttcctggcttttgtaagctgctccatggcgtcgcacgccgtcttgtgctgggcattggcgttcttgatgctgccttccaggctcttgtccagctcttcccggagcgccttctgcgatgctagctctgcctccaaatcctggattctgagctggagctggcgatttgtctcgccaacctggttttcgcgggcgatggagttctgaaggcattcgtcaaggcgagtattttcgcgcaccagctgatgcttttcgactttcgcctttctgcacgtctctcgcatttctgaaagctcaatcgcatgcagatcgtcatccgggtctttacgctcttccttcgactccatccgcaggtagtactggccggctgcgaaggcgagcactgcctggtcggcatacgctgcggcatcggtcatgtatctggatttgtagcgaggcagaaacttgcactcctctggatcccagaggagactatcggcaataggccagaatttgcggaagccatcaggatcgacttctacattgaccatttgcagctggccggcctccacttcgacttccagaggaacctgaatggcgccggtgatgtactggaagtacactatgctagacataacacaatcctcataagaagtcgcggccgggaccatcccagccgcatcgtaatcactcttcgccttcgtccgcgctcagccactcttcgaaggcgaaatttaccttagactcgacccaatcttgaagctcatcggcgaactcgtcactgtcgatgtccatcggaatgcccagagtctcttcgttccacagttcggcattcagttcgaactggatagccggttcgccatccacattcagcaggatgcggtctgcgacttcatattcgtcgacatcgaagaggaaaccgccgctgatgatgtgctggatgaaagcttcgtcgaagttgctgatgccgatattgatctgcttagtcattttttctggccccttatttggcgagtttgtactgagctttgagggtggtcagcttagctttcagggcgatcatagcctggccgcgcaggccttccatttctgcctcgctgatggcgatcttggcggagcggatttgatcgttgatctgggatttggtcatttctgcgttcctctgttttggagtgtttcgcgttcgatgaagagattatgacgctattcagaatggaagtaaagcagaattgtgaaatatttctcaaagtggacgaacggtatgccccgtcaggaatatttcctcccatggaaggcatttccgcatccgaatgttgattaggtatcccaaagcgcgcagtggcgaatgtgagtccgcacgtacatagggttgtattgtgcgaagtgctcgacggtcgcatccaaggctctgctattgccgcacccttccgctttgcgagccaggaagaatgcttctatttgctggtttgcgttcatcgtcttaccctccaggtgtttgttcgtttcgatgaagagattatgccgttggtcagaatggaagtaaagtgtattaacaataaaattatgttcaccgacgaacggttgtgctcgaccgtccgttgcggcgtcgatatactcgacctattgctgacaccggattgattagaatgtacaaactcaaccctgcactgcgagcagtctggcgaactcgcgcccgttacaaagtcatttatggcggccgggcgtcttcgaagtcacacgacgcaggcggtatcgccgtttacctcgcggccaactatagactcaagttcctctgtgctcgccagtttcagaaccgcatcagcgaatcggtctacacgttgatcaaggacaagattgagaattctgagtacaacggcgagttcattttcacgaagaactcgatcaagcacaagatgaccggatcagaattcctattctatgggatcgcccgtaacctgtcggaaatcaagtctaccgaaggcatcgacattctctggcttgaggaagctcactacctgacccaggagcagtgggaagtcatcgagccgaccatccggaaagagaactcagaaatctggatcatcttcaaccctaacgaagtcaccgatttcgtgtatcagaacttcgtggtcaagcccccgaaagactcctgcgtcaagatgatcaactggaacgaaaatccgttcctcagtgagacgatgctcaaagtgattcacgaagcctatgaacgcgaccgggagcaggccgagcacatttatggcgggattccgaagactggaggcgacaaatccgtcatcaacctcaagttcattctcgcggccatcgacgcccacaagaaactcggctgggagccggccggatcgaagcgcatcggcttcgacgttgcggacgacggcgaggatgcgaacgccactacgctcatgcacggcaacgtcatcatggaagttgacgaatgggacggcctggaggatgaactgctcaagtcgtccagccgcgtttacaacctggcgaagatgaaaggcgcatcggtcacttatgactccatcggcgtcggcgctcatgtcggttcgaagttcgccgagttgaacgatgccagcccagacttcaaactgatctatgacccattcaacgcgggcggcgctgtcgataagcctgatgacgtctacatgaagctgccgcacacgattatcaagaacaaagaccacttcagcaacatcaaggcgcagaagtgggaagaagtcgcgacccgattccggaagacttatgaagcggttgagcatggaaaggtttatccatttgacgaattgatttcgatcaactctgaaacgattcacccggacaaactaaatcaactgtgtatcgaactttcgtcaccgcgcaaagacctggacatgaacggccggttcaaagtcgagtccaagaaggatatgcgcgagaaacgcaaaatcaagtcaccgaacatcgctgactcggtgattatgtcggccattctgccgatccggaagcccaaaggcttcttcgacttataaacatagaaaagcccggatcgctccgggcttcgggtcttactcggtgcggttcctggcgctgagtgtcgacgcaacggcctcgccgactcccagggcttcctggccggccgcgagcgcttcggcttccgactcgacgatgaaatcatcaccttggccatcgcctggcggaacctcgaccagcacggcttcttcgccttcgaaccgcaggtcataggtcttttcgacggacagaccgtaacgagcgttgagcgcgtcccagagctgggcctcataggtccgcaggtcttgcagagctttctggtggctgagcatggccatgtcaacggcccgttgcagggtttcgtccaggacgttgaaccgaatgcgaagagaacgaatccgctcgacgacttccgcatccactacatgtctttcgatcattacttttcacctttgctgaatgtaacgttgtagccgttgtcggccaggtaggtcagggcgccttcgaaggaagttccgacgaggtgctttagcttcatttcgcgttgcgcggccagccagaatgcagttccggagaactcggcgcggccttcggccaagaccctgccatcaggcccggcgatccgtacatgcacggaagatagcttgatcggcatcagtgaatacctccactggcttgcgacggcatgctttcggcgcgtgcggcttcgcagtccgggcagggacatgcctggcggacgcgctccagctcgtcggcatccatgacatagagcttcccatcggcagtgtcgtgcgccatggcgatgttcgggaagtcggtggcgctcaggccggcgacagcgcggatttcgtcccaaagcaccagatgctcggcattcagtcgggcggcgagcgcttcgtgctctttagcgacgcgcgccatgaactcgtccacccggaatgcgaattccgcatcgatggcacgggccgaggccatggagctgagtcgaatcggttctttcttcatgatgattctcttttggttggcggttgttcgctgctcaggcctattacagtctgagcagcatgatgaagatgaacgcaaggaacgcaaacggcacaagtatgccggacatcagctttgacaggcgctgcatctcagcgtatttctcggttgacattccgtgctgcgccgcctcagctgcgaagcgggctttcgcctcgataacttccgggcgtagcgacaggacatattctaaggcctcttcccgcgctttttcggcctcgaccgacctagggtcgcgggcagagacttcgctgtgccctggcctcgcgggatgggcttgcagagatggaggaagttcagcagccacgactccatagtcggcgcaggcccaagcgatcccgatgaggatcgcgaggatggattggacgattcgcagcatcactttgtcgctagggaagttcataatcaatcctccaccgaccgaacgatttccatattgcgcccggcattggcccctgcattgaaggcgcgccgaccgtcgctatcgtccagacgcatgagcttcgtaacattggacttcttgtagccaggatcgccgaaatgttcgtgaaccgcagcttccttcaccacaaccagagacgttccggcagaagataccagctccatacgcttcctggttatggactgaaggcgatagctgatttcctgggtcgcggccagtttgaattgcgcggcaacctttacgttgaaacgttcgtacccttgcgccttctgatactcccgacacagacgatcaatggcctcgaccagggagttgaacatgttcaccgccagctcaacgtccgacttgtagcctttgaagcgtacggcatgaccccagcgcttggtagtgcttccgtcgcgggcgctcctggatgccttagccgatgctctgtggttgttgatgccaccggcgaaatccatgatgcagtcattgtatgtcgccacggccactgagaaaaacttcatccagttcgggattgcggaatagtaacgagtggcaatttgctcatcgaactcttcgcgaatctcgccggtagcttcgaagtcgtgaaggtcatatttgtccttcaacttcttcacacgctcggctgcgatggccgcttcgtgcggactggaagagtcggctgccatggcggtcagtttgcggatgcggtctttcgccttctcgatggcttcaggggtgaattcgttctggtcggtcatggtcggttccttttgtctgaagggtttcgcatttcaatggagctattctgccttcattcagaatggaagtaaagcactttcttccactatttcggcatcgactggaagaaattccagatccaatcacctgctaccagcaagaggatgagggcggcaaagaacaagacagcggccgcgagctgtgcgcccggcttcagtttgggatggctgagcttgggctctacgggaacggccggagcgctagcgctgcaaccggcgtctcctgggccgtagccgatgccgcgttcacacgcctggagcgacaccagggatttaagatactcggtctgcttttgcgactcttcgtagatgccggcgacggcgaaccagagggcgaacactacggacgtacacacaacccaggcgccggtcagcaggagggccagcgggccgatgacgaagacggtagcagccaggacgattgcgccgccccagatgatgaagccggccagaccattagtgatgtcgacacagaactttttcattttcagattccttcggttacgggatggaggggatttgaaactctgcgccgccgagaacatcaatgacgacttcccagagcgtcggaacagaccactggtaacggtcgaagtcggtttcaggatcgacgcccagcgtcacataggaagtggcaggccatttatgagcactgcctttccgcatgagagtcgccacgcggccgtcaccgagcggattcgtcctgtgcggaacgtacgcagacatcgaatattgctgcccggcgtcgataacaaatctttgcctctggcgcagacatacagagcccacaggattccagccgcgaccgccgcaagcctggcgagccgaagaatgctcataaccttcgtgagtcatttcgctgaggcaagccgagcgatcctcgtaatagttgatgttctccatcgatccaaccagcaccagagactcgaaatcgaatcgatgatcgtggatggccgagtgattgaagcaaagccgacgcggcagctccgggtgccaaacatggaggcgaccggccggaagttggacctgaatgaaccccaggccgtgcagagtgatcttgtccttcatcgggtcatggacggtgctcatggataatcctcagtagcagaaatgtattgtgagagttacgattgataagccggtcgcccatagaagggcgaaccaggccatggctttgatggtcgtgtagatcatccgaagaattttccggcacagatcgggccaatgcccatttcgatggatgcgtggttggtcaactcgcgaccgcagcaggagcactgaccagtcttccgaccgtaggcgactgccgattccatcggcttttcgaacatcttcagaacgtcgtcgtgctcagtatcggtgcagtcgcgactcttgatgaatttgccattggtgatccggccgaggtagatgccgcccaggacgtacaggctaccggcgttccggctgtgagcgctagcctctttcacaacaacgatgagcggctcctcgccttcgccagctaggcggattttcgggcgcttgataccagactctttcgccttctcaaacgctttctcgatgccggaaatgtccagagtcggcgcagcagcttcctgcgctgccactttctcgcgatacttggcgaggttttcgatggcgcgcttcgcagcagcgatctgattttctgtcaaggagccgtatttatacaacgactcctgaaggctctgagcgaagctgaaggaatttccagtccaccactcgatgatgtccgggtgcgcggcttcgaaggccttaattttgaggtcgcgctcttgcgcagcgctacagattttctcgatgcgcttttctgccgccttagcacggctcttggcgcgctgctccgggctggttttgtactctttgtatccgacgccgccgcaggcaaagcaggcgcgaccataagacgaagggccacggtacaggccggtgcctgcgcatttggtgcacttgtcgcgatacagcttcacttccttccgggagttcgggcgggcacccatggacacgtcttccagggtcttcggcgcttcgttgttgatctctacggtagcgaagtcatcacccaggtcttcgaagccggtgaacagattctctgctgcgttcatgtcgattctcctgtttggaaagttcgtttcgatgagttgactatacgccagaaatggaaaaacggtagcgatttctcactaccgttcgtcgggtcgaagacaatcaataaatgtcgctattgatcttgaacccatgctcagcgccgtcgttgtagtcgtactcagcatagctgtcgcagtagtcgttcaaatgctgaatgatgcctagaacgtcgttcgcggcattgtgccgtttcgcggcgatggtcttggcgatgctgtcgccgacttccagggtttcggccgtccggcgatggatcagcagacggctccaaagatagagccggacgcgacgaatgatgtctcgatggcgctccagtcgtccgtgcaactcttcaatttcttgctcgcgagatttcactactcgtcgaagctgctgaacttccagttccaaatcggccttagtagccatgttcacctcaaaaaggaaaatcgtctgggactccaggaagttcgacgattattgttgagcctgatcgatccagaatgcatccgaccgagccagccctgtggggatagggtctacacgaactataacaggtaacttccatgactattcgccaggtcgatcctccacaccatctacagactggtgggcgcttcgacttcagttttcgttcgtccaagacggcgcgtctgtcgcatgaaaggcagcgcgccttaaccgacgtaaccatgggtatagtcgatcattcggatgagaccatcatcctctgattccctcgacttcagaccgcccaaagagtccgactggccgttgcatttcgcatcgatatccatcgaagacaggaatcctgccgatactgcggtgatatcaactttgtcgccggccttcttgaagtcttcgcactcagcatcgagggccacaattgcactcgcggccatgttcacatgactgatgaggtcggggaagatcacaggaacttcacgcgacatgccacggaccgtcagcttcaggactacatacttcatactcactatcccttttgtatgtgaggaaagaacttgctgttttccggatggtgaaaacgctcggtcgcaggcggtctttcttccggacattgaatcgtcgaaggcgggaaaaccgcgccggcgataatcgccgcgaggagtgcagcggatgtcgacatccagagggcggtttccaggctcacccgaacttccggacggcgcggcttcattcgctccaccctcttcctggctcataggatggcagaccgccgccgcgaatccaattgtcccacatacggttcagaccagtcggtggctggggcggcggactgtagaatccgggagtctcagtgctgctcaggaaataaggcgtgcaaacggcctggacgaccaattggtgccgctcccacatcttatcaatcgctcttagcatgacgtcttcgcactgagccttactgtcgaaccgtctgctagtatggtccggcatctggacgcagccgtctccagtgcaaaggaaagcagtagcaatccatacggtgatactcgccatttcgtcaccctctttagttgatgagcagagtctattccatctgctcgccaggagtaaagcgcttttcgtcgggataaatgccgatgatgtctgcgtcgagcatccaaatctccacggacggatcgtcgctgctgatttgatataggttgtacagctcccgtccgccgacagcacgctcgcctcgtggctcaaccgccagaaccttgccgtgtccttctccgtgctcgtccaggtatatgacgtgatcaccgacttcatagctttctttcgtgacgaggcgtgaacgcgagctgttctgcgattccaccatccaggaatccagcacgccgcctttcatgtcgcgaaacaatcttgccgatttgtcgcaatcgaatacgcccagaacttcgccgtctttcaacacgatatgtacgattggcaaaagagtattcatgtttaatctccattggttgataattagagtctaatctgccgaaaagttcccgtaaagaattattttctcataactgattagttgcaactgttaatctgatgtatatgtttgaatctcttttgaacgtttgatgtttcccctataataagcgcacacagtcaacaaccacgtggaactacaatgtttaaactttcctggatattcgggcgcaaaaaggataatgctgcctgttcggaatcggcgccggagaaagtcgcacaaatccctcaacacgatccgctcgaccccatgatcaagctgggaaggattcgcggctggaacgtcgagccggagaaaaccccggtcattcgtagtgtgaaagatttcctggagccgggcctatctgtagcgatggatagtgcgtatggtgatggaccaactccggccgcgaaggctgctgcgggcggccagaatccctatgtcgtcccgactatgttgcaggactggtacaattcccaagggtttatcggataccaagcttgcgcaatcatttcccagcactggttggtggacaaagcttgttccatgtctggggaagacgcagcacggaacggatgggaactcaaatcggacggcaggaagctatccgatgaacaaagcgcgctgatcgcccggcgcgacatggagtttcgcgtcaaagacaaccttgtcgaactcaacagattcaagaacgttttcggcgttcgtatcgcgctgttcgtcgtggagtctgacgatccggactactacgaaaagccgttcaatccggatggaatcacgcccggctcctacaagggaatctcccagatcgatccatactgggcaatgccgcagctcactgctggctcgacggcagatccgtcttccgaacatttctatgagccggatttctggattatcagcggcaaaaaatatcaccgcagccacctagtggtggttcgtggaccgcagccgccagatatcctgaagcctacatacatcttcggcggtatcccgctcacccagagaatctatgagcgcgtgtatgcagcggaacggacggcgaacgaagccccgctgcttgccatgtcgaagcgaaccagcaccatccacgttgacgtggagaaggccatcgcgaacgaagaggccttcaacgctcgcctggcgttctggatcgccaaccgtgataaccacggcgtgaaagttctgggaattgacgaaggcatggagcagttcgacacgaacctggccgacttcgacagcatcatcatgaaccaatatcagctggtcgcggccatcgccaagactccagccacgaagctcctcggcacttctccaaaaggattcaatgccactggtgagcacgaaacgatttcttatcacgaagaactggagtccattcaagagcacatattcgacccacttcttgaacgccactatttgcttctggcgaagtcggaagaaatcgatgtgcagctggaaatcgtctggaatcctgtagactccacgtccagccagcaacaagccgaattgaacaacaagaaagccgctaccgacgaaatctacataaactctggcgttgtgtctccggatgaagttcgcgagcgtctgcgcgacgatccgcgttccggctacaaccgactcaccgacgatcaggcagaaaccgaaccgggcatgtctccggaaaacctggccgaattcgagaaggccggtgcacagtcgacaaaggcgaaaggcgaagccgagcgagccgaagcccaggcgggcgccgtagagggcgcaggcggcccggttcccgccgctccacgcgggactaagcctctcgcgaaagcggccgaggaaggggccagcgaggccgctgaaccgccgtcgcgaccggaccccaaggccgagctgcggaacttgttggtcgatcttttgtcgaagctccaagacctggacgacattaaggcgccggacggcgtagacatagagcacaatgatgcgcctggcttaaagcgcacatccaaacctggcgtgtctggtatggagccttcggtgttttcgtccaaccgcatcgtcgggcctcgtgatcattcggaactccagagaatcaaggtgaatggaataaccaccttgatcgaaaatccgcgcggaagcattcgacaaggcaaggatgggagttggcgagttcagatgaaacaccactacgggttcatcaagggaacgaaaggcgctgatggggatgaagtcgattgcttcgtcggtccgaatctgggatccaaacgggtcttcgtcgtcaaccaagtgaacaaggaaggtcagtttgacgagcacaagtgtatgctcggcttcaacaacatcaacgatgcgaagtctggatatctgtcctgcttccgtccgggctgggatggtctcggctccatccatgaagttgacctgcccgctttccgtcgctggctggcgaacggcgacaccaccaaaccattcgggggcgagtgatggcattcaaggcctccaaaaagcgcgagcgccgggcacctcttccagtcggaagagggaagcccataattccatcggcaggaatcgaggcctggtatcgaaagcagatgaaggatatgtccaagctcatgatctccgactatcgaaacgagattgagaaggcgctgtcccagcctgcggccgaacgtttcttcgccagagacgaatccgttaacgtcctgttcaagatgacccttcgaagcctacagcagcgatggagccgaatttttgaaggtttcgcggccaagatcgccccggagttcgtcaaccggaccgaagaagccgctaccgccgcgacccttcacagcttgtcggtggccggcgtcgatcagccacgagctgcgtataatgagagcgtcaggaacaccctggaggccgcaaccacttacaatcatactctcatcaccaagatccaagaggaagtccacgagaagatttacacatcagtaatgctgtctctgacttccccgaatccggaagagcaaggaacttccggcataactaacgcacttcgcaaagtcgggaagttttctgaagatcgaatcgaactcatcgcaagagatcaaacaagcaagctttacagttctctgagcgatgagagaatggcggaaaatggagtcgaggagttcgagtggctacactcttctgccggcaagactcctcgccacacccacctggagaaagatgggaagaggttcaagctgaatgaccccagactttgggagggtccgaaagcagaccaggggccgccaggatgggcgattaactgtagatgcagaaagataccagtcatttgacatcgataggagcgctatatgccgttagttcatggcacttccaatgaggctcgttctgaaaacatcaagcgggaaatcgaagccggtaaagacccaaagcaggctgcggccatcgcttattccatccagcgcagtgagaaagggaagacggcgaaagattgttcgcctgagctcgtcgccgatcttcgcgccctggtggacgctctgtcgaggctcgtgaaatgaaccgcaagacgtgccggcgccgactcgtggtcgatgtaatcagggccaatattcacggcggattcttcagcctgaagtttgccgccatcgatttggcaatcatcggcgtcgccatcttgatggcttttggccgataatgctgagaaaaatctggattctgactaaaaattctagtccggatagccgcaagttaccgtttacggaaaatagcagtaatttggaaatcctactgccgcgaggctttaacagagccagttcctaatttccgatttagccgcatgcttcaaaagtatatagcctgggaaattagaagtaacgttccaatagaattcatctataagtaacgttataatataacgtcaatctatatgctctagacgtattgaaattcaatttttaatcggtaaattggtaatttgaattagtttaggagttgaaagcctcgcggcagtaggcttagacaaatcccgtcaagtttccgagaccaaattaccggattttcgcggctgaggaactggtaattagatcacaatacaaattataatgtaagttaacagtcacggctacatctaattattgttccgcttatttacccttagatgtactgcgtatataatacagccatagtccacgactcttcgaactaacgatggcaaagtcgaaaagaaaaattgacgaaaatggatatatgaccatagagggctgcccgatcagctcttatggcgttttccaatattctgctggtcaactcggtcttccgggcgatccgacgcggattgtcaacgtatatcgcccggagtctgccgtcagcgatccggagtacatcgaatctctgaagaatctcccgttgatcgacgagcatgagatgctgtcgggattcgacgatgatgacgatagcgtggcccccgaagacaaaggggtggagggcatcatcacatccaacgcttactacgaagccccatgggcacgcggcgatatccgcatctattcccgcaacatgcagaatcagctggaaaggggcaaagaagacctgtccctaggctatagttgccgctacactgagcaacccggcatctggaacggaacgccttatgaagtcgtccaggacaagatgcgcggcaaccacattgccctggtaaaagagggtcgtgtgccgggggccagagtattggatggtctgtgttttgaccatctcagttttgatttcagaccatccgatgagggtaatgaaatgagtctcaagaaagccaagcggaagccccctgtccagcgcgtagggcaagctgctgactcggcggtcgaagagttgcgcgccctgtggccgaagctatctgcgtctgtccagaagttcctgggcgaagaagagcaggagccggagcatcaggaaggcgccgctccggccgaaccgaccgacagcgagcacctgaccgagcatccgactctggaaggtgctcagaaggatgacgaagagcaggaagaggagccttccgttgtcgatccggccgtggccgccgtcgagccggagcatcaagaaagcgccgcatccgaaatgtccggtgaaggcgaagtcgccgaactgatctctcaggtcaaagccattctggctcgactggagggcacggtagccgaaggggcagacgaagagcatggcgaaggtcaagatgtcgtcgagggcttggaggagcagagcagcctcagcggctcgcaaaccgccagcgacgatggtggtgagagcaaggataacagcgaggaacttcctgaaatggcacagaagaacgcgcaagatgctgcaattcgcggtctctatcgcgacattgctgctaaagatcgcctctacaagcgtcttagctccgtggttggtgcgttcgatcaccgagctatggactcggctgaagtcgctgtttacggcgtgaaaaagctgaacatcagctgtgcgaagggccaggaagctctggcgctcgacatgtacctgaaaggcgtcgaagcctcgcgcggcgcggccagccgtcaatcgaaagcccaggattcggccggttctgctccgcagtgcgccgagctggacagctacctgaagggggagtaactcatgttccagaaacaagtttaccgccagtacactcctggttttccgggcgatctgatcgaggacggcccgaagcgggcgcggccgggtcgaatcatgtctctgtctgccgtaaatccggctgccaccgccaccggccccaaccgcatcagtcgcgctttcggttatgccggtgacgtcagcgccctcggcgaaggtcagccgaagaccatcgcggctcgtgcttctgaagtcgtgatcggcggcgccaacttctttggtgtcctcggccatccgaagcactatgctctgttcggttcggccggagactccctggctcccagctatgatctgcccgatggcgccgaaggcgagttcttcgatatggccaccggcctggtcgtcgaaattttcaacggcgccgcaaccgccctggacctggactatggtgacctggtcgcctatgtccccaacaacctggctaccgccgacaacgcgcttggcctgccggcaggcgccctggtgggcttcaaggccggctccatgccgaccggcttggtccagattcccaacgcacgtatcgttaacgccatcagtctgccggctcagtcggcggggaatctggttgctggcgttaccatcgtccagctcacgcagtaaggaggcgtcatgagccagatcagcaagacccattcgcgcctcgcaggccgcaatgcgaaacctttcgacctgaaaaacatcaccaatgacgccgtggcgtctctgcgccgcatcggcctggtattcgatcacgccgtcgtccaggaccagatcaaggccttggcgaaggccggcgcgttccgctccggctcggccatggacagcaacttcaccgccccggtgaccacgccgtccatcccgactcccatccagttcctgcagacctggttgccgggcttcgtgaaggtcatgaccgctgcacggaagatcgacgaaatcatcggcatcgataccgttggctcctgggaagatcaagaaatcgtccagggcatcgtggagccggccggcactgcggtggaatacggcgaccacaccaacatcccgctgaccagctggaacgccaacttcgaacgtcgcaccatcgttcgtggcgagctgggtatgatggtgggcaccctggaagagggtcgtgcctcggccatccggctgaacagcgccgaaaccaaacgccaacaggcggccatcggtctggaaatcttccgcaacgccatcggtttctacggctggcagagcggcctgggcaaccgcacctatggtttcctgaacgatcccaacctgccggcattccagaccccgccgagccagggctggtccactgccgactgggcaggcatcatcggcgacatccgcgaggccgttcgccagctgcgtattcagagccaagatcagatcgatccgaaggcggaaaagatcaccctggccctggccaccagcaaggtggactacctgtcggtaaccacgccttacggcatttcggtttcggactggatcgaacagacctatccgaaaatgcggatcgtgtcggctccggaattgtccggcgtccagatgaaaaaccaagagccggaagatgctctggtgctcttcgtcgaagacgtgaacgcggccgtcgatggcagcaccgatggcggcagcgtgttcagccagctggtacagagcaagttcatcaccctgggcgtcgaaaagcgggcgaagtcgtatgtggaagacttctccaacggcaccgccggtgcgctgtgtaagcgtccgtgggccgtggtgcgctacctcggcatctaaccgatgcctattcaccaaaggccgggtttccggcctttgttcactctgactctgactcggttgtaggggccggttagggcataattactaggactacgccaatgactgtttacatcgtttccgccatgactcaatccgtgtcttacaatgcgtatgacacctctgatccgtccaatcctcgccttcagcgaaagattctgattcgtggccgcgccggcatcgcatccgaaacttccggcttcggcgacatgatttccgacgcggccgggcgtccgatctggaccccacagggcgattgtactgccgtgagcgattcggatttcgagctgcttcaggccaataagattttcatgcgtcacatggagaagggttatctgcgagtcgtgaagaccgacatcaccagtgaccacaagcggatttccaaagagactcgcaccatggagcgcgatggattccagcctctggatgctactcgcctgcagcagaaaatcaaggtgaccacggccagcgcttcccaggaacaagagttccggatttaaccgagggtttcggtatggtgattttcgacgaacataagtttcgcacgctgtttccggagtttgctgattcagccgcttatccggacgtgcgcctgcagatgtacttcgacattgcgtgcgaattcatttctgatcgcgattcgccataccggattctcaatggtaaagccctggaagcctgtctgtatcttctgaccgcccacctcctgtcgctgtccacgatgcaagttcagggcgcggctggaggtggcgtcactgccggtgggacccagggcggtttcatcaccagcgctactgtcggcgaggtcagcgtggccaagctcgcgcccccggccaagaatggttggcagtggtggctttccgggacgccttatggtcaagagttgtgggcgctcctcagcgtcaaagcggtgggcggattctacatcggcggtcttccagagcgccgaggcttccggaaggttggagggacgttctggtgatccctggtgcgaatcttctgcgaatggccttcggggtcatcggtactcaaattgtgaaatatcgcaagtttgagcagcgagtgaagaatgatcaagctcagtacgtttccatgttcgaggagcctttcgacctggcagcgtctgttcagcgagtccgacgcgatcagtatgtccagtttaatctggagttccaacggaattacgttatgatcttcgccaactttgagatggttgacttggatcgcgatgtggccggtgaccagttcctctggaccggaagagtctttcagctggagtctcaaggctcctggttttatcaggacggctggggagtttgcctggccgtggatatcggtgcggccaagctcactgatgacgggaaaccgactttctaggtgatgtatgtttgacggcgaactgatagcgaaactggttgtcgagttgaatgcggcgatgacatctgctcaagaggctttgcagttcccggattttgaagtcgtccagaaagctcagccgacccaacagggaacgtcaaccaggccgaccatctttttccagaagctgtttgacattcctcgcggctggcctgccaccgattggcacctggacaacacggcccgcaaatatgtagaaataactcgacagcatgtagagacgactttccagatcagttcccttcattggcagaatcctgaaatcactcacgtggttacggcttctgatatcgccaactatgtgagagcttatttccaagctcgatccacaattgagcgcgtaaaggaactggacttcctcattcttcgcgtgtctcaaatttccaacgaggcattcgagaacgacaatcaccagttcgaattccacccaagttttgacatggttgtaacttacaaccaatatattcgcctgtacgaaaacgcagcatattcggccgatggggtattgataggcatatgagtctgaggcgcgattcagagctaatcgccgcgcacctccagatgttaagagccatgcgcggcaggtccgtttcagccggatggtattccacggctcgatatcctgacaaggcaggcggatcggtcggaatacaagtcgcgagaatcgcacgtctcaatgagtacggcggaactatcgaccatccgggcgggaccaggtatattagggacgccattgttcggggccggtttgttggcgttcggttcgtcagaaacgactttccgggagaaaccgaggtaactaagcctcacagaattaccatcccggctagaccgtttatgcgatatgcttggaacttgttttccgcagatcgcgccgcaatccagaaccggatagccatgaggctggccagaggacagatcactccagatcaagctcttgcccagatcggcctggcattggaaggatacatagccagaagcatcaggaccgggccatgggtggctaactcagcatctacggtcaggagaaagggattcaacagaccgctggtcgatacggcgcacatgcttcaatcgattagcagcagagtaacataaccaggagatcatccagtgatcagtcagagccgttatatccggatcatttcgggcgtaggcgcaggcgctccggtcgcaggccgaaagctgattctgcgcgtcatgactaccaacaacgtcatcccgcccggaatcgtcatcgagttcgacaacgccaacgcagtcctgtcatacttcggcgcgcagtcggaagagtatcagcgggctgcggcttatttcaaattcatcagtaaaagcgtgaattcgccgtccagcatcagcttcgctcgctgggtaaacaccgccatcgcgccgatggttgttggtgacaatctgccgaagaccatcgccgatttcgccggcttctcagcaggggttctgaccatcatggtcggcgcggccgaacagaacatcaccgccatcgatacgtccgccgcgacttctatggacaacgtggcgtcgatcatccagaccgaaatccgcaagaacgccgacccgcagctggcccaggctaccgttacctggaatcagaacaccaaccagttcaccttggtcggcgccaccatcggcaccggcgttctggccgtggcgaaatctgccgacccccaggacatgtccactgccctcggctggtccacctccaacgtcgtcaacgtcgccggccaggctgccgatcttcccgacgcggccgttgccaagagcaccaatgtcagcaacaacttcggttcgttcctgttcgccggtgcgccgctcgacaatgaccagatcaaggccgtgtcggcctggaacgcggctcagaacaaccagttcatctacacggtcgctacttccctggcgaacctcggcgctcttttcaccttggtgaatggcaacgccgggaccgccctgaacgtgctgtcggcgactgctgccaacgacttcgtggagcagtgccccagcgagattctggccgccaccaactacgatgagccgggcgcttcgcaaaactacatgtactaccaattccctggccgcaacatcaccgtttccgacgataccgttgcgaacaccgtcgacaagagccggggcaactacatcggcgtcacccaggccaatggccagcaactcgcgttctaccagcgcggcattctgtgcggcggtccgaccgatgcggtggacatgaacgtctatgccaacgaaatctggctgaagtcggctatcgctcaagcgctcctggacttgttcctgaacgtcaatgcggttccggcgagcagcactggcgaggcgatgaccctggcggtgctgcagccggttctggacaaggcgaccgccaacggcacgttcacctacggcaaggaaatcagcgccgtccagcagcagtacatcacccaagtcaccggtgatcgccgcgcctggcgtcaagtccaaaccctgggttactggatcaacatcaccttctccagctataccaacagcaacactggcttgaccgagtggaaggccaactacacgctgatctattcgaagggcgatgccatccgcttcgtcgaagggtcggatgtgatgatctaatggtttgcggcggactcgatccgccgcaaccttccataaatggagtgaggaataagcaatgatcaacatttctgcgttcggctcgatctgccagttcacggcaagcagaactttcccgaacggattcaccgtcaccgagttcgccgacgatgccgatcccatcgacagcccgccgttcaccgctgccgataccggcgtcggtctcaacggtgacatggtagtttggaaccgggcgaacatcctggaagtagtcgtcaacgtcattccgaataccgagggcgagcgcaacctggcagtcctgctggatgccaaccgcaccggaaaggacaagtcgggcgctcgtgatgtcgtcggtctggtcgtggcgatgccggacggcagcaaaatcacctgcaccaacggcacccccatcgacggcgttctgatcaacgcggtggcaagcgtcggccgtctgaagaccaagccgtatcggttccgatttgaaaaagtgatcaaagccggtactagctgatgaagaaaattccgctgacagcagtccccaatcaagcgatctcatttaacgccggtagcagctattggaagattcgcctgtaccagaacatggacatgatgaatgccgatatcagccgcgacggcgtgatcgtttgccatggggtccgctgcttcggcgggattcctcttctccagtacagccatcagtaccgacctgactatggcaatttcgtcttcgaccgcgacgccgattggacgttgttcggcgacggaattaacctgttctatctggacggcgccgaattcgcagagtatcaggcgctcgccacgaggaaagaatgagcacatcaacgatcagaaccgggacgaacaatgatatccttttggacgacaatggaaacatggtcatcctcagggatgtcgaagcgtgcgcccaggacgttcgggcggcgatgctcatgcgcaccggcgaaaatattttcgatgtgaactccggcgtgggatatttcgaatacatcttctcgccgcagaaaagctatgatgacgctcgcaaatccatcgcggatgcaattttgtcctcgccggatgtgaccggcatcgagcagctggacatcgacatcaccggggaagtcttcggcgtcgatgctaaagtcatcaccatccacgggcctgttaccacaggagtttgaaatgagcacaatcagcatccaatacgccaacggcacccaactgttcctggacggcaaaaatccgccgcccctggacccgctgccctcgtttaacccgtctgtcgaagatctggaaggcctggaccgcgaaaagaacaccgacaagggcgactcctcgccggccggtcttcccgttcccccggtaaacgtcgattccaatgtcgacaacggcggaaccatcccggctccggtatcgaccgacgctcctgcggccgaatcggccccggaaggcgcccaggaagctcctgcagcgggccaaggcgacgagaaaggcgccgaggaagccccgactaccgccccagtagaaaaggccgaggaaacggcctcgccggccgctgaagaggcagccccggctcccgccaaggccacctctcgcaaaaccaccagcaagtaaggactcgacatgatcaacgtcagcggcttcggcacaggaattgtaatagtttccgcctcatcgttcccgatggggttttccttgtcgaagttcgctgatgatgagagtccgatatcctccaaagagctggagccgttcggatatgagatgctttatgacggtggcctattcgcctttgacaaggctgctcctctggaagtatctgtatccgtcatcgcagggagcgaggatgatattaaccttcgcatccttctcaattccaaaaagggatcattcagatttcttccgggaatcatcccggacatgacgactctcgtggccactcttcctgatggcggccgcaccgttctgtccaatgggactatcatcaagggtccggccatcgacaccatacagaacaccggacgacgcaaaggcaacacgtacacttttgttttcggtagctatcttggcgcccagactgcgcgtcaagccatttctaacgttatccaatcggtactggaggtggtctgatgttagggattttcaccagcctcctaagttcgcgatctttttcgattgtggaccaaaacacaaaccagctagttgctgcggatttgaggataagccgggtcaacacccggttttcttctgtagggcaacgccacatgctggaagatggcacgaccaagatggattccagaacgatccaccctatggaaatcatcgtcgaagtattttgcccttcaattgatgtcgtcgatcagatcaatcaattgctcctggatcgcgacacactgtacaaagtcatcactcgcggcatggcattcgaacggatgatgtgtaccagcgaagcgctcaatcagactccggatatgatatcggcgactcctgcgcggctgacattctcccaagttctcgtccagaatcccaagcctataatgttcagaaatgcaggggactcttctatgatcgaccgagggctggccctagctgaagacgtggttggctcggccggcgatctgttcgactacgcagtgaacggcgtccagaacgccgcagacttgttctgaggtgccaattgaactctttcctcaagtctattctcaacacgcctactctcaccatacgcgatgatgtcaccaaacttcctgtctggaagagtcttcaagtcaagaaagtggaaatttactcgccggcttccgtagtgtcgaaacctctggcgacgaaagaccagacggaagctcaagtgtacaccgaagctctggacattgatgtgaagaatggaaagatcatccaaccggtgcgactccgcatcaatgctatctgtccggacctgtccaccgttgaaagtatcatgaacgccttcaatgataacacctcgactttcgctatcacttctaagtcgatattggccgataaaatggccatcatggcgctcgatgtagatcagtctccagacatgttgaacgcggctgagatcaatatggaattcgagcaggttgagcctccagtattgaataaattcgatcctgcgttccctcaagatagtccgacttatggggtacagattcaatctctttctgatgctaatttgctggatttgggcgccatcggcgattcgatatcttcggccgcaaaatcgctatataatcgcgcgaccagctacttctgaggatgtatcatgcttgaaatcaatcttcccgatggccgtcaaactcgcgtacaaatcgaggcgtggtcggcattggatggctgggaactccagcgccgtttcgtcgaattcgctgtcagccaagattccgacttccgccgctctttcaccatggaaatcctgggctatgcgaaagtgctgcttggcgacgatgacaccggcattccgctgaccaccgcggcagtcatcaacaaccacctcggccactggaagaacgtggaactggttttcaactctgttctcaagcgcaatggcatcgacccggccacgcacgccgaccggccggactattgggaacaagtcggatcgcagatggccatcgcatttctggccgaggcgtccaagctcattggtccagcaatgaagatcgccgaaggactcgccaacaagccggagtgattcatgtctagtgatttggatgaattcatacttcggtatgaggccgatactgccagagccgagcgcaatctggagcgcctccagaaccagatcaggcgcgtgaacagcgcatcgacgagtggccttcaggatttgcgccacttcgcagacggcgcggccactgaactcggccgagtcgttccgcagatcgattctgtgacgagcgcgattcgcgggatgaacgcgcaactggcgataggcgccactggcgtggccctggtcgcggccggcgtcaaggcgttcatgaacaccagggaccagtacaatcagcagcgcatccaggcgatggacatcggcatcgccccggcacgcttggaagagtaccagagaaaattcgttcgccagtccggtggaaccatcagccgcgagcagggcgcggagatgaccaaaaatctggcagacactttccggcgtgcttatcgcgatatcgggcgagtcggcccggaagcgcgaattctgcgtatggccggcgttgatgtcgggagcttccaaaagggcatgcggccgctcaacgacatcattactgatctggccacgaaaatggccaagctgaagccggacgaaatttctgcctacgctgatgcccttggcgtctcgcgagactacctgagcaccctggctaagatcggcccggccatgggaaaagtcaccgagatgacgactgcggaactccagtccagggtccagggcgagtccaacattcagaaattcaacgatgctctggcgaatctcaaccagacgttcaccaccctggaaaaccgagtcggcgaaaagctcgcgcctgcgttcaccaagctgatcgaaatcatcgacaagatagtccaggctattcccaatgaagtggaaagcttcgcgaaggacaccaaatcccgttgggaagatggagtgctcgggaaggcgaccgttggcagtgatatcttatccctcctcagccccggcgccctgctcggtcgcctggcagcgtgggggactcgtcgcggcatggaagaatcagggctcatcgacaaggacaaggttcccggcgctcaaaccagcgaagacctggccaagaaacaagaagaccaggacaaggctactaagtccatgaaagagctagagaagctggctgaccagaccacgaagtctaccaatgattttgcggtggcgatcaacatgttcagtggcgcggtatcgtcgttcgcgaatgccgttgacgagcgccaagcttgggcagcctgggcgggggaaattggtcgggcggtcggtatgggaagcaccgcgccgacttcgcgggcaaccggcgtctatccgcacgcgatctatgatcagtcgaagagtggcgcggccggacaagtcttcggcgagccaatcggcgcccagtctcttcgcaatcgcatgttctcgccgcagcgcaaggccgaaccggtcaccgttccatcgtacatcaacgacatcatcaaagatgcgtcgaagatgtacaacattcctgagctggacatcaagaaactcatatacaccgaaagccgattcaacgccagggctaccagcgaagccggagcgaaaggcctcatgcagctgatgccggaaatcgccaaggcgtatggtataactgacgtatatgaccctcgccagaacatcctcggcggaacgcgtctattgcgggaaaacctggatcgagccaatggcgacatgcggctggccttgacctactatcacggcggcctcgatccgaagaactggggaccaaggactcgcgcatatccgggtttggtgatgagcgctccaatcgagctgatggaagaggcgcagcgcaagcagaaggctgcggccatgaccgccgccaacgagacgttcgctccggaaggcggcgacatgtacattcgcccctatgatggcggacgattggaaactccagaccagggcaagaaggaagatgagcgccgcgaagcccgtcgatatgacgacagggttgtgcgaccggaaattcgcatcatcgaccgcatgccagaccgcagcgacggcgaaatcctcaagatgtctagacgtcaagaggccgaccgggcagattctggattccggaagttcccgaatcaagttcgcggcgagaccaagcagaacatccaggctcaactcactgcaggagccatcgcgcaagtgatcggcgttaaccccaaccagatcatgcgccgcgaaatcagccgttctgacttgctgttcggatacaaccaagccatcctgggcaagcaacaggagatcaaggccgccgcgaccgaagccaacaacgtattcctgtctccagccaagcttgccgaagccacggccaaggtgaacgccgcatcgcgagaaatggatattctcaggacgtacggcgagcaacttctgaagagcgctccagagcgcggccaggagctgaccatcggtcggatcgacatgttggtcaacgtcaccggcgcgaattctccggaagaggctcgtgagatattcagcaagcagactgcagaccagctgactacggcaatccaggacgctcaaaacgattccgcaactaagatactctactgatgaaaaagagaattctgcgagtaacattcaacatgccttatggacccgaagtcatccgcgaagatctggatgttcgggtccggattatgaaggctgcgttgcggattcagaaccgggcgacgatggaaattttcggcctcaccactcagctgcgcgagtctcttctgtcgcagttcaccgcgtggaagcaccggcaacgtcaagtgggcagggaagatgaattgatgatcaaggtgtcggtggaagccggctactctgaccaggggcgcgagcaagtttccagagtctttgtcggcgaagttgccattgtcgatatcatttctccgccacctgacattggaatccgcatccagtgctataccaggcaaatcgacaggacgaagaccattcggaatatgccgcccgccaacacgacgtttgtcaagttcgtcgagtggggcgcgaacgaaatgggattgaacttcatctgcgataccagttacaacgatcaagttctgaagaatccgggccggtctatcactgtcgcgtcggcaatcctggcgtcgattcaggatatgtacatgccggacgtggccgcgttcgtcgatgatgacatattgatcgtgaaggaccgcgataaagtcattcgtccggatgaggtgaccaacgtcaactcgtttgttggaattccatcttggtctgaatggggcgtggaattccagtgtctgtttgagccatcgattcgtgtggctggaggcgtagcggtcgaatctctcatgaatccaagtgttaatggtaactatgtaataactgctctggaatacgatttggccagtcgggatcggccgttctatatcaaagtcatggggagtccagcagcataatggccagggaaatcaaatcattcaacatgttcggagttcactatacttcgcggcaattctctgctgtcgatgggctcagcatgatgtcggaaattcagaacgtgccgccagaagaattgctcaagggtactgatgtattggcgcatccggaagaccatccggaaggcatctggcttccattgactgctgcgaacatcaatctttatgtcgttgatcgagcgaaagtaatagctcccgtacaagttcttgcacttctgtccgaagtggtaatcgactggaactttggttttctcaaagactggaccggagtcaagattccatccagatttgtcgaagatatcaaaagcgtgaagacggcacattcaccttctgtagttgcgagcttggtcgcgaacggctcagcctctatgcgcgagttggaagagtattattcgactcaagatgcgtttaagatgatagatatcatgacggcgaagagcgtgaacgaggccttggcgtccgaagcatcgcacaacagaatcaaaaaggataattcctaaccgggcctgggaaggctatactagacctgccaaatcagaggctttcccatgtccaatatttctctaacatcagcaaaagctcccgacaggacgcgactgatcgccgctcttgacgctcggtcgcggcgggatgctctagatttcgaagtaatgataccggctcaggttgttcaatatgacagggccgagaatatcgcaacgattcaacctctcatcacctgggttgacacggaacacaacgccgtccaaaggcatcagctggttgatattcctgtaatttccatgggggctggcggattccacataagtttcccgattcagcaaggtgacataggctggatttatgcggccgaccgcgacacatctcagttcctggagtcgttgtcaatgtcgaagccgaacaccggccgcatccataagttcgagcatggcctgttcatcccggacgtattccgtcgatacaccatcaattccgaagattcggccgctatggtcatacaatcgacttccggagcgaccagaatttcgattcgcggcgataacatcaagataactgcgccgtcgaacgttactgtggatactccgcaggcgaacttcaccggcaatgtgactatcgctaacaccctggtcgtaaacggcatcaacgtgaacaaccacggccacctcgaaaacaacccgcctgatgcccggacgaaaggcggcatgattgcttaaggagattttcatggcaagttttgatttttctgatttaacagcgggggggggttgtaatggctaactacaactacatcgtcgatactggtgtgatagtcgcagataccgccgacgttctgagcgacgttgaggccgagttccgcgccgccctcggtgccaatatcaacttggccgcgagcactccgcagggatcgcttgtcgcggccgaggccatcgcccgttccagtgtcatgcggaatgaagcgcgaattgccaataccataaacccgaacgtttcattcggaacgttcctggacgcgatctgtgccttgatggggatcgagcgcggttctgatctgtcaaccttcggctatggagttcaagtcaccggccgcagccaaacccgcatttccaccgggtctagggtccagactccggccggcgcgatcttcacagtgatgagcgatgtcacgatccctgctggtggtgccgcgaccatcgatatcaaatcgcaggagtatggcaacattcctctgccggtcgggaatctcatcatcatcgacggaacaattggatggtccggagcaaaagtcatcgcctccactcgcgtcgatccgggcagccgccaaatgagcgatgcagagttgaagaatgcccgcgttaatcgattggccatccaaggccgcaactcgactatggccatcaaggcgtatgtgagcgccgttccaaacgtcacgtcggtgaacgtaatcgagaacaacaccggcgccgttcaagtggtgaatggagtctcgtttacccttccgtatgctgtttgggtctgcgtcgccggaaacccggataaacaagcagtcgccgatgcgttgtgggccgctcataacggcggaactccatgggactatggtgcgacgaacaacggcgtcccggtggacggtccgaatggcgttcctgtgcgcgatccggcgtccggtcgaaagtatgtcgtgaagtggaccgctccaattatgtacgatggatatgttaacgtaacagtccagcaaggttcctcctctgtagctccggaagccattcagaacgcagtggtcaattacgcccaggggaaagtggaaggggaagaggggctggtggttggcgcgagcctgtcggcattcgaagtcgccggcgccatcgctcgcgaaattcccggcatctacatcaaactctgccaggtcgcgtgcgtcgcggctggctcgccggctccggctccgggcgatttcacttcggaatacgtcatgagcgcattcggccaggctaccatttccgttggtaacgttcgggtgactttcgtatgactctgcctgcgtacaattcggacatccaacaagctctgaaatggctccataaccaggcgcctggaatcaccggcctgatccagagaaaggcgcaatggtatgacagattcagccgccaattctgggccaactgggagcgcgacgttttcaacttgaagaccgccaacccgttcggccttatggtttggtgcatcatcctcggcacgccttcgaaagggttcggcctttatccaaaaaacagttcttgggcattcggtcggctacgccagaacttcatctatagcggtacacaagtcccgccaccggcagacgcatcgcctggcggcaacttctacggtggcggcaatgccgaaattctcaacttggacgaaatcaggaaagtgcttcagctaagatatgtagcgctgatttcgaacggctcgattgcatatatcaatcgcatgcttcggtatatcttcaacgatgatgagccgtgggacgaggcggccgggttgtacttctacctcatggactcgaccggcgagaatggtcctgtggaggatttggccgtatatcggaaagattgggaagggatggttttattgtctagctcgcccaggacgaaccatgtgctgatatcgactcctgccagcgacgccgattggccaggagtcgatccggccgcgagcggaattccggtaacggtcgaaacggcgtccgctacggccccggacggctccgctacggtgtgcaagcttactaagccggccgggagtaccgcttacgtctccgcgccgatagatgggacgctggggtccggtagcactgtcacgttctcgttcttcgcgaaagccggctccacccgtttcattgcaattcagtcggctgccgatttccccagtcgagccgatgccgttttcgacctggattccgggaacgtaatcagcgatcagatgctggacagcagcgtggtaagcgcccgaatgattcgtctggaaaatggctggtggcgctgcgttctcacgaccaagaccgtcagctcttcgttccgcgcggcttacatcgctccggcagaaaccaacttcagctggattgattcgaattccagcgcggcgattgatgtgcttatctggggcgctcagatcgaactgggtgatgctccaaccggatacttggagactaccggaacgcccgtaaccatcaccgattacgttttgcagagcgcccagaccggaacggtcaagttcacacagcctcttccgaccggagtagaggcgtattggactggagactggaaaggtgggtctgcgaccgagccggccagattcgcagtaggggatgggactcaagatacattcaatctgtccagccctgcatacatcggcctacccactagtggggcgttcaagctagaatacagagttggtccggcgcttaatttgtcgccgcaattgatcaacctcatgaatgaccgggcggtcggtatcatgccgacttgcgccggttgcgatgtaaaagtcattcaggagtaatgacgtgatcacacccgaactgatacccagtccgtttgctgcgcagggcgacaaagacccgatcccgcaaacctcttccactggctttgccaaccttcgcgacggctacacgccggactacgaaatcagtctggcgtcgaacaacccgcaggccaaagcggtcgagcggaaaattcaaaaccaactcttcttcatcgcgacccagaacgcacaggcgtggcagcggcaaatggcgccgccgtggtttcagggcatgcctggcggctacgaacagaatgcagaagtcgtgcgagtcggcaatgacggcataatgcggcgttatcgttccatggtgaatgccaacgcgagcgaccctctcagcagcacgacttgggaagaacaacccgcatggtcggtgatgcgctccaacataccgatgccagctggaggcccaggcctatcttctggcggagaagtcatcacgaccggccgcaacttcaatgacctgttgaatgggacgtgggagttcttctctgattcagtggtcgtcgcttctcagaacgcccccgtatatcccgcttcggctggtgcagcagctggaatgttggaggcgaaatcctggatatccgggtccaatacattctgcgttcaacgctacactgatcgcgtcgggaacgtcgctgtgcgcgggcttaatgccggggcctggaccaactggatgtacgcagtaaatgtcatggccctccaacaaggtcgggtcacctatggagtcgcggccggatcggcgaacgcttacacgttgacgctagttccgcagctccaaggcggcctggtggatggcatgattcttcgggtcaagttcaacaccatgaacaccggcgcctccaccatcaacgtctccggactcggcgccaaagccatcgtcggcgcggccaacttccctctcaccggcggcgaacttggccaaggactcatcgctgagcttgtattcgacgcagcaggcgaccgctggagaatcctcgcaggcgcgccacgcatccaagttggcaacgccgatcaagattaccaggcccccagctggaaacaggtgaaggattacgtcgcgtcccaaaagctgactgaagtggactgggctgacgtcgtcaacaagccgaacgtcgctatccaagacaccacgccgtggttcgccaatctggagctgtccgatgctcggcctttcatcgatttccacttcaacagcaatcgcgccaaagacttcgactatcggctgatatccgaagcggacggatcgctggctttctattcgcggcagggatctgctgggcctacccaggacatcctgttcaaccgaaattccgtgactttcttccagccgcgactcgatgtggcgaaaaacctcgcgtacatcgcgaactctggccccctttggcagaacaccaccgccgatcagcccggttggaaattcacctttgcacaaggcgtggacgcgaacaacaacgcggtgatcgcagtcaataccaccaatccggacggttcctatcgttcacaggtcatgcgatgggactgggcgtccacgaacgtcatattcaacaaccgtccgctcttcgccggtcaatacaccccttgggattctgggaacttcgatccttccaccaagttgacggtgaatgccgtgaaccaaatcgccggcccaaccgggattcggaataccaacggcaacaccggcaacatgaacacctggggttccggctccacgacggcatcctatggcaatgctgccattcaaatcttcggaaaagggggcggtgagcctgccgcgatctatttcgacaactcccagaccggatggtatctgggcatggacaaggatggacagctcaagcgggccggctggtcgctcggcaataactcctatgtgatcaccgacgaatccaacatccgaacccatatcaacacaatggctgcgcgcccgatttgggggaatgtcgagttctggggtccgtggaacttcgatccgaatcttaaactcactttgaacgctttcaatgatagctcatacaccaggatgaccaacagcggcgcgaaagacgttggtatcgcgtccatgacgagttatgctgatgcggccatgtcattcttcaactatgaagcctcgaatccgaccgggccgcgcgcggccgttatttcgttcgtgagaaatggatcgcgtggagtgctattcggcttggattctgacaacaagctgaagtggggcggatattccctaggggccgtcgcgttcgagattgccgactccaacaacctcatgagcctgtggtcatcccacgctgccgcgccgaactggaacgggcagaccatctggaggtcgggaaacttcaacccagacaccaaggcgactttggcagctcgcaatacgacgtcatcccctacaatattcagttatggggcgtccggaatcgcatcaaccggacaggtcggtgcgttggttgtggaaaacaacagcgtcaccaataccgcagccgccatcacgttccattcgccgcaaaaatatcaggtcaacttcggcctggatgcggacaacgtggtaaagatcggtggcggcacaatgggcggcgtagcatatcccatcatccacgccgggaactacaataactacatcaaccaggcgctggttcaggtgggtcttggcggagtcggttcctatgcgatccttgcagtatttgacacctccgcgccggcagcgtccattgcccccggaacgatcatggacagttccaagctgttctattcgtcctgcgattcgacctatcgcagcagcgccagtccgacgggcacctggcgctgcatggggtatgtgtataaccgagactccaccaacggcgactcggcatccctattccagcgggtaacgtaacatgaaatggacgcggatcagaaaccctcgttggctggatgaaacaaacatccacgccatggtgactttcgatgggatcggggaagttcctttcaccgccaatccgcacgacgtggaggcccacggaagggccatccacgctgcgatcctatccggggcgcacggatctatcgccccggtcgatgcgaagcgggagcaggccttgcaggacgctatacgggccagggaaaagcgggctatccttcgtgatacccgctggcccatagatcgtcacgacgagcagaggcggctgggtatcgaaaccacggacggacctgggttgatagcagcccttgttcactggaggcagcagattcgcgattggaatagcggggatcggccgcgacttcccatggctctgaaaacgatgttcaaaaatcaggagtattgatgaaaatcacgaaggatgttctgatcaccgggaccgggtgcaccacggatcgggcgatcaagtggctggatgatgtacaggcggccatggacaagttccacatcgagtcaccgcgagccatcgcggcctacctcgccaacatcggcgtcgagtccggcggactggtaagtctggtggagaatctcaactacagcgcccaagggttggccaacacctggccgcgccggtacgcagtagacccgcgagtccgcccgtatgtcccgaatgctctggcgaaccgcctggcccgtaacccggttgccatcgccaacaacgtgtacgcggatcgtatgggcaatggctgtgagcaggatggtgacggttggaagtatcgcgggcgcggcctgatccagctgaccgggaagtcgaactattcactgttcgccgaagactccggcatggacgttctggagaaaccggagcttctggaaactccggccggcgcgtcgatgtcttcggcctggttcttctggcgcaatcgctgtatccccatggcggagtccaacaacttctccctggtcgtgaaaaccatcaacggcgccgcgcctaacgatgcgaaccacggccagctccggatcaaccgctatatgaagaccatcgccgcgatcaatcaaggctcctgacattccacccaaagaaaaggccgcttattcagcggcctttttgctttctggctttgcctcttcaaccatcttgatctcgaccggcgcggcggactcctcctgagttaccgaatccacatagttccctagtgaactcagaacgccgattaacagcgctcttactaccttgtccttgactgtctcgcctatgatcttggtcagaacggatatcaactcttcccggagtcttgggctgattcttggccgaaagcgcttgcgatgctctttgcgtttcatgtttagtcctctgtctgcggtcttctcctcaccccgataatggcttggggatgcgctgtgttagtcggaagggtcgggcgctattataacccgtcgaaaatgctcgcgcttaactgtttaacgatacgcaccgcgatactaaatcgccttctttctggccaaggaactctggcggcctggtccggtctaaggcctaatttgtcgacattaaaacgagaaaacccggatcgcctgtaggacaaggcgtccgggtttatttcgatctagtgtacgctagaatcagtggcttccgccccaaccgtccagccagcaatcgaagacggcgtgtctaggcttgtccttggcgccatgggagaagtgcttgaaccggatgacctggcccttgagatactccctgtcattccagcggcgctgtttctcgtcgtgggtcaggctggaggccgacacgttgaaggtgactccaggccacagacgttcgttgcggcagacgaacgcaccgaccattccggacggcgacaggttttctgcgtggctggagcgggccgtgtggccaagttcattgatgaaagcttcattgttgttgtgcatcaactcttccacgtcgatgatctcagcttcatcgtagtcgtatcgcttgactttcacacagtgcccttccttggcagtcgagcgaccgaacttgtacagtccatcagcgcgcttgcccatggacccttcgaatcccagcatcgtgtggcggcgctcgacttcgctgaactgttcgatggaagtcaccagttcctgctctaccaggtgaatcctctcatagccgaggcagttacgcaggaagttcacgcgctcggccgccctggctaggcgatcttcggtcggtgcgcgaggatcggtgaaatcatcgaacacatggaaagaccagtccggctcaccgctgtggcggcgaagatcgccggacgacttctggaaaactttcgggtcgctgatgtcgccgcagaccagctcgccgtccaggccgttgaacagtttatcgctgaggtattcgtagatcgattgattgttctgccgcttgagttgacgagtcagcgcctcgccttcgaatacgaagcagcgaaatccatcgatcttcggtgagaaatacatcggcagttggccttcaagcagcttcgggtcaaaattcgatgcgagcatgggtttcatacagttctccagaaaagaagcccggcgaaccgggctaaatggcggtaagccggctcagatggtttcgttggcgtggttcagttcggccacgatcgacgcatagcgctcgtccgactccttgatgaacacgccgtcgtacatgacgcctttgcgatccttgatggtgtcgtaggccgcagcgtagcaggcgagcatggtagtgtcgtgctcttccgtcacatcgaacagagtcatgacggccaagaccaggctcttgatggctaatccatgatttccgcgtgccagcgcgccggccagatgtccgaggtgctgcaaatcgtcgccgtaggtgggatgaacttcgacagtctcgctgaagaccgatagatgatcgaacagattttcaccgagttgcgcggccatgaccgtggcaaccaccattacgtcgccgatgccgtctttcacctcgactggtttgttataaacccaggcttcgcaaacttctgcgaactcttcgaccaacttcaggaattgatccttggccgaagagcctttgatcaggttccggtcggaaccccatttaacaaccaggtcgtgaagttcgcgactcatgatttgttcgatattcattctttcgattccttttggatttgggatttgactgcgttgattatggacgccgtgctctggcgcgatccatccttggtggtgccgaagtagaaggccatgaccgacttcagctcggcgaaccaatagccgatgatggtgccgatggcgacagaggatgtcgggtccatcagagcctcgcggccgaaggtgaagattgcgatgatgatgagaatggagcccgtcagaagagcgaatgtaatcgccgggcgaacgaaatcgttctgctgcgcggcaagcctcctcgccgaatccctgtctgccgcctctgcggcgaactggctaagctcggcctggagctgattctgctcagactgaaggcgattttgttcggcttgaatcgcaagctcctggagacgaacgcgctcggcgctctggagttcggcgaggcgcgctagagcttccggattcgcgtctagagcgctagcgaccgaggctgggtcggccttcgaccccagcgccgtcgcgacgatagcgccaacggcggcgcctgcaggcccacccaggagcgaccccagagccggggcagccgcgccgatcttactacctatgtctttccagtccatttcgactcctcaaaagaaaggcgccattacagcgcctttctccggccggtgatttagaactcttcggcttcggtcgcatcgccgacgccaccggcgtcactgcgaggctgttcctgcttgctgtagtccaccttcacctcgccgcctacgaacgacttgtacaggtcggccgcagccttgaagtgatccgggttcttcaccaggccttccagctcgaactggacgccggaccagctgcccttgtcgttcgacatgcctacggtggtcatacggaccaggttggcgaaagtcggcggggtgcgcaggccctgcggggtctgaacctttttctgggacagcgcggtcatgagcttcttcgaggccttgatctgcgaagacgacagggagatcagagcctggccgaaatcgccggtgtccggatcgatgacgatgacgtaatgaccacgggtgtcggcgaagtagtcagacttcttgtcgctgaccgaaccgtcttcgttcggcgcgtacaggcgtccttcgacttccttcaccttggtcgggtctttcatcatttccttgaagtcttcgacgctgatggcacccttgaaaccgccctcggcctcgcgaccggcccagcggatgaactcgcggcggtacgcggccggaatgatcagcaggccggtcttgccgtcgtaaaccttgccggtgacggtgttcaggaacatgccggccttcgcgccttcgatgtacttcgggtcatcttcatcgacctggggagacatcttctgcaaaacctggatgaaggggatggcataggactcggcatcggcgccttcgaagcctgcgccgtcatacgatcccaaatccatgaagtcgggaacttcggtagtcgcgacggcgccgccaccggtggcaattgctacggccttggtttcttcggttgcttcggaagtttcggttttcttaccagccatgttaggctccttgtttgtcgaatttcagttatcgctaactgtgggtttataataacggaagttgcaactaagtaaagcaaattacatatcaagatttgctctttttcaccttcggtttcgtgatcttggcctctttgtattcgtgtacgccgatgaaatctggcagctcttcgcccttctccaggtactcgcgaccgaacgcctggagggtctggtaatggacatcgcggttgatggtggcgtcatagccggcttcgatgatggcctcggccgccttcttcgcatcttccatttcgccgcgaccgaattcggccagaaccttggtcttgatgatgccgtcgttgtcggtgtcttccagccacttccagaacttcgatttgttctcttccttgacggaaatgatggccttcggctctacttttacagtgcgaccgtccgccagagtagtggtcttctgaccaagctcctccaacagctccggaatggtgttacgcttgagggtcttcagctcctcttccttttcggccagcgccttttgaagatcgaggatttcgccgtccagctgcgaagccttgtccaccaagttcagcagtcgatggccgatgtcggtggcttccaccgccatttcatccatgacgccaaaatagtcgatttcgcccggcgcgttctctttcaagtattccgggatttcaagctcttgctctttcatgtccgcctccaacttagtgatgttcccttacttgaaccaagtattgagtagatattatgccgcatcttccttgatacggctactgatttacatattaaatttcgtcgcgagtgctaacgtcagcctcaaacacgccatcaacgacataacttgccaggttgcgtttccactccaagctgacctggattttctcgtcgatggaatccagacagatcaggtcgaagtacagaaccgagttgacggtgccgattcgatgatttcggtcttcggactgcatccgcagctcgttgtcttcgtcggtcgtgtagtagatggccacgtctgcggctgtgagcgtgatcccgatccctgctgcggccgggttgcccaggaacacctggacgcgcttggcctggaaatcgtcgatcaatttttcccgctcggcctctttggtctcgccgtagtaggtgccaaacgaaatcccttgggcctccaaatacgccttgatctggtcgatttcctgaatgcgcatggcccagacgatgatggaacgctccgggtcttcctccagcagaccctccagaagatcagtaaacacggcgaatcgcgggttgtcttcgggcggcaggatcaccggctcaccatagacgttgatatagccggacgccacttgcttgagcttcgagcgcgctgccgcagcatcgaaagatacatccagcatgaaatcttcgttctggagaacgaagtgatagtcttcttccacgcgctgataaacctttcgttgctccggcgacatttcgaagtatatgcgcttgtacaccttgtccggcaggaatggcaatgcttccttcttcgtgacccggaagctgtgcggctcgatcagggatcgcagcttgtccaggttccggaataccgggcgcccataatcgtctttttcgacgagttgcggcggcatggtttgcttcccttccagcttgcgcatgatagcgatcattcgaggatcgtcactgggcaccaagacggaaaattcggccacaaacgcccgataggatttagtccccagaattccattccgcaagaattggaactgcatgaacaaatcggtcggcgcccgcgtcagaggagttccggaaaggatgcgacgggccacggccttctcgcccagctttacgatctttttcgcacgcttggcttgtgggtttttgatcctcgttgactcgtccacaattgcgcaaactttgaatgtatcaaggaatcgctcgacctcatcatagccagcctggtggttgattgcgtcaacgttgatggcgaagacgcgaagaactttttcatctgcgaacgtctcggaatacagacggtccaagcgcgccctggcctttttggaagtcggtcggccgcgccaatccacgctcaaagtcttgatcgcgacgtgggtgggaatctcgcgcagaatccagttggtgtggacgcctttgggggcgacgatgagcagcgcgtccacgcgcccctgtaggaagaggcgaacggcatcggccaaagtcgtccaagtcttcccggtgccctgctccatcaggtatgcgaagttccgtttgttcagggacgctgccagggcattgaattggtgctgcatggcctcggtcttcatgcccttgacgggatatgttttggctttcatttgttctccaaatcggcgaggaactgaacaatgttatccagtccttctgcatagctcgcaacttccaccaagtcgcggctgttaagctcgaacaaatcgaacataggattcagcagcagccaatcggttccgatcttggccaggacgaagccccggccaccccagccgatccgctcccgaagaaaagggatttgcccaggttcgaaacatctggccattgggcaggtggaagcgcgtttcggccactcctccaaagccttgaactcgacccagaactggacacctcgacgattcaggcagatcgaatcggacatgccagaccgccgcgtctccagaaagtcgatcaggattcggccgagcgagcgctgcttaaacgcattcgccgctttcgtttcgcgatcattcatcaccttcgccctctttggaaactttctctgcttgtgctgccaactttgacttctcgcgctcggtcaatatccgcttgacggccttcacgatgaacatgtcgatgccgctgagcctccatcctttgatcaggaaccaagcgccggtcggcgtcccttcagcaatctgctttccgtattgcagatatttttcaggccgaattctgaaacgtatcggctgatcaaccgagtcatcaacgcacatgatgtcgagaaactgcgactggcccttgtacaccgggtttttcccttgatcagccctcttcttctggcgaatcggttcgttctcatcagacagaacttttttcaccatcttgacaatgaccagaccatcatctccatcgcggatatcccgaatgttctgaatggggtttccggaagttactccaaccagctccggattgtcataagcatgaccccagagcgtgtgagcttcgttcaaatctgcgaattgaacttcagaattcgacagactcgcggcgactttctcccaatcctgaagcgtcttcaggtgggtgcctgccagctctttatattgagccttcagctccttaagatcggccttcaactccttcagatcggccttcaacagtttctccagttctttgtcttggctgattttcgccgaaagaatctgggcttccagagctgctacatcagcagccttgtcctcaacatcctgtgccgatatcgggcaattggccagggcgatcctcgcggccttgacttcctcacgaagacgcaggaaccgctcggccttcgccgggccgaagcctttggcgttcatgatgccgccgatcaggcgcccgtccgccaccacccagttgagttcggaatgctccgggtccagggccgtatattctacgccttctttggccaattcgcgaaggatagacacagtttgctggtcgtccttcgccgcccgaaggcacgcggccgcgtattccaggcgatgataccgcttcatgtagcaagtccagtatgtcaccacggcatagcttaccgagtgggagcggttgaatccccaggcgccgaatgtcaccatttcctgccaaactcggtgagcgtcttccggggcgacgcctatggtcttggcgccctcgatgaacaattcccggcgcttgttgaaaaattcttcgccctttcgcgccgacatcgctttccggatcgccgacgtttgttcccagtcgaactgaccaatgtccttaacaattgacatgatctgttcttggtacaggaacacgccatacgtccccgacaaatactgctcgacctgcggaatggtataggtcacaggctcgcggccggccacgcgctcgatatacttggttgccataccagaagacaacggacccggacgggcgagcgccgtgatgtggtcgatgttctcgaacgcggtgatgttgatcgcgtttgctaccgagcgaacggcctgcccttcgaactggaagatgccggacattttgtcttcattgagaatgtccagaaccgccttgtcgttcaaaggcaagtcgtacaactcttgcgcggtcacgcagttcgcgtcctggatgactcccaaagttcgaagtccaagcgcgtcaattttgaggagattcagatattccgaatcgggcttgtcgagctgcgcaacgccttcggaagtcaccgtacagaagtcgatgacttcatcgttgcagaccaggatgcctgccgcgtggacgccagagtgggatgggtgaatttcgaggtcgcccatgcaggcggacgcgatctcatacttttcgcggaagtcgcggccgggctgagttttttcgaaagtgtcctccaatccttttccatatcgttcgtccgccgatgtatattcgatgatcgagtttttgatgttgtcggtgtcgtggaatggaatgccgaagcgttttccgacgtgagcgataaccgacgcggccttgagtgtgttgatgttacccaacttcacaacgttccaagtgccatacttctgctggagatattcgaacactagatagcgatgggtatcggcgaagtcgatatctatatcgggaagatcggaccgggaaatgtcgataaagcgctgaaagaggaggcgatgcgggagcgggtcaacctctgtaatgccaaggagatagcagaccaaagagccggccgaagagccgcgagctggaccgacaagcatgtgcttcttggcaaacgcgaccagatctgccacgaccaggaagtagctgtcgaaatctttcagctgaatctgcttgatctcttcttggaatcgatcctcatactcctgggtccattccttgatgtggccgcgactgaggcggtaggcttgcccctcgcgagccagagcgacgatatcaccatccaagtggatcatcggcgccttcgccagtttcacatccgccaaccgctcgactaccgcacgagtattggctgcggcagtatcgaactcttcgcgagtcatgatgtggcgtaaacggctccacagctcctcttcggtggcgatgtggcgaaggccgaccgattcccgcaccttccaggccgacgcgaaatcagcatggtcgatggatggcatgtcgttgtaagaggtaattaccaccggctttccgaatgccctggccgtctccatagcgccgtgcgcggcgaccatcgacgcgggattgatgtcaatgtagtcgattccggccagatccagatgggcataggcctcgccagcgaatttgatgacgccgtcagcttcctggaattcttgcggagtcaatccttgattctggaccgacttggaagtcaagcggtagaacttcttggtgtccttggcgagcacccaggctttgagcttcaactctttctcgccatcgtcggcgcatttgatcgggatttccatgccgaatccgcgaggcagttctgccttggcagcggcttgttcccaacggacgtggccccatgttccgtcatcgacgatggcgacgaatggggattcgatctctttggcgcgctcgatgatctccgggaatcgaccatatgcggcgccgtaggagtaaccagagcgaacgcggagctgagggaaagacatcatgcggcctccattgcttgatacgcccgatacactcccatgcgcttgcagacttcgtggagcagccgcacgtcgtcgagcgcccggtgtttctgtacatatgggccgcagtagtgctcataaagatgttgcaaccgcatgcggtggccgaacaacggcgccgactcttcacagtacagatatcgagtgatgggaagttgacttcttccaggccgagctttccgcgagccaaatcgcaggtaagcatgaacttatcgaatggcaggttgtgggcaatattcgcgtcggctctggaaaagaagtcgcgaactttctggcgctgatcgaggaaagatgggtgcttgaccaggtcttcgttcttcaacccggtgatcttggtgatgatttcctcgataacgattccaggattgcagatgaactctacttcatccaaaatcttttcgccatcagttatcacgccggcgaattcgatgattctcggctgctttctcagactcaccctttggtggaacgggagccctgtggtctcagtatcccatacagcgaatatcatgtttgttccctcttatgtcgaaaggccggctgctttcgcgaccggcctgaggagtataccgcgacggctgaagatttacgccttctgtccgtctttcggcgtgatgcggccggagcgcatggtggcgtgaacaaacgccgaatagttgatcgagtccaaggccgaatcggcatccttgaacccgctattcgccaggcgagtgagtttgcccaccatgtgcatcacgaacagggcgagtcgatggtcatcggcggttttcgccaccaggccgttcgggaagaggatttccatgatctttccgtacatcagatcattgcgaccataggtgctctggcggtcgcggaagacttctgctgcggcgtacagattgttgagaacatcttccgcgaaatcatctggatgggaatcatcttcgcccggccagacggattccatggcgaacggcgcggcgtcttcggtcgggtcttcggactgagccgtttcagcgagcggagacggggctttcgcaaacgcctcgtcgagggtaggggcggagttcggggcggccgggaacggctcgcctgccatgtcgttgggcgcgctatcggggtcgctatcggccgcgacggcgaagaacggcgcatcgcaaccttccaggttcaggatgtaggagtcgatccccaggctattgtaggcatcgatgatgtcctggcgatcatcgaacgccgcgacgatcttggtgacgccttcgattttcttcagtatgtcgagcgcgactgcccgcttgaactgaggcgccggctcggtgttaccatacggccgcatgatgagttcatactcgcgatgttcggcgatgccgagttcgcggtggagcttggccctggtctggaaaaagtggttgtcggttcggccggtgacgaagaaaatcatgaggtcggcgtcgatggcattcctgatgcgacctacagcgtgcgggttgagagtgtccttgtcgagacgagaatgatactcgtcccattgccgttccaaggcgaagctcttgcggtggctatcgtcgaatacgcagccgtccaggtcgaagatgatgatgccattctttggtttgcgttccatattcagatttccttactggttgctttctgggtgacggttttatcgatgaacgtcccatcagaagtgaggcggaaaacttcgccattctggatgaaatcgaacgattgcacgttcatcgtgatgcgaatggattcgctgccgttggtcacttcgacttgtgcgatgtcgccaactttctcgacaatgatcttcatgttacatggacttcccattgacggccacagggttggcctcttgtttttccgatccccagaaatcgcggcgcagttcttcctgctcggccgagcgatccatccaggggcgatagaacttgcactggtagataggttccaacggaacatcaatcacaggaatctgacctggctttgtctccagagcggccatgaaccggtcataggatttctgctggatttcctcttcattcatcaccttcgacccatagcgcgggaaggcgcaggagccggtggcgacgcagtgcggctggagcaggctgtcgaacataggatagacttccagaaccagccggcgcatttcgcggaatacttcctgatattcaccctgggtccgaacgcacaggcgaaccttcgccatgtcgctgagagtccgcagattgaacttggccgcgatcttcgtttccatgttggaagggatgatggcacgagcgtcctggagcgacgcgccggcctccagaagcttctggtagctggtttgcgcgtcggcaatggcgtcatgccacagacggttcagctcttcgcggacatggtaggtcgggtcaggctcgccatttaccgtagccggttcgtcgaattcccagcggaaggcttccggctgaacgacggcgctgatttccagagcgcgactggtttcctgctggtaagccccggtacgagtccgaacgagttgatgggtgaagttcttgctgacaccctcgatctggaaaatgaagtccacgaactcgaacggcgagcggatggtgtccagcatgtacttccagtggtcaagcttttcggcctcggtcatggtcgccgggtcttggccgcgcatgcgagtggatttcgtccccaggagaagttcccaggcgttctgggtgtaactgatcagagaaattttcatcagaaatcttccggaattggcgtgaagtggaattttttggttagagccagggccaggccttgggcttgctctttacgaatgccatactgctctatctcttccttgagcagttcgcaggcctccagacgcgactcatactcttcagcctcctgaacggatgagaaaacggttccatcagaggttctgtacacaagttcaatcgacatgatgacctcagtagcagcggatgatttcggcgcggatatctcgacggtcgaggtagtgctcacgaatcttatcgcgggcgcgctcggcctcttctcgactgccgaacgacaggttgaacgaagtgaaaggcttatcgtccaggcgcccatcgccaatcaggtacaggatgcctaccagcacgaaagacggcgctgtctgtcgcgtttgcggcgggtcgatttgcatttcgaggaaagacatgggaacctcttcaggatgatctggtgcgtacattaatagcgctcctgctgagcagctacggtttccggctcatagatgagcatgtcaacgatttccgggcactggcctttcacccagtcgatggccgcgaccagtgtggtggaagcggagaaagagaaagtgcggtaagactcatggatgtacggcgaccccatcgaatcgcgctcggtcgtgcgagaaatgactgctttgatattaacgatccggcccatcttcggcctccactttagcgattatatctgacaggctcagtttctcgccattcaggaaataactggcgcgaaacttcctgtcaccctctggcccgacgatccgggccgttatggtgagactcccgccgccaagggcatcggtgtccctgaagaaagccagcagcgcccgcttgagcgctgcctcgcgaggatcgacggccattaacctaccacgttccagccgtgctgagcgcaccaaaccgcaccggcccctgcaggaaggctattcagaaggaacacaggagtcaggcgaccgtcctcggtcatatgtatgaagtagcgggcgccttcaccgagccactcggccttggcgatagcgcgttcgagattggccttggtggcgtaggttttggtgtggttcttgtcggtggagaaggttacttcgcgggccatttgtagattccttttggttgaagggtttcgcgtttcgatgagggaatattacgcccacctgatccagaagtaaagcacttttgtaaattacttcacgaacattttcttggccttctgataagacgaagaagtcatcaggcgctcgatgacgtccatgtccgaaaccagatcatccagaaggacgttgcgccaggtagcgaaccggccgagcgagaagatgccagcctcatgggtgagattccagatcatggattcgcgctcgtcgcgaccgagcggaatgattttgcctttggtctggatggtcggctcgccatcttcgatgagctgtttccttctgatgccgaaggccgcgcaaacgtaatccatatcccagtcgctgtcccattcgatggtttcgattttaccatctaaagtctccactatccctttagtgatggattcgacgatcagagtatcaccggtgatggacgctcgaaacgttcccactttaggaccagggaaatacacggtctggaagacatcacaggggatggagagcttgtatcgactcacgatgatggaggttccttcaccgaatgacgggtcgattcccaggtccagccctgccgcagccagattggcgcggaacggcgcggtgctgatgatattcacgtggtcatcttgccggcgaagatactggaagaaagaggcgtcgaaaggacggctccaagtgatacgattcgcaagcttagccaccagctgctcatagtagtcggccggtgcgatccaacgcttttcagtcgccagattccagatggaccggtccgacaggccgcccgttactttcctggagtacatgttgcagtggtcgatgcgcggctgggaaatgaactcgccatcaatgtagatggccttgtgtacggtgacttcgcggaatgggatgccggtgagttggccgatgactggtgagcggaaccgcaagagcgcgttgtggcgttccttgctcgtcggcgtcgccgcgtcgatgatttgggcttgaggaaagcgatgcgcggcgatcaggccggcgagtccggctcctacgatgattactttctgatcaggaatcatgatgtgtcccttatgagtgtacaaaacttgagaggataaaaaagggacccattttcatgagtcccttgaagagctagacgattcaggctcagaggagcggcggcttactcctcctcaccttcggaaccatcggcgccctgatcttcaccgccgtgctcctggccttcgtcatcggccttctcgtcatcgccctggccagcttcgtcttccttcgaagcgatggcaaccagatcgacccagcccatgatttccagcttgctcaggtagctgcggaccgaggtgccatagagaagatgggccaccttatcgccgaaggattcgatttcgaccggctcaccaacggtgcagtgctcgttgatgtgtgcgaacaccttgccgcgagtcgagaaggcctgcggagtgccatggccgtcgccggtcgggatgaagtgagttgcgcgggggcgacgcgagccgttggacttcaggtcttcgcggcgggcttcggccttcttgcggcgctcttcctgctcttccttgcggcgctgcttctcggcttcgcgctctgccttcttctgctcggccaggcgcttgcgctcttcttcgcgtgcggctttctgggcttcctgcgcggccttcttctcttcggccttcttggcgcgctcggcttccttctcggccttcttctgctcgcgctcggcttccttcgccttcgccttctcggcctgctcagcttccttcgccttggccttttcagcgcgctcggcttccttggcggcggccttttccttcgccttctcggcgcgctcggcttctttcttctcgcgctcggctttgcgcttctcttcgcgctcggctttcttctgctcggcttccttggccttggcttcggccttctcggcgcgctcgcgctctttacgttggcgctcagcggccttctcggccttgcgcagggcagcggcttgttccttggtcagctcttcgccttgggcctgttcgttctggttcttctgttccatgttcttactccgggaatgtttaaagggatggcttattggcctgtgaggggattatctctaaactaattgaagaagggaatacccttagcctgaactttcctaaatattttctttcgggaaagtccaaactctagggaacttatttatgttcgagaagttcctagcttttacgcaagaacagtaagtattcaattgcacgagtgatcccagtatacatcaactgactataagggatggacggcaagttctcttccaacatggcgactcgtttccactccgacccctgcgacttgtggaacgtcatcgcccatccgaagtcgaatccgccaatagccttctgcgcctccagccgcacgtcttcctcggccgaaaagctcaagggattgaacttcacccagcgctcatagttcgtgccgataatgcgaactttggcaaacagcatttcatccggctcgtcatcatcttcttggccttcggggaccggcttgaagtccagcagaatcgcttgctcgccgttcatgatgccatattcgtgctggttcccggtgcacaccagcttctcgccgatttccggttgtacacctttgtagccgaggatgcggcgcgccctggcgttcaagcggcggcgagtattgttgtaggcgcaaaggatcacgccatcgtcatccaggaacgtccgcatttcgtcgtccgacatatcgaagccagcccggactaggatatcatcatactcgcgacagggcaggcgtttgccctggcggacgaacatcgacgctcgaacgatattcccggcgttacgctcgatttcagtcatgactgtgtcgcagctatgttcgtggaaaacctgaacgccgcgcacagggggaacttggccaaagtcgccgatctccagaaccggaattcgatgcgccaacaagcgctcttcatcccactcaccggtcattgacgcctcgtcgagcacgaccaacttcggcttctcgtcgagcgagtctttattggcgaacatgatttcgccgtcttcatcctcgccaatcggccgatagatgaagctgtggagggtccgggcattggtgcaacccttctcgcgaagccgcgctgctgccttcccggttggcgcgacgaagaccgtccagtccatcgagcagcaaagttcggcgatgatcttcgcgatggaagtcttgccagttccggcgaaaccagcgagtcgatagacctggcggcggtgcgctcgatcacaccaaccgcgataccagtccacaacggaattgatcgcgtcgatctgctgactgtttggtcgaaagccgaatcgctcttcgatctgatcgacggtgaagttagatgctgacatatttgcgttctccaacgctaggtttaattgaatcgaggctcagtttaagcacgccgtccacagaccagccagtatcacgacgatacttgcggccttgcggatcgacatagaagttcttcgtgcgccgcagcagaacataatgccaagcagctccaagcgcgtggacccttcctttatacgggaaagccttcgcctgctctgcggcctctttggccccagggagccagcggacggtcgaaaggaccaggaccgcacccttaatagcctgggaagcggcgcggccgtcctgtgggctatagcgatgtctatcgaagtctacccagtggtggttgccgcgccggagcttgaccgttcgggatcgcccctcgaacaccaccgtgccttcgtgagtaaaaatatgttccgccatcgaatgttcctttataacgtacagttatgctttacctctgcgcaggaagagtatactatcagctgactcgccaaagcgagcgaatttaatccaactttacttcggcaggaaagtggccgatactagcgccgccgcctgtactgccctccaaaacagaggatacattaaatgcaagaatgcaagatttcccgcgaccaactcccggtcggtaatccgaatcccaatgtcgacaagacccgcgacccgaacctgaagcccggtttcctgcgccgcagccgcgagctggacccggcgctggcagttcgcattcgtcgcgagctgatccacgccgaagcgtccgacttggccaaggccggatgggtcaattcacagtccagcctctatggatcgaaagccttcccgcgccattctgtagttcgcgtgaccggagttccggaagatggagctttcatcggcatgctgatcggcttcatcgagcaccgcgagcatggcgaatgggcggtcatggaagccggaacgaaagaaggcggcgccgtcatcattccagtcgatcacatcatgcgagcgtcattcgccgaagccgaagagttcgccgaaaagtgggagcggaacttggggtggcgtctcctgcgccagctccgcgagtgcggcgccctggccgggactgaagacgagttcctgcggcggatcatcaatcgatacgttcgtgatcgcacgatcctcgatcaccacaaagtcggcgcggacaaagactacactgatgcagtactcaaaagcatcggcgaaacatggccgaaaattccttcggggaaattcgtcggacaccgagtcgcgcagctcctgatcggccacaagctaggtcgagcggggaccattctgaatgacctggtggacttcctggagaagttcgcggccgggcgcgataaaattctcaacatcgccatctgtaattgaggtgaatgaaatggttgacttggaaaagctgagtccaaagctgagtcctcggcagcatgccgttctactggagatgtacaggcatcctgagcatccagttcacagatcgccaacgaatttaactcttaaggctttgagacgaagggggcttgtcgagctatcctggaaggattccgtggctggatatatgttcggtcgccaaccttgctggaaaataactgatgccggcataaggcgaatcctgggagtgctgggggaataatatggaaaaagaacaaagcgaagatcgcccaagcatccctgagtttgagaagaccgacgccaacaaactctatgatgctctggagacgatttcactgctggagaagaagttggacgaatccgaaaagcgcgggagcgagctggccgcgagctattgtgacggcgtagtcggcgatgaatacggccatccttattgtcgttataaagtggaacgcgacgccgccttggccgaagtcgagcgcctgcgagaatcaaaaggcgatccctctggcagcttcgacagatgtatgaaggtgatgtacgagcgcgacgagaatgcaaaacaactcgacgccgccttggccagggtcgcggagctggaagggaagttgacggactgggtgcacgaagggttccggctcaacgaggcgctagcggtcgccaaggctcaacccagcgtgccggaaatatctggcatcggtcgcgatgccgaacatcccagagctgtagtgctgtatctgcgtaacgaacccagcgatgaagatatgcgagcaattcagaactttttgcgcgccatggccgcccccgctcagcacagcgtgccgaaagcatggctcgacgttcaggcagagcgccgccggcaggtcgaggcccaggcgctaaggcaggaagtcgcagcactgcgcgcaagggcggatgttttgccggaggtgttcgggcttgagcggtaccgcgtagaaaaaactgggaagggtttctggccatactgcgtgcgtgcgggggatggaacgcgtgaactgttcgtcggccacttgaagcagtgtcagcgggtagcgaccgaattggctacggcgtttgaagatgggaagtttatcgccgcgcccggcagctcggctcagcacagcgtgccggaggggtggaagctcgtaccgatggacccgacatcgcagatgacctatgtcggtcagtccctgcgttatgacgcggtaaacagcatcggcgagatttaccggcaaatgctcgccgtagctccctcacccatcgatccggccgcgcatcctcagccgtgccagcaaccacaggcccatcctgcccgctgcgggtgcgagcggtaagtgccaagtaaggaattcatgtaatggaaccgaagaaaccttcaccagtagatggagtcatcatgaccagcctcgacgttctcaggaaggcaaagcctgaagctcaggacgagtatgccctgtccatgttcgcaacggcgatccgccagaagttacagcgctcccgcgataagggccgaggtggctggatcgactgcgacgaaaatgtcctgctggatggattcgccgagcatgcgctgaagggcaatgagaacaacctcctggacctggcgacgttcctgatgttcatgtgggtgcgcggcatcgatgatgcgaagattcccccggcgctcgaaaaggcgcgacagcacaagatcatggaagcctggagtcgaatccatgaagatggcctaaactccgccagaaaggcgagtgcggcgcgacagttcgtggaagttcctcgacgcaaggggcgcccggagcgacttgcatgaagcctcacgaaataagactggcccaggccgaagagttcctgcgcgaactcggccgagggattccggacgacgaacgggtgatggtcggctacgctgaagaggccacggtccaaaccgacgagaacggccgcaagctcaacgccggctggtggcctgtgccctggaaggaaggcaagtacatcaattccaggtccaacgcctatgcctgtatctcgtcatccatcaagacgcccaacccgaagaccggccagatgcgatactggcgcggcgaggcctctttcggccacggcctggcgttaatggtagatgacatcggctccggcaaagggtccaagggtgacttcgaccgcgacgagttccgcgagcgactggagccgaccgcgattgtggagacttcgccgaacaactaccagttctggtatttcttcaaagagccgatgtcccacatgctccagttcaaggcgctgctctattcgttcgtggaccaggtgctaaagaaaggcggcgacaacacagtcaaggacgtcagccgttacggccggatgcccttcggcttcaacaacaagcgcgggaaagacggcaagttcaaatatgccgacgaaaacggcaagcccgaactcgtgcgcctgtacagcgccgactattccaagcgctactcgccggaagagatcgcccaggcattcggcgtccgcatcatcatgccacagatgaagaaggtggagataaaccgcgacgattgggtgtatgaccaagtatggctgaagtatgccgagcacatctgcacgaaatacaagatgggcgaagcggcaggcggccaggtccagcagaatatgtccggcaaataccgcatccgctgtccatggggcgacgagcacaccaacggcgatcctttcggagcatactttcgcggaccgatacctggcgccgagcacgaatatgtgttcggttgcgggcacgatacttgccgcaaagagcatcgccggacttgggcggccttcacggatgaagtcgtgctaccctatatcgtcgaacaattagaaagaatcaaccgccgtcatatcggtgaggagtagacaatatgcaaaacgatcctggaatcctgattaccgccatcggcttgctgttcctcggccttatcatcttcttcgaaggcctaaaggggtggaaaatacaagtcgcaaacttcctcgcgtcgcttctgtgcttcttcttcggcctttctgctttgacgttctggttcgtcgttgcgtttgatgtattttaatcgacgaacggtacagaaattttcggatggggacggaacttattagctatgccggtttaggtaggagataatagccgtccctttcgcctcaatgtgtagaggcaatgttgaatccgatcatgtaaagcagaaggcggcaaacctaacatgattatcgacgacgataacattcttgatgatgacgaatcggggtccagtgagttcgatctcacacagatagaagatgctggaatggaccctttgatgaccgccgcaagtaaagcggccgacgatgcgattgcgaggaatgagacttaccgagcgcaaaaggcagcaaagtatgcagaggcgtatgcggaaccagatttgaagaagcgagcgcgattgttgatgctcgatcaggcctttgatcttccggtcagccggctggtgaaaggaccgttcgacgacttcatcaccaagtacagctcgacttcagacagcaactacctcgcggtctatgatacgttgttctgtaagggcgacggaactgtcccacacccgcacttcgacgagtttcgcggccggctggtggaccaccgaggcgtggcgttcaacaacaaaaccctcgatccgattgacctgatgggcgccctcgcggctgcggccttggacgatccctcgattaagaagacgattgagacttgctgcgtgtgggcgcgtcgatatcgccgcaactctttgatcgaaacgtttgagaagaagataccggattgggacggcgaagagcggatcgaaacgctgctgatcgacttgttcaaaccgttcgacaccgagcttaaccggatggtgagcaagtatttctggctgagcttgtactgccgcatcaactaccctggaatctcggcgccgatctcgttggcgttgattggtgggcaggatgctgggaagacttacttttcaatcttgatctgtaaagagttgtcgagcgaccgaaagttatcgccggtccagcttgacctgagccgtcatgaccagacgccatttttgcgcaatatcactggcaactcggtgatcgcgaacgtcggcgaaatgtccggcttcaaaaagggcgacatggaacgcattaaagagttcctggtgcgatccgatgatactttcgatcagaagtttgaaccaggcgaaactatcagtcgacaatggatcaccatcatggacggcaacggctatgatggtcttcaacgggatgagtcaggaaaccgtcgattttatccaatgttcgtggcgcaacttcccgacgaggatggcaagccgaattgggttaaaccgggcgatggaaatgaaactttccgcgttgacttcaccgacttcggccgcaaattctggcaagccatggctgagtgccgcgcctggattaaggcgaatggcgtggagggatatctcagtctagttcgggcgaccaacaacgaagtccagaaattctctatttcggaaatggagaatgcgcgtggcgtggttcgtgatgacacgattgatatgtatctgatcaacgtgctgatcagttgcgagttcgaagagatcaagcctggcaggaattcaaagaatcctggatggagagtcaacaccatcgaaatcctgaaatggttcgatattctcgccaggaagaagccgatttctcgccacttaactccgcacctgaaggcgctaggatttgttccgaataagaatggcttgaatggctggtgcctgcctgtagataaggttgcgcctggatggaccagagatatgcacacgacgttgccgccgttcaatgatgtgcttgtatacttgctgaggaaggttgattctgaggtgactgatgaagaggcaatgattcaaatccgcaaagttaaggccgagcgcgcaaggatattgggtgaggatttctgatgtagtgatggagtatacttggactaggccgccttcgggcggtcttttctttggtgcggagtacattcgatttcggttgtggccgagtgagattcggaagctatctggtaattagggtttggtggcgatggcgcgttgtggaaagttcgtgaacgttggatcaaggattttgtgcggtgattggatgaattgtggaaaatcgacgattctgactggatttttggggtcggccgcgccggtcttactggtaattaccgaaaccgggaatttgggtcgagccttagtgccgcgtgggcttgaagcgcttattcggatacttcccggtttcggatgcagccgcaaaagtatactacagcgaaaatcgattgcac

SEQ ID NO: 43 - DNA, 67186 bp, synthetic construct
  source 1..67186: mol_type = other DNA
aatcctaatagaaaaaatctatcacggacgttacctatctttaaaattaattaaattaatggtaatttggtaatttggtaaactttagtatttgaaagcctcgcggcactaagcttgtacatatcccgtgaagtttccgattccagccagctcgcggcagggtcgccggaaacttccggacttccaatccatgggtcgcggcaacaccacggcggactaagcggcaagtgccaaaactcgacgaacggaaccggaaatttgggagcgcgacagaatcgctcagctggacatatttctaacattcgatttaacactcaatccaaacactcaccaccatcatctcccgccaaccgccgactcgaccctcacccaccagcggatcgcccgtataacatcctataacaccacctaacactcattcatcatcaaacccacccagacctacagcccacccacaagcagcccatagacgcgatccctggccccatagtacaatcgcgccatactcagtgtcgcggcagagcaccaggcccatccaccaccaacgccaccgcgacgactccagaatctaactccagggacgcagcaccaaatgaccaaatactacagccccgacgatctagtcacgccacaggaattcgcagacccgcatttcgcggcgatcaaccagaagcgtttcgatctgtatatcgacctgcgcgtccaaggctacagctcctggcgggtcttccgggccatctggggcgaggagcacatggacggtccagcccaggctcgcatcttcgcgatggagtccaacccgtactatcgcaagcagttcaaggccaagttgaacgcgaccaaaacgtccgatttgtggaatccaaagacggcgctccacgaactcctccaaatggttcgtgaccccaccgtcaaggactccagccgtctgtcggccatcaaggaattgaacgttctggctgaaatcacgttcgtggacgagtctggcaagaccaggatcggtcgcggtttggccgacttctacgcatcagaagccgatgctcagactgccaccgtcgctgctgcagccgaagccaatggctatgtaccggaaggcgaagagggcgattttccgtctccgacgccggaaccgaccgaggaagaccgcgccaaccccatttagacataaaataacggctaaggatttaaggtaaggaggttatttatgcaccccttcgatcaagcggtcgtgaaggatccgaccgcgtcctacgtggacgtcaaggcgcggcggacgttcctgcagagcggccaactggacgatcgcctcaaggcggcgctgccgaaagaatatgactgcaccaccgaagcgacccccaatccgcagcaaggggaaatggtcatcccgcggcgctatctgtcggggaaccatggcccggtcaatccggattacgagccggtggtgaccctctaccgcgacttcgagaagatcagcgcgacgctgggcaacctctacgtggcgaccggcaaacccgtctatgccacctgcctgctgaatatgctcgacaaatgggccaaagcggatgccctgctcaattatgatccgaaaagccaaagctggtatcaggtcgagtggtcggcggcgaccgcggcgttcgccctgagcacgatgatggcggaacccaacgtcgacaccgcccaacgcgaacgggtcgtgaagtggctcaaccgggtcgcgcggcaccaaacgtcgttcccgggcggggacacgtcgtgctgcaacaatcacagctattggcgggggcaagaggcgacgatcatcggcgtgatctccaaagacgatgaactgttccgctgggggctcggccggtatgtccaagccatggggctgatcaacgaggatggcagcttcgtccatgaaatgacgcgccacgagcagtcgctccattatcaaaactatgccatgctccccctcacgatgatcgccgagaccgcgtcgcgccagggcatcgacctctatgcgtacaaggaaaacgggcgggacatccatagcgcccgcaaattcgtcttcgccgccgtgaaaaatccggacctgatcaaaaaatacgcctccgaaccgcaggatacgcgggcgttcaagcccgggcggggcgacctcaattggatcgaatatcaacgggcccgcttcgggttcgcggatgagctgggcttcatgaccgtgcccatcttcgatccgcggaccggcgggtcgggcacgctgctggcgtataaaccccaaggagcggcagcccaggcccccgtcagctgattattcgccagcttcgatgatttcgaagttgtatttgacgccttcgtgctcgaaagtcatcttgccagccgccttcagctgcatgcggaagcggatgtgtttcgaagaaggcaggccgaactcgatgaatgctgcgttggtggaccggaactcgccgcgcttgcctttgacagtcacagccacgccatggcgctgagtgcgtttcttggaaacttccgggtctttccaggagttggcgatggctgccgacaggtctttggtctctttggccttctccggcgcgttcttggcctcttcgcgcatcttccggatttcttccagcgcttcctcttcggtgatctcttcttccggcttcagattctcttcctcggccttctcttcttccttcttcttggaagtgcgggttttgtaaacctttgccggggcttcctcttcctggaaggcttcttcctcggccggcagagcattcaggatggcgaggcagcgacgctcagcagtcttgcggtcagagaaacgcttgacagtcgcatcggcgttgtgggcgttgtagaaggcgaccagttctttcatttctgcgttctggatgtcgccgaaggttttgatggagttggtcattttgcgatcctctgttttggaagatttcgttcgggcttcggtttgtcgccccgttgaaagagattatgcctaggtcgatgctgcgtgtctacatttatttcatcagattgatcgcaaagccgacgaacggttgtcggatgtgaaaacaccgcagagcaggctgcggtgtttgttggcgagggcgatggtcaagcgaacggatcgcccagcatatcttcagacggggcacgttgcatatcgcccagcttgtcttcgtcagttgccggactggacgggatcgcgccggaccgaagcgacagagattccgactgcctgctcacctgcggagccggaggagccggaggagccggaggagcttttggcgcagtaggggcaggcgggaccggcaggcctggaggagccatcggcgccctgggaggttccggaagatcgggaagactcggcgctatgccgccaaaggaccgctgcgactgttgcgccggattgtcgccgaacatttcggcggatcggttgtccttgatgacttgacctatggccgtcttgtcgccgcccggctctgccggatcgaagcccgtgaatggagtggtaacgcagcgcatgttcggatgggtaggcagatttttcaggactatggaatctgcccagacatacggattcttgtggttgccgggtccgtggctgatgatctcggcaggaatatggccgttcatggtgagccattccgccatcccttgccgagtcagcgggcttaccacgatctggccagtagactcttcggcgacggcgaacagatcaccgagcttgaacccgatgattatgtagttggacctggactcgccgacgaaagccagggtttcgatgttgtggtggatatcttggtcttcccagatgtaaagcatgatgcgctcctcaataaggctgcttgttgtgttcgaccagagacataccggccggaactttgaagcggacgtattcgatcatcatcgccgttcgacgccgattcgtgccagactcgtcattaacgaagagttcgcactgatgcggaatgactcgcgtcaccaggtcttcgcctttcgaaccgtagaacttgatgtaggctgcgacgcctcgcgtcatgctcagatggatcgtttcgcagagtcgctgcgcggccgacgcgctggacagatcggtcggactgaccgtcacccagtaatggccactttgttctttatcggacataaactgccctccaatgagaaagcctctgccgagtcgcagaggctggttgttagtcgcgcttcagcagaacgactttgtcatgcgctcgatacttcccgcgccagtcttcccagtattcgccggccgggcagacaagctccagagtgatttcgtcgcgccagcattcgacagaaagtacaatagccttgttccttgctgcggcatctgctctgagcttaaccagaatttcgtcgccagttttcagctcatcaactcttacaactttggccatgacacactcctgtttgaagaggcgcggccggaaccaacccagccacgccgatggattaacgtttgtgaaggatggacacggtgtccacgtcgaggatgctgatggtacggcgacggcgcggattgctgcgttcatggatgcgaatcaggttcgcaactggagcttcgtccaccacccatacatcttcctgcttctgcgtccggagcaggaccgttacttctgtgttctgggcgaggccgttgcaaatgaacgtgaatttggacgagggagttctgtacatttcgagattcctttttggacttcgggtccggcttctcagccggtgaagagattatgccctgattctcaccgccgagtaaagcatttgtgtaccaattctcccgtcaggtggaaccaaagtgcggtatcgcttatggctacgctaccgcgccatggcccttcttgctcgcacactgcgaaccacaggctgatttccatccttgccaggactcggccgaaagattcgaacctgcgccgactggacaggatgtcgacattcactcgtcgattgacctcataccggcgaccgttgatgacgaagaccagccgcagggtttgtccgtcaagacactcccagtatctggtttcataccgaagccagtagcgctttccagccgggcctaccatggtcatttaatcgatgctcctggccgcgccacgcggtccggtcggcggcgcaggatcgaaccgccccaggatatagtcgggccggcgcgcttcctgaggacacacggcgagaaggcgccatcctgcgtccagggcgtactggagttcgtccgtgcagcagtcttccttgagcagcagacggttgacgctctggagattcggaccagggatggccgagctggtgtgcgagttccaaccttcgatgccgtccaccatctgtggttggttgatgtagccttcggacctgccagccaaccggctcgcggccagctccaggcgctccagcatgggtcgcagagcagcttctgggtcaacgtcgtcccagagaaggaccaagctgatgatggtgtatggatagtccttgtccagatcccaggccgaagcggtcagacggcccaggccgatttcattacacatcacgggaacgtcgttgctccatgtggacggctcccagttccgctcaccaggattcccgattgttacgccttccaggttcccaaggagaacgtggagcttgctgacgtattccgcctccagcgctttccgctcttcgtcggtctggttgtggcgatagaaggatggagggctgacttttgcatggtagagtttcatggcggttcctcggtttttgaaggcttgaacgttagagaatggtgtcgcagtatttctcgaaaggactctggcgcttcttctcgcagatcgcgcaggtgatttccaggtcgggcagctcgctgcaagtcttgccgagatacagccagcgcttgcacagactgcggccgtccgacgtgaagaagtggactttgcgagcattgccgggttgcgcccagccaccttgatcgtttttgcgcttgctcatggcgatatttcctttggatctggaatccatgccgtccgttcgctcacccaaactccgtctacatagatcaggactgacagagcagtcgcgccaaacccgaagcctacatagaatgaaccgggatcgatttccatggtggcgctattggtggcgctattgaaatcgacttcaaagtcgaacatcgaatggccactcataccatcaccatgtcgatttcattgatgaagaaatgaacatcgacaccatcggcgcgaccggtgtaacgcagccgagtcgtcccatcaatgtgggcttcctcgacgccgatgacttccaggatggtgtcgttgcagtaaagcttgacgaacatcttgatgccggagccaatcgccgcgaaggcgatctgcttgtacaggtcttgcttgatcacgctttgcgctcctgtttgcggatgtattctgccctggcttcggcttcgaacttcgcccaaagcgcgttgtcgactggaccccagggaccggtctgagtcccgtccaccggcgcgaacttgccaccggcgcgacgatacttggacagagttctcaggctgatgattttctcttcttgggaatcgagttggacgatcacttgacatacttcccgaagtagcaggtgtggagtatttccatacccttggagatagccttcagcttgataccgaaattcttgatcgcccagtccagatcgtggtgatagaactcgatgatgttgacgatttggccggcgctgtagtggatgacgcgaaccttgccgttccagtggaaatcttcgcggctgtttacggcctcgacttcgatggtgtcgtttctgccgatggtccatttggagctagtcatgtcgcaatcctctttttggagtgtttcgcgtttcgatgaggtaactatacctcagtcacctcatcgagtaaagcacttttgaacagattatttgaaatttctggaagacagattcatcggctgattcagtcagtggaaccgagactccatccgttgcgggcgaaggccgagcgaccagacagcttgcggcactggatggagctgccatcgtcgaaggtgtaagatacggcccagtccaggcgctcgcgacgtactgccgcagcagcgatatcttccagacgggctttgagaagttgttctgctttggtcatttagagttcctctttggagcgcttcgggtttcgatgagatgactatacctcagtcacctcatcgagtaaagcactcctgaggaattatctgaagtttctggaggccagaaattgccgccagagccagtcaacgtgatcgttgagatagcgctcgccatcggacgacagagccaggcatccatcctttatgccgagcttggagccggcaatccattcgaactcgaactggagcgttcctgggcgagggatatgggacaggatgtacttttgcacggtcagtagtcctcgaaaggattcatgttggcgatggccgcgattttctgcatgccgatgcgatagaattcggcttcttccctggccttggccagattctccctggcttcgcacgccagcttgtactggttgttggcgttctggatgcttccgtccagactcctgtccagttcttcccgaagagccttctgcgacgctagctcggcctccaaatcctggattctgagatgaagctggcgatttctttccgcaacctcgttttcgcgagcgatggagttctgaaggcattcgtcaagacgagtattttcgcgcaccagctgatgcttttcgactttcgcctttcggcatgtctctcgcatcgctgaaagctcactggcgtgcaaatcagcgtccgggtctttacgctcttccttcgaccccatccgcaggtagtattggccggccgcgaaagcgagcatagcctggtcggcatactttacggcctcacccatgtagttggatttgtagcgaggcagaaacttgcactcctctggatcccagagaagactatcggcaataggccagaatttgcggaagccatcaggatcgacttctacattgaccatttgcagctggccgccctccacttcgacttccagaggaacctgaatggcgccggtgatgtactggaagtacactatgctagacataacacaatcctcataagaagtcgcggccgggaccatcccagccgcatcgtaatcactcttcgccttcgtccgtgctcagccactcttcgaaggcgaaattcaccttcgactcgacccaatcctgaagctcgtcggcgaactcgtcactgtcgatgtccatggtgattcccataacttccatgttccatagcgcggcattcagttcgaactgtaccatctgctcgccatcgacttccagcaggattcggtctgcgacttcatagtcgtctacatcgaacagatggccgcccgccaggaggtgctggacgaaagcttcatcgaggttggtgacttcgatctggacttgtttggtcatttccgtctccttacttagcggctttgaattgggctttgaggttggccagttcagctttcagatcgatcatcgcctgaccgcgcaggccttccatttcggcctcgctgatcgcgatcttggctgcgcggattttgtcgttgatttgatctttagtcattttcggcttccttttgtttgaagggttttgcgtttcaatgaggagattatgccgaaagtcagaatggaagtaaagcatcttgatgagaaaatttctgccctccatcgaacggtcgtgctcgaccgtcgatggagggtgtgcataatcgaagtcgcacgacgcgaccggtgatgccccggcgaaccgggacggggtggttaggcggtgcgctcggcggcgcgttctgcgttacggtcgtgcgccatgcgcgcccatactgcggcccagcgcgctttatcggcagagttcggcttgtacacgtcgtcagggtgcggttccgggccgtaggcgttgcagctttcgtcgtattcgtaggtcatcatcttgccctcaaggggtcatggcccggcgaaccgggcgggtgattacttgcgatatttcttaataaggtcgtgtgccatggcgatggcatcagaataggtttctccgccggcctccatttccttcacagccttattgcgcagtgcgttcagcttgttgccgttgatggtgcctttttcatccttggcagcttcgcaggagtcgcgcagagttttcagggcttggtaggtggcgttcatcgtcttgttctccgggtttcgcgtttcgatgaggagattatgccgatagtcagaatggaagtaaagtgtctgaatgaagaaatttctgaacaccgacgaacggttgtgctcgaccgtctgctgcggtgtcgatatactcggcctattgcgaacaatggactgattaaatgtacaaactcaatcctgcgctgcgagcggtctggcgaactcgcgcccgttacaaagtcatctatggaggccgggcgtcttcgaagtcgcacgacgctggcggtatagccgttttcctcgcggccaactacaggctcaagttcctctgtgctcgccagtttcagaaccgcatcagcgaatcggtctacacgttgatcaaggacaaaattgagaattcagagtacaacggcgagttcatcttcaccaagaactctatcaagcacaagaggaccgggtcagagttcctattctatgggatcgcccgtaacctgtcggaaatcaagtccaccgaaggcatcgacattctctggcttgaggaagctcactatttgacccaggagcaatgggaagtcatcgagccgaccatccggaaagagaactcagaaatctggatcatcttcaacccgaacgaagtgaccgacttcgtgtatcagaacttcgtggtcaagcccccgaaagattcctgcgtcaagatgatcaactggaacgaaaatccgttcctcagtgagacgatgcttaaagtcattcacgaagcctatgagcgcgaccgggagcaggccgagcacatttatggcgggattccgaagactggtggcgacaaatccgtcatcaacctcaagttcatcctcgcggccatcgacgcccacaagaaactcggctgggagccagccgggtcgaagcgcatcggcttcgacgttgcggacgacggcgaggatgcgaacgccacgactctcatgcacggcaacgtaatcatggaagtggacgaatgggacggcctggaagatgaactgctcaagtcgtccagtcgcgtatacaatctggcgaagatgaaaggcgcctcggtcacttatgactccatcggcgtcggtgctcacgtcggttcgaagttcgccgagttgaacgatgccagccccgacttcaaacttatctatgatccattcaacgcgggcggcgctgtcgataagcctgatgatgtctacatgaagctgccgcacacgacgatcaagaacaaagaccacttcagcaacatcaaggcgcagaagtgggaagaagtcgcgacccgattcaggaagacttatgaagcggttgaacatggaaaggtttatccattcgacgaattgatttcgatcaactctgaaacgattcacccggacaaactaaatcaattgtgtattgaactttcgtcgccgcgcaaagacctggacatgaacggccgattcaaagtcgagtccaagaaggacatgcgcgagaaacgcaagatcaagtcgccgaacatcgctgactcggtgattatgtcggccattctgccgatccggaagcccaaaggcttcttcgatttctaaacacagaaaagcccggatcgctccgggcttcgggtcttactcggtatggttcctggcgctgagtgtcgatgcaacggcctcgccgactcccagggcttcctggccggccgcgagcgcttcggcttccgactcgacgatgaagtcatcaccttggccgtcgccgggcggaacctcgaccagcacggcttcttcgccctcgaaacgcagatcataggtcttttcgacggacagaccgtaacgggcgttgagcgcatcccagagctgagcttcatagttgcgcaggtcttgcagagatttctggtggctgagcatcgccatatcgacggcccgttgcagggtttcgtccaggacgttgaatcgcatgcgaagagaacgaatccgctcgaccacttccgcatccaccacatgtctttcgatcatcacttttcacctttgctgaatgtaacgttgtagccgttgtcggccaggtaggtcagggcgccttcgaaggaagttccgacgaggtgcttgagcttcatttcgcgttgcgcggccaaccagaatgcagttccggaaaactctgcgcggccttcggacaaaaccctgcaatcaggcccggcgatccgtacatggacggaagatagcttgatcggcatcagtgaatacctccgctggcttgcgacggcatgctttcggcgcgagcggcttcgcagtccgggcagggacaggcttggcggacgcgctccaactcgtcggcatccatgacatagagcttcccgtcggcagtgtcatgtgccatagcgatgttcgggaagtcggttgcgctcaggccggcgacagtgcggatttcgtcccagagcaccagatgctcggcattcagtcgggcggcgagcgcttcgtgctctttagcgacgcgcgccatgaactcgtccatccggaatgcgaattccgcatcgatggcacgggccgaggccatggagctgagtcgaatcggttctttcttcatgatgattctcttttggttggtggttgttagctgctcaggcctattcaaggccggctcaacgcggcgaagaacaacacgatgaaaaggagcgaaaagaatgcgaacgccagagatattccggaaatcagctttgctatgccctgcatctcagttgccttggcagcgagtctggccttagcctcgataacttccggtcgtggcgactgaacatattctaaggcctcttcccgcgctttttcggcctcgaccaacctagggtcgcgggccgagacttcgctgtgccctggcctcgcgggatgggcttgcagcgatggaggaagttcagcagccacgactccatagtcggcgcaggcccaagcgatcccgatgaggatcgcgaggatggactggacgattcgcagcatcactttgtcgctagggaagttcacgatcaatcctccaccgaccgaacgatttccatgttgcgaccggcattggtcccggcattgaaggcgcgccgaccgtcgctatcgtccagacgcatgagcttagtaacattcgatttcttgtagccaggatcgccgaaatgttcgtgaaccgcagcttccttcaccacaaccagagacgttccggcagaagataccagctccatgcgcttcctggtgatggattgaaggcgatagctgatttcctgggtcgcggccagcttgaattgcgcggcaacctttacgttgaaacgttcgtacccttgagccttctgatactcccggcacagacgatcaatggcctcgaccagggagttgaacatgttcaccgccagctcaacgtccgacttgtagcctttaaagcgtacggcatgaccccagcgcttggtagtgcttccgtcgcgggcgcttctggatgccttggccgatgctcgatggttgttgatgccaccggcgaaatccatgatgcagtcattgtacgtcgccacggccaccgagaagaacttcatccagttcgggattgcggaatagtaacgagtcgcaatctgctcgtcgaactcttcacgaatctcgccggtcgcttcgaagccgtggaggtcatacttgtccttcagcttcttcacgcgctcggctgcgatggccgcttcgtgcgggctggaggagtcggctgccatggcggtcagtttgcggatgcggtctttcgccttctcgatggcttccggggtgaattcgttctggtcggtcatggtcggttccttttgtctgaagggtttcgcatttcaatggagctattctgccttcattcagaatggaagtaaagcactttcttccactatttcggcatcgactggaagaaattccagatccaatcacctgctaccagcaagaggatgagggcggcaaagaacaagacagcggccgcgagctgtgcgcccggcttcagtttgggatggctgagcttgggctctacgggaacggccggagcgctagcgctgcaaccggcgtctcctgggccgtagccgatgccgcgttcacacgcctggagcgacaccagggatttaagatactcggtctgcttttgcgactcttcgtagatgccggcgacggcgaaccagagggcgaacaccacggacgtacacacaacccaggcgccggtcagcaggagggccagcgggccgatgacgaagacggtagcagccaggacgattgcgccgccccagatgatgaagccggccagaccattggtgatgtcgacacagaactttttcattttcagattccttcggttacgggatggaggggatttgaaactctgcgccgccgagaacatcaatgacgacttcccagagcgtcggaacagaccactggtaacggtcgaagtcggtttcaggatcgacgcccagcgtcacataggaagtggcaggccatttatgaatactgcctttccgcatgagagtcgccacgcggccgtcaccgagcggattcgtcctgtgcggaacgtacgcagacatcgaatattgctgcccggcgtcgacaacaaatctttgcctctggcgcagacatacagagcccacaggattccagccgcgaccgccgcaagcctggcgagccgaagaatgctcataaccttcgtgagtcatttcgccgaggcaagccgagcgatcctcgtaatagttgatgttctccatcgatccaaccagcaccagagactcgaaatcgaatcgatgatcgtggatggccgagtgattgaagcaaagccgacgcggcagctccgggtgccaaacatggaggcgaccggccggaagttggacctgaatgaaccccaggccgtgcagagtgatcttgtccttcatcgggtcatggacggtgctcatggataatcctcagtagcagaaatgtattgtgagagttacgattgacaagccggtcgcccatagaagggcgaaccaggccatggctttgatggtcgtgtagatcatccgaagaattttccggcacagatcgggccaatgcccatttcgatggatgcgtggttggtcaactcgcgaccgcagcaggagcactgaccagtcttccgaccgtaggcgactgccgattccatcggcttttcgaacatcttcagaacgtcatcgtgctcagtatcggtgcagtcgcgactcttgatgaatttgccattggtgatccggccgaggtagatgtcgcccaggacgtacaggctaccggcgttccggctgtgagcgctagcctctttcacaacaacgatgagcggctcctcgccttcgccagctaggcggattttcgggcgcttgataccagactctttcgccttctcaaacgctttctcgatgccggaaatgtccagagtcggcgcagcagcttcctgcgcggccactttctcgcgatacttggcgaggttttcgatggcgcgcttcgcagcagcgatctgattttctgtcaaggagccgtatttatacaacgactcctgaaggctctgagcgaagctgaaggaatttccagtccaccactcgatgatgtccgggtgcgcggcttcgaaggccttaattttgaggtcgcgctcttgcgcagcgctacagattttctcgatgcgcttttctgccgccttagcacggctcttggcgcgctgctccgggctggttttgtactctttgtatccgacgccgccgcaggcaaagcaggcgcgaccataagacgaagggccacggtacaggccggtgcctgcgcatttggtgcacttgtcgcgatacagcttcacttccttccgggagttcgggcgggcgcccatggacacgtcttccagggtcttcggcgcttcgttgttgatctctacggtagcgaagtcatcacccaggtcttcgaagccggtgaacagattctctgctgcgttcatgtcgattctcctgtttggaaagttcgtttcgatgagttgactatacgccagaaatggaaaaacggtagcgatttctcactaccgttcgtcgggtcgaagacaatcaataaatgtcgctattgatcttgaacccatgctcagcgccgtcgttgtagtcgtactcaacataactgtcgcagtagtcgttcaaatgccgaatgatgcctagaacgtcgttcgcggccttgtgccttttcgcggcgatggtcttggcgatgctgtcgccgacttccagggtttcggccgtccggcgatggatcagcaggcgactccaaagatagagccggacgcggcgaatgatgtcgcgatggcgctccagtcgtccgtgcaactcttcaatttcgtgctcgcgagattttaatactcgtcgaagctgttgaacttccaactccaaatcggccttagtagccatgttcacctcagaaaggaaaatcgtctgagactccaggaagctcgacgattattgttgagcctgatcggtctagaatgcatccgaccgagccagccctgtgtggatagggtctacacgaactataacaggtgacttccctgactattcgccaggtcgatcctccacaccatctgcaaattggcgggcgcttcgacttcagttttcgttcgtccaggacggcgcgtctgtcgcaggaaaggcagcgtgccttaaccgacgtaaccatgggtatagtcgatcattcggatgagctcatcatcctctgattctctcgacttcagaccgcccaaagagtccgactggccgtcgcatttcgcatcgatatccatcgaagacaggaatcctgccgatactgcgatgatatcaactttgtcgccggccttcttgaagccttcgcactcagcatcgagggccacaattgcactcgcggccatgttcacatgactgatgaggtcggggaagatcacaggaacttcacgcgacatgccacggaccgtcagcttcaggactacatacttcatactcactatcccttttgtatgtgaggaaagaacttgctgttttccggatggtgaaaacgctcggtcgcaggcggtctttcttccggacattgaatcgtcgaaggcgggaaaaccgcgccggcgataatcgccgcgaggagtgcagcggatgtcgacatccagagggcggtttccaggctcacccgaacttccggacggcgcggcttcattcgctccaccctcttcccggttcataggatggtagactgccgccgcgaacccagttgtcccacatatggttcagaccagtcggtggctggggtggcggactgtagaatccgggagtctcagtgctgctcaggaaataaggcgtgcaaacggcctggacgaccaattggtgtcgctcccacatcttatcaatcgctcttagcatgacgtcttcgcactgagccttactgtcgaaccgtctgctagtatggtccggcatctggacgcagccgtctccagtgcaaaggaaagcagtagcaatccatacggtgatactcgccatttcgtcaccctctttagttgatgagcagagtctattccatctgctcgccaggagtaaagcgcttttcgtcgggataaatgccgatgatgtctgcgtcgagcatccaaatctccacggacggatcgtcgctgctgatgtggtacaggttgtacagctcccgtccgccgacagcgcgctcgcctcgcggctcaaccgccagaaccttgccgtgcccttctccgtgctcgtccaggtatatgacgtgatcgccgacttcatagctttctttcgtgacgaggcgtgaacgcgagctgttctgcgattccaccacccaggaatccagcacgccgcctttcatgtcgcgaaacaatcttgccgatttgtcgcaatcgaatacgcccagaacttctccgtctttcaacacgatatgtacgattggcaaaagagtattcatgtttaatctccattggttgataattagagtctaatctgccgaaaagttcccgtaaagaattattttctcataactgattagttgcaactgttaatctgatgtatatgtttgaatctcttttgaacgtttgatgtttcccctataataagcgcacacagccaacaaccacgtggaactacaatgtttaaactttcctggatattcgggcgcaaaaaggataatgctgcctgttctgaatcggcgccggagaaagtcgcacaaatccctcaacacgatccgctcgaccccatgatcaagctgggaaggattcgcggctggaacgtcgagccggagaaagccccggtcattcgtagtgtgaaagatttcctggaaccgggcctatctgtcgcaatggatagtgcgtatggtgatggaccaaccccggccgcgaaggctgctgcgggcggccagaatccctatgtcgtcccgactatgttgcaggactggtacaattcccaagggttcatcggataccaagcttgcgcaatcatttcccaacactggttggtggacaaagcttgttccatgtctggtgaagatgcagcacggaacggatgggaactcaaatcggacggcaggaagctatccgatgaacaaagtgcgctgatcgcccggcgcgacatggagtttcgcgtcaaagacaacctcgtcgaactcaacagattcaagaacgttttcggcgttcgtatcgcgctgttcgtcgtggagtctgacgatccggactactacgaaaagccgttcaatccggatggaatcacgcccggctcctacaagggaatctcccagatcgatccatactgggcaatgccgcagctcaccgctggctcgacggcagatccgtcttccgaacatttctatgagccggatttctggattatcagcggtaaaaaatatcaccgcagccacctagtggtggttcgtggaccgcagccgccagatatcctgaagcctacatacatcttcggcggtatcccgctcacccagagaatctatgagcgcgtgtatgcagcggaacggacggcgaacgaagccccgctgcttgccatgtcgaagcgaaccagcaccatccacgttgacgtggagaaggccatcgcgaacgaagaggccttcaacgctcgcctggcgttctggatcgccaaccgtgataaccacggcgtgaaagttctgggaattgacgaaggcatggagcagttcgacacgaacctggccgacttcgacagcatcatcatgaaccaatatcagctggtcgcggccatcgccaagactccagccacgaagctcctcggcacttctccaaaaggattcaatgccactggtgagcacgaaacgatttcttatcacgaagaactggagtccattcaagagcacatattcgacccacttcttgaacgccactatttgcttctggcgaagtcggaagaaatcgatgtgcagctggaaatcgtctggaaccctgtggactccacgtccagccagcaacaagccgaattgaacaataagaaagccgcgaccgatgaaatctacatcaactctggcgttgtgtcgccggatgaagttcgcgagcgtctgcgtgacgatccgcgttccggctacaaccgactcaccgacgatcaggcagaaaccgaaccgggcatgtctccggaaaacctggccgaattcgagaaggccggtgcacagtcggccaaggcgaaaggcgaagccgagcgagccgaagcccaggcgggcgccgtagagggcgcaggcgcccctgttcccgccgctccacgcgggactaagcctctcgcgaaagcggccgaggaaggggccagcgaggtcgctgaaccgccgtcgcggccggaccccaaggccgagctgcggaacttgttggtcgatcttttgtcgaagctccaagacctggacgacattaaggcaccggatggcgtagacatagagcacaatgatgcgcctggcttaaagcgcacgtccaaacctggcgtgtctggcatggagccttcggtgttttcgtctaaccgcatcgtcgggcctcgtgatcattcggaactccagagaatcaaggtgaatggaataaccaccttgatcgaaaatccgcgcggaagcattcggcaaggaaaggatgggagttggcgagttcagatgaaacaccactacgggttcatcaagggaacgaaaggcgctgatggggatgaagtcgattgcttcgtcggtccgaatctgggatccaaacgggtcttcgtcgtcgaccaggtgaacaaggaaggtcagtttgacgagcacaagtgcatgctcggcttcaacaacatcaacgatgcgaagtctggatatctgtcctgcttccgtccgggctgggatggtctcggctccatccatgaagttgacctgcccgctttccgtcgctggctggcgaatggcgacaccaccaaaccattcgggggcgagtgatggcattcaaggcctccaaaaagcgcgagcgccgggcacctcttccagtcggaagagggaagcccataattccatcagcaggaatcgaggcctggtatcgaaagcagatgaaggatatttccaagctcatgatctccgactatcgaaacgagattgagaaggcgctgtcccagcctgcggccgaacggttcttcgccagcgacgaatccgtgaacgtcctgttcaagatgacccttcgaagcctacagcagcgatggagccgcatttttgaaggcttcgcggccaagatcgccccggagttcgtcaaccggaccgaagaagccgccaccgccgcgacccttcacagcttgtcggtggccggcgtcgatcagccacgagctgcgtataatgagagcgtcaggaacaccctggaggccgcaaccacttacaatcatactctcatcaccaagatccaagaggaagtccacgagaagatttacacatcagtaatgctgtctctgacttccccgaatccggaagagcaaggagcttccggcataactaacgcacttcgcaaagtcgggaagttttctgaagatcgaatcgaactcatcgcaagagatcaaaccagcaagctttacagttctctgagcgatgagagaatggcggaaaatggcgtcgaggagttcgagtggctacactcttctgccggcaagactcctcgccacacccacctggagaaagatgggaagaggttcaagctgaatgaccccagactttgggagggtccgaaagcagaccaggggccgccaggatgggcgattaactgtagatgcagaaagataccagtcatttgacatcgataggagcgctatatgccgttagttcatggcacttccaatgaggctcgttctgaaaacatcaagcgggaaatcgaagccggtaaagacccaaagcaggctgcggccatcgcttattccatccagcgcagtgagaaagggaagacggcgaaagattgttcgcctaagctcgtcgccgatcttcgcgccctggtggacgctctgtcgaggctcgtgaaatgaaccgcaagacgtgccggcgccgactcgtggtcgatgtaatcagggccaatattcacggcggattcttcagcctgaagtttgccgccatcgatttggcaatcatcggcttcgccatcttgatggcttttggccgataatgctgagaaaatctggattctgactaaaaattctagtccggatagccgcaaattaccgtttacggaaaatagcagtaatttggaaatcctactgccgcgaggctttaacagagccagttcctaatttccgatttagccgcatgcttcaaaagtatatagcctgggaaattagaagtaacgttccaatagaattcatctataagtaacgctataatataacgtcaatctatatactctagacgtattgaaattcaatttttaatcggtaaattggtaatttgaattagtttaggagttgaaagcctcgcggcagtaggcttagacaaatcccgtcaagtttccgagaccaaattaccggattttcgcggctgaggaaactggtaattagatcacaatacaaattataatgtaagttaacagtcgcggctacatctaattattgttccgcttatttacccttagatgtactgcgtatataatacagccatagtccacgactcttcgaattaacgatggcaaagtcgaaaagaaaaattgacgaaaatggatatatgaccatagagggctgcccgatcagctcttatggcgttttccaatattctgctggtcaactcggtcttccgggcgatccgacgcggattgtcaacgtatatcgcccggagtctgccgtcagcgatccggagtacatcgaatctctgaagaatctcccgttgatcgacgagcatgagatgctgtcgggattcgacgatgatgacgatagcgtggcccccgaagacaaaggggtggagggcatcatcacatccaacgcttactacgaagccccatgggcacgcggcgatatccgcatctattcccgcaacatgcagaatcagctggaaaggggcaaagaagacctgtccctaggctatagttgccgctacactgagcaacccggcatctggaacggaacgccttatgaagtcgtccaggacaagatgcgcggcaaccacattgccctggtaaaagagggtcgtgtgccgggggccagagtattggatggtctgtgttttgaccatctcagttttgatttcagaccatccgatgagggtaatgaaatgagtctcaagaaagccaagcggaagccccctgtccagcgcgtagggcaagctgctgactcggcggtcgaagagttgcgcgccctgtggccgaagctatctgcgtctgtccagaagttcctgggcgaagaagagcaggagccggagcatcaggaaggcgcagctccggccgaaccgaccgacagcgagcacctgaccgagcatccgactctggaaggtgctcagaaggatgacgaagagcaggaagaggagccttccgttgtcgatccggccgtggccgccgtcgagccggagcatcaagaaagcgccgcatccgaaatgtccggtgaaggcgaagtcgccgaactgatctctcaggtcaaagccattctggctcgactggagggcacggtagccgaaggggcagacgaagagcatggcgaaggtcaagatgtcgtcgagggcttggaggagcagagcagcctcagcggctcgcaaaccgccagcgacgatggtggtgagagcaaggataacagcgaggaacttcctgaaatggcacagaagaacgcgcaagatgctgcaattcgcggtctctatcgcgacattgctgctaaagatcgcctctacaagcgtcttagctccgtggttggtgcgttcgatcaccgagctatggactcggctgaagtcgctgtttacggcgtgaaaaagctgaacatcagctgtgcgaagggccaggaagctctggcgctcgacatgtacctgaaaggcgtcgaagcctcgcgcggcgcggccagccgtcaatcgaaagcccaggattcggccggttctgctccgcagtgtgccgagctggacagctacctgaagggggagtaactcatgttccagaaacaagtttaccgccagtacactcctggttttccgggcgatctgatcgaggacggcccgaagcgggcgcggccgggtcgaatcatggctctgtcggccgtaactccggctgccaccgccaccggccccaaccgcatcagtcgcgctttcggttatgccggtgacgtcagcgccctcggcgaaggtcagccgaagaccatcgcggctcgtgcttctgaagtcgtgatcggcggcgccaacttctttggtgtcctcggtcatccgaagcactatgctctgttcggttcggccggagactccctggctcccagctatgatctgcccgatggcgccgaaggcgagttcttcgatatggccaccggcctggtcgtcgaaattttcaacggcgccgcaaccgccctggacctggactatggtgacctggtcgcctatgtccccaacaacctggctaccgccgacaacgcgcttggcctgccggccggcgccctggttggcttcaaggctggctccatgccgaccggcttggtccagattcccaacgcacgcatcgttaacgccatcagtctgccggcccagtcggcggggaatctggttgctggcgttaccatcgtccagctcacgcagtaaggaggcgtcatgagccagatcagcaagacccattcgcgcctcgcaggccgcaatgcgaaacctttcgacctgaaaaacatcaccaatgacgccgtggcgtctctgcgccgcatcggcctggtattcgatcacgccgtcgtccaggaccagatcaaggccttggcgaaggccggcgcgttccgctccggctcggccatggacagcaacttcaccgccccggtgaccacgccgtccatcccgactcccatccagttcctgcagacctggttgccaggcttcgtgaaggtcatgaccgctgcacggaagatcgacgaaatcatcggcatcgataccgttggctcctgggaagatcaagaaatcgtccagggcatcgtggagccggccggcactgcggtggaatacggcgaccataccaacatcccgctgaccagctggaacgccaacttcgaacgccgcaccatcgttcgtggcgagctgggtatgatggtgggtaccctggaagagggtcgcgcctcggccatccgtctgaacagcgccgaaaccaagcgccaacaggcggccatcggtctggaaatcttccgcaacgccatcggtttctacggctggcagagcggcctgggcaaccgcacctatggtttcctgaacgatcccaacctgccggcattccagaccccgccgagccagggctggtccactgccgactgggcaggcatcatcggcgacatccgcgaggccgttcgccagctgcgtattcagagccaagatcagatcgatccgaaggcggaaaagatcaccctggccctggccaccagcaaggtggactacctgtcggtaaccacgccttacggcatttcggtttcggactggatcgaacagacctatccgaaaatgcggatcgtgtcggctccggaattgtccggcgtccagatgaaaaaccaagagccggaagatgctctggtgctcttcgtcgaagacgtgaactcggccgtcgatggcagcaccgatggcggcagcgtgttcagccagctggtacagagcaagttcatcaccctgggtgtcgaaaagcgggcgaagtcgtacgtggaagacttctccaacggcaccgccggtgcgctgtgcaagcgtccgtgggctgtggtgcgctacctcggcatctaacagatgcctattcaccaaaggccgggcttccggcctttgttcactatgactctaactcggttgtaggggccggttagggcataattactaggactacgccaatgactgtttatatcgtttcctccatgactcaatcggtgtcttacaatgcgtatgacacctctgatccgtccaatcctcgcctccagcgaaagattctgattcgcggccgcgcaggcatcgcatccgaaacttccggcttcggcgacatgatttccgacgaggccggacgtccgatctggaccccacagggcgattgtactgccgtgagcgattcggatttcgagctgcttcaggccaataagattttcatgcgtcacatggagaagggttatctgcgagtcgtgaagaccgacatcaccagtgaccaccagcggatttccaaagagactcgcaccatggagcgcgatggattccagcctctggatgctactcgcctgcagcagaaaatcaaggtgaccacagccagcgcttcccaggaacaagagttccggatttaaccgagggtttcggtatggtgattttcgacgaacataagtttcgcacgctgtttccggagtttgctgatccagccgcttatccggacgtgcgcctgcagatgtacttcgacattgcgtgcgaattcatttctgatcgcgattcgccataccggattctcaatggtaaagccctggaagcctgtctgtatcttctgaccgcccacctcctgtcgctgtccacgatgcaagttcagggcgcggctggaggtggcgtcactgccggtgggacccagggcggtttcatcaccagcgctactgtcggcgaggtcagcgtggccaagctcgcgcccccggccaagaatggttggcagtggtggctttccgggacgccttatggtcaagagttgtgggcgctcctcagcgtcaaagcggtgggcggattctacatcggcggtcttccagagcgccgaggcttccggaaggttggagggacgttctggtgatccctggtgcgaatcttctgcgaatggccttcggggtcatcggtactcaaattgtgaaatatcgcaagtttgagcagcgagtgaagaatgatcaagctcagtacgtttccatgttcgaggagcctttcgacctggcagcgtctgttcagcgagtccgacgcgatcagtatgtccagtttaatctggagttccaacggaattacgttatgatcttcgccaactttgagatggttgacttggatcgcgatgtggccggtgaccagttcctctggaccggaagagtctttcagctggagtctcaaggctcctggttttatcaggacggctggggagtttgcctggccgtggatatcggtgcggccaagctcactgatgacgggaaaccgactttctaggtgatgtatgtttgacggcgaactgatagcgaaactggttgtcgagttgaatgcggcgatgacatctgctcaagaggctttgcagttcccggattttgaagtcgtccagaaagctcagccgacccaacagggaacgtcaaccaggccgaccatctttttccagaaactgtttgacattcctcgcggctggcctgccaccgattggcacctggacaacacggcccgcaaatatgtagaaataactcgacagcatgtagagacgactttccagatcagttcccttcattggcagaatcctgaaataactcacgtggttacggcttctgatatcgccaactatgtgagggcttatttccaagctcgatccacgattgagcgcgtaaaggaactggacttcctcattcttcgcgtgtctcaaatttccaacgaagcattcgagaacgacaatcaccagttcgaattccacccaagttttgacatggttgtaacttacaaccaatatattcgcctgtacgaaaacgcagcatattcggccgatggggtattaataggcatatgagtctgaggcgcgattcagagctaatcgccgcgcacctccagatgttaagagccatgcgcggcaggtccgtttcagccggatggtattccacggctcgatatcctgacaaggcaggcggatcggtcggaatacaagtcgcgagaatcgcacgtctcaatgagtacggcggaactatcgaccatccgggcgggaccaggtatattagggacgccattgttcggggtcggtttgttggcgttcggttcgtcagaaacgactttccgggagaaaccgaggtaactaagcctcacagaattaccatcccggctagaccgtttatgcgatatgcttggaacttgttttccgcagatcgcgccgcaatccagaaccggatagccatgaggctggccagaggacagatcactccagatcaagctcttgcccagatcggcctggcgttggaaggatacatagccagaagcatcaggaccgggccatgggtggctaactcagcatctacggtcaggagaaagggattcaacagaccgctggtcgatacggcgcacatgcttcaatcgattagcagcagagtaacataaccaggagatcatccagtgatcagtcagagccgttatatccggatcatttcgggcgtaggcgcaggcgctccggtcgcaggccgaaagctgattctgcgcgtcatgactaccaacaacgtcatcccgcccggaatcgtcatcgagttcgacaacgccaacgcagtcatgtcatacttcggcgcgcagtcggaagagtatcagcgggctgcggcttatttcaaattcatcagtaaaagcgtgaattcgccgtccagcatcagcttcgctcgctgggtaaacaccgccatcgcgccgatggttgttggtgacaatctgccgaagaccatcgccgatttcgccggcttctcagcaggggttctgaccatcatggtcggcgcggccgaacagaacatcaccgccatcgatacgtccgcagcgacttctatggacaacgtggcgtcgatcatccagaccgaaatccgcaagaacgccgacccgcagctggcccaggctaccgttacctggaatcagaacaccaaccagttcaccttggtcggcgccaccatcggcaccggcgtcctggctgtggcgaaatctgccgatccccaggacatgtccactgccctcggctggtccacctccaacgtcgtcaacgtcgccggccaggctgccgatcttcccgacgcggccgttgccaagagcaccaatgtcagcaacaacttcggttcgttcctgttcgccggtgcgccgctcgacaatgaccagatcaaggccgtgtcggcctggaacgcggctcagaacaaccagttcatctacacggtcgcaacttccctggcgaacctcggcactcttttcaccttggtgaatggaaacgccgggaccgccctgaacgtgctgtcggcgactgctgccaacgacttcgtggagcagtgccccagcgagattctggccgccaccaactacgatgagccgggcgcttcgcaaaactacatgtactaccaattccctggccgcaacatcaccgtttccgacgataccgttgcgaacaccgtcgacaagagccggggcaactacatcggcgtcacccaggccaatggccagcagctcgcgttctaccagcgcggcattctgtgcggcggtccgaccgatgctgtggacatgaacgtctatgccaacgaaatctggctgaagtcggctatcgctcaagcgctcctggacttgttcctgaacgtcaatgcggttccggcgagcagcactggcgaggcgatgaccctggcggtgctgcagccggttctggacaaggcgaccgccaacggcacgttcacctacggcaaggaaatcagcgccgtccagcagcagtacatcacccaagtcaccggtgatcgccgcgcctggcgtcaagtccaaaccctgggttactggatcaacatcaccttctccagctataccaacagcaacacaggcttgaccgagtggaaggccaactacacgctgatctattcgaagggcgatgccatccgcttcgtcgaaggatcggatgtgatgatctaatggtttgcggcggactcgatccgccgcgaccttccataaatggagtgaggaataagcaatgatcaacatttctgcgttcggctcgatctgccagttcacggcaagcagaactttcccgaacggattcaccgtcaccgagtttgccgacgatgcggaccccatcgacagcccgccgttcactgcggccgataccggcgtcggcctcaacggtgacatggtagtctggaaccgggcgaacatcctggaagtcgtcgttaacgtcattccgaataccgagggcgagcgcaacctggcagtcctgctggatgccaaccgcaccggaaaggacaagtcgggcgctcgtgatgtcgtcggcctggtcgtggcgatgccggacggcagcaaaatcacctgcaccaacggcaccccaatcgacggcgttctgatcaacgcggtggcaagcgtcggccgtctgaagaccaagccgtatcggttccgatttgaaaaagtgatcaaagccggtactagctgatgaagaaaattccgctgacagcagtccccaatcaagcgatctcatttaacgccggtagcagctattggaagattcgcctgtaccagaacatggacatgatgaatgccgatatcagccgcgacggcgtgatcgtttgccatggggttcgctgcttcggcgggattcctcttctccagtacagccatcagtaccgacctgactatggcaatttcgtcttcgaccgcgacgccgattggacattgttcggcgacggcatcaacctgttctatctggacggcgccgaattcgccgagtatcaggcgcttgccacgaggaaagaatgagcacatcaacgatcagaaccgggacgaacaacgatatccttttggacgacaatggaaacatggttatcctcagggatgtcgaagcgtgcgcccaggacgttcgggcggcgatgctcatgcgcaccggcgaaaacattttcgatgtgaactccggcgtgggatatttcgaatacatcttctcgccgcagaaaagctatgatgacgctcgcaaatccatcgcggatgcaattttatcctcgccggatgtgaccggcatcgagcagcttgacatcgacataaccggggaagtcttcggcgtcgatgcgaaagtcatcaccatccacgggcctgttaccacaggagtttgaaatgagtaccatccgcatccaatacgccaacggcacccaactgttcctggacggcaaaaatccgccgcccctggacccgctgccctcgtttaacccgtctgtcgaagatctggaaggcctggaccgcgaaaagaacatcgacaagggcgactcctcgccggccggtcttcccgttcccccggtaaacgtcgattccaatgtcgacaacggcggaaccatcccggctccggtatcgaccgacgctgctgcggccgaatcggccccagaaggcgcccaggaagctcctgcagcaggccaaggcgacgagaaaggcgccgaggaagccccgactacagccccggtagaaaaggccgaggaaacggcctcgccggccgctgaagaggaaaccccggctcccgccaaggccacctctcgcaaaaccaccagcaagtaaggactcgacatgatcaacgtcagcggcttcggcacaggaattgtaatagtttcagcctcatcgttcccgatggggttttccttgtcgaagttcgctgatgatgagagtccgatatcctccaaagagctggagccgttcggatatgagatgctttatgacggcggcctattcgcctttgacaaggctgctcctctggaagtatctgtatccgtcatcgcagggagcgaggatgatattaaccttcgcatccttctcaattccaaaaagggatcattcagatttcttccgggcagcatcccggatatgacgactctcgtggccactcttcctgatggcggccgcaccgttctgtccaatgggactatcatcaagggtccggccatcgacaccatacagaacaccggacgacgcaaaggcaacacgtacacttttgttttcggtagctatcttggcgcccagactgcgcgtcaagccatttctaacgttatccaatcggtgctggaggtggtctgatgttggggattttcaccagcctcctaagttcgcgatctttttcgattgtggaccaaaacacaaaccagctagttgctgcggatttgaggataagccgggtcaacacccggttttcttctgtagggcaacgccacatgctggaagatggtacgaccaagatggattccagaacgatccaccctatggaaatcatcgtcgaagtattttgcccttcaattgatgtcgtcgatcagatcaatcaattgctcctggatcgcgacacactgtacaaagtcatcactcgcggcatgatattcgaacggatgatgtgtaccagcgaagcgctcaatcagactccggatatgatatcggcgactcctgcgcggctgacattctcccaagttctcgtccagaatcccaagcctataatgttcagaaatgcaggggactcttctatgatcgaccgagggctggccctagctgaagacgtggttggctcggccggcgatctgttcgactacgcagtaaacggcgtccagaacgccgcagacttgttctgaggtgccaattgaactctttcctcaagtctattctcaacacgcccactctcaccatacgcaatgatgttaccaaacttcctgtctggaagagtcttcaagtcaagaaagtggaaatttactcgccggcttccgtagtgtcgaaacctctggcgacgaaagaccagacggaagctcaagtgtacaccgaagctctggacattgatgtgaagaatggaaagatcatccaaccggtgcgactccgcatcaatgctatctgtccggacctgtccaccgttgaaagtatcatgaacgctttcaatgataacacctcgactttcgctatcacttctaagtcgatattggccgataaaatggccatcatggcgctcgatgtagatcagtctccagacatgttgaacgcggctgagatcaatatggaattcgagcaggttgagcctccagtattgaatgaattcgatcctgcgttccctcaagatagtccgacttatggggtacagattcaatctctttctgatgctaatttgctggatttgggcgccatcggcgattcgatatcttcggccgcaaaatcgctatataatcgcgtgaccagctacttctgaggatgtatcatgcttgaaatcaatcttcccgatggccgtcaaactcgcgtacaaatcgaggcgtggtcggcattggatggctgggacctccagcgccgtttcgtcgaattcgctgtcagccaagattccgacttccgccgctctttcaccatggaaatcctgggctatgcgaaagtgctgcttggcgacgatgacgccggcattccgctgaccaccgcggcagtcatcaacaaccacctcggccactggaagaacgtggaactggttttcaactctgttctcaagcacaatggcatcgacccggccacgcacgccgaccggccggactattgggaacaagtcggatcgcagatggccatcgcatttctggccgaggcgtccaagctcattggtccagcaatgaagatcgccgaaggactcgccaacaagccggagtgattcatgtctagtgatttggacgaattcatacttcggtatgaggccgatactgccagagccgagcgcaatctggagcgcctccagaaccagatcaggcgcgtgaacagcgcatcgacgagtggccttcaggatttgcgccacttcgcagacggcgcggccaccgaactcggcagagtcgttccgcagattgattctgtgacgagcgcaattcgcggaatgaacgcgcaactggcaataggcgccactggcgtggccctggtcgcggccggcgtcaaggcgttcatgaacaccagggaccagtacaatcagcagcgcatccaggcgatggacatcggcatcgccccggcacgcttggaagagtaccagagaaaattcgttcgccagtccggtggaaccatcagccgcgagcagggcgcggagatgaccaaaaatctggcagacactttccggcgtgcttatcgcgatatcgggcgagtcggcccggaagcgcgaattctgcgtatggccggcgtcgatgtcgggagcttccaaaagggcatgcggccgctcaacgacatcatcaccgatctggccacgaaaatggccaagctgaagccggacgaaatttctgcctacgctgatgcccttggcgtctcgcgagattacctgagcaccctggcgaagatcggcccggccatgggaaaagtcactgagatgacgactgcggaactccagtccagggtccagggcgagtccaacatccagaaattcaacgatgccctggcgaatctcaaccagacgttcactaccctggaaaaccgagtcggcgaaaagctcgcgcctgcgttcaccaagctgatcgaaatcatcgacaagatagtccaggctattcccaatgaagtggaaagcttcgcgaaggacaccaaatcccgttgggaagatggagtgctcgggaaggcgaccgttggcagtgatatcctatccctcctcagccccggcgccctgctcggtcgcctggcagcgtgggggactcgtcgcggcatggaagaatcagggctcatcgacaaggacaaggttcccggcgctcaaaccagcgaagacctggccaagaaacaagaagaccaggacaaggctactaagtccatgaaagagctagagaagctggctgaccagaccacgaagtctaccaatgattttgcggtggcgatcaacatgttcagtggcgcggtatcgtcgttcgcgaatgccgttgacgagcgccaagcttgggcagcctgggcgggggaaattggtcgggcggtcggcatgggaagcaccgcgccgacttcgcgggccaccggcgtctatccgcacgcgatctatgatcagtcgaagagtggcgcggccggacaagtcttcggcgagccaatcggcgcccagtctcttcgcaatcgcatgttctcgccgcagcgcaaggcagagccggtcaccgttccatcgtacatcaacgatatcatcaaagatgcttcgaagatgtacaacattcctgagctggacatcaagaaactcatatacaccgaaagccgattcaacgccagggccaccagcgaagccggagcgaaaggcctcatgcaactgatgccggaaatcgccaaggcgtatggtatcactgacgtatatgaccctcgccagaacatcctcggcggaacgcgcctactgcgtgaaaacctagatcgagcaaatggcgacatgcggttggccttgacatactatcatggcggactcgatccgaagaactggggcccaaggactcgcgcatatccgggtttggtaatgagcgctccaatcgagctgatggaagaggctcagcgcaagcagaaggctgcggccatgaccgtcgccaacgagacgttcgccccggaaggcggcgacatggacattcgtccctatgatggcgggcgactggaaaccccagaccagggcaagaaggaagatgagcgccgcgaagcccgtcgatatgacgacagggttgtgcgaccggaaattcgcatcatcgaccgcatgccagaccgcagcgacggcgaaatcctcaagatgtctaggcgtcaagaggccgaccgggcagactctggattccggaagttcccgaatcaggttcgcggcgagaccaagcagaacatccaggcccaactcactgccggagccatcgcgcaagtgatcggcgttaaccccaaccagatcatgcgccgcgaaatcagccgttctgacttgctattcggatacaaccaagccatcctgggcaagcagcaggagatcaaggccgccgcgaccgaagccaacaacgtattcctgtctccagccaagctcgccgaagccactgccaaggtgaacgccgcatcgcgagaaatggatattctcaggacgtacggcgagcaacttctgaagagcgctccagagcgcggccaggagctgaccatcggtcgaatcgatatgttggtcaacgttaccggcgcgaattctccggaagaggctcgcgagatattcagcaagcagactgcagaccagctgactacggcaatccaagatgcccaaaacgattccgcaactaagatactctactgatgaaaaagagaattctgcgagtaacattcaacatgccttatggacccgaagtcatccgagaggatttggatgttcgggtccggatcatgaaggctgcgttgcggattcagaaccgggcgactatggaaattttcggcctaaccactcagctgcgtgagtctcttctgtcacagttcaccgcgtggaagcaccggcaacgtcaagtcggcagggaagacgaattgatgatcaaagtgtcggtggaagccggctactctgaccaggggcgcgagcaagtttccagagtctttgtcggcgaagtggccattgtcgatatcatttcgccgccaccggacattggaatccgcatccagtgctacaccaggcaaatcgacaggacgaagaccattcgaaatatgccgcccgccaacacgacgttcgtcaagttcgtcgagtggggcgcgaacgaaatgggattgaacttcatctgcgataccagttacaacgatcaagttctgaagaatccgggccggtctatcactgtcgcgtcggcaatcctggcgtcgattcaggatatgtacatgccggacgtggccgcgttcgttgatgatgacatcttgatcgtgaaggatcgcgataaagtcattcgccctgatgaggtgaccaacgtcaattcgttcgttggaattccatcttggtctgaatggggcgttgaattccagtgtctgtttgagccatcgattcgcgtggctggaggcgtggcggtcgaatcgctcatgaacccgagcgtcaatggcaactatgtaatcactgctctggaatacgatttggccagtcgggatcggccgttctatatcaaagtcatggggagcccagcagcataatggccagggaaatcaaaccgttcaacatgttcggcgttcactatacttcgcggcaattctctgctgccgatgggctcagcatgatgtcggaaattcagagtgtgccgccagaagaactgctcaagggaaccagtgtattggcgcatccggaagatcatccggaaggcatctggcttcccttgaccgctgcgaacatcaatctttatgtagttgatcgggcgaaagtaatagctcccgtacaagttcttgcacttctgtccgaagtggtaattgactggaactttggtttcctcaaagactggaccggagtcaagattccatccagatttgtcgaagatatcaaaagcgtgaagacggcacattcgccttctgtagttgcgagtttggtagcgaacggctcagcctctatgcgcgagttggaagagtattattcgactcaagatgcatttaagatgatagacatcatgacggcgaagagcgtgaacgaggccttggcgtcagaggcatcgcacaacagaatcaaaaagggataattcctaaccgggcctgggaaggctatactagacctgccaaatcagaggctttcccatgtccaatatttctctaacatcagcaaaagctcccgacagaacgcgactgatcgccgctcttgacgctcggtcgcgacgggatgctctagatttcgaagtaatgataccggctcaggttgttcaatatgaccggaccgagaatatcgcgacgattcaacctctcatcacctgggttgacacggaacacaatgccgtccaaaggcaccagctggtggatattcctgtaatttccatgggggctggcggcttccacataagtttcccgattcagcaaggtgacataggctggatttatgcggccgaccgcgacacgtctcagttcctggagtcgttgtcaatgtcgaagccgaacaccggccgcatccataagttcgagcacggcctgttcatcccggacgtattccgtcgatacaccatcaattccgaagattcggccgctatggtcatacaatcgacttctggagcgaccagaatttcgattcgcggcgataacatcaagataactgcgccgtcgaacgttactgtggatactccgcaggcgaacttcaccggcaatgtgactatcgctaacaccctggtcgtaaacggcatcaacgtgaacaaccacggccacctcgaaaacaacccgcctgatgcccggacgaaaggcggcatggttgcttaaggagattttcatggcaagttttgatttttctgatttaacagcggggggtgtaatggctaactacaactacatcgtcgatactggtgtgatagtcgcagataccgccgacgttctgagcgacgttgaggccgagttccgcgccgccctcggtgccaatatcaacttggccgcgagcactccgcagggatcgcttgtcgcggccgaggccatcgcccgttccagtgtcatgcggaatgaagcgcgaattgccaataccataaacccgaacgtttcattcggaacgttcctggacgcgatctgtgccttgatggggatcgagcgcggttctgatctgtcaaccttcggctatggagttcaagtcaccggccgcagccaaacccgcatttccaccgggtctagggtccagactccggccggcgcgatcttcacagtgatgagcgatgtcacgatccctgctggtggtgtcgcgaccatcgatatcaaatcgcaggagtatggcaacattcctctgccggtcgggaatctcatcatcatcgacggaacaattggatggtccggagcaaaagtcatcacctccactcgcgtcgatccgggcagccgccaaatgagcgatgcagagttgaagaatgcccgcgttaatcgattggccatccaaggtcgcaactcgactatggccatcaaggcgtatgtgagcgccgttccaaacgtcacgtcggtgaacgtaatcgagaacaacaccggcgccgttcaagtggtgaatggagtctcgtttacccttccgtatgctgtttgggtctgcgtcgccggaaacccggataaacaagcagtcgccgatgcgttgtgggccgcccataacggcggaactccatgggactatggtgcgacgaacaacggcgtcccggtggacggtccgaatggcgttcctgtgcgcgatccggcgtccggtcgaaagtatgtcgtgaagtggaccactccaattatgtacgatggatatgttaacgtaacagtccagcaaggttcctcctctgtagctccggaagccattcagaacgcagtggtcaattacgcccaggggaaagtggaaggggaagaggggctggtggtgggcgcgagcctgtcggcattcgaagtcgccggcgccatcgctcgcgaaattcccggcatctacatcaaactctgccaggtcgcgtgcgtcgcggctggctcgccggctccggctccgggcgatttcacttcggaatacgtcatgagcgcattcggccaggctaccatttccgttggtaacgttcgggtgactttcgtatgactctgcctgcgtacaattcggacatccaacaagctctgaaatggctccataaccaggcgcctggaatcaccggcctgatccagagaaaggcgcaatggtatgacagattcagccgccaattctgggccaactgggagcgcgacgttttccacttgaaaactgccaacccgttcggccttatggtttggtgcatcatcctcggcacgccttcgaaagggttcggcctttatccaaaaaacagttcttgggcattcggtcggctacgccagaacttcatctatagcggtacacaagttccgccaccggcagacgcatcgcctggcggcaacttctacggtggcggcaatgccgaaattctcaacttggacgaaatcaggaaagtgcttcagctaagatatgtagcgctgatttctaacggctcgattgcatatgtcaatcgcatgcttcgttacatattcaatgatgatgagccatgggacgaggcgaccggtctgtacttctatctcatggactcaaccggcgagaatggccctgtggagaacttggcgatatatcggaaagattgggaaggtatggtgctgttgtccagttcgcccagagcgaaccacgtgctgacatcgacccctgccagcgacgccgattggccgggagtcgatccggccgcgagcggtattccggtaacggtcgaaacggcgtccgctacggccccggacggctccgctacggtgtgcaagcttactaagccggccgggagtaccgcttacgtctccgcgccgatagatgggccgctggggtccggtagcactgtaacgttctcgttcttcgcgaaagccggctccacccgtttcattgcaattcagtcggctgccgatttccccagtcgagccgatgccgttttcgacctggattccgggaacgtaatcagcgatcagatgctggacagcagcgtggtaagcgcccgaatgattcgtctggaaaatggctggtggcgttgcgttctcacgaccaagaccgtcagctcttcgttccgcgctgcttacgtcgctccggcagaaaccaacttcagctggattgattcgaattccagcgcggagattgacgtgcttatctggggcgctcagatcgaactgggtgatactccaactggatacttggaaactaccggggcgcccgtaaccatgaccgattatgttttgcagaacgcccagaccggaacagtcaagttcacacagccccttccgaccggagtagaagcgtattggactggagactggaaaggcgggactgcagcagaaccggccagattcgcagtcgggaatgggactcaggatacgtttactctgtcagaccccgcatacatcggcctacccaccagtggggcgttcaagctagaatacagggttggtccggcgcttaatctgtcgccgcaattgatcaacctcatgaatgaccgggcagttggtattatgccgacttgcgccggttgcgatgtcaaagtcattcaggagtaatgacgtgatcacacccgaactgatccccagtccgtttgccgctcagggcgataaagacccgattccacaaacctcctccactggcttcgcaaaccttctcgacggctatacgccggactacgaaatcagcctggcgtcgaacaacccgcaggccaaagcggtcgagcggaagattcaaaaccaactcttcttcatcgctacccagaacgcacaggcgtggcagcgacaaatggcgccgccgtggtttcagggcatgcctggcggctacgaacagaatgcagaagtcgtgcgcgtcggaaatgacggcataatgcggcgctatcgttccatggtgaatgccaatgcgagcgaccctctcagcagcacgacttgggaagaacaacccgcatggtcggcgatgcgctccaacatcccgatgccggccggaggcccaggcctatcttctggcggagaagtcatcacgaccggccgcaacttcaacgacctgttaaatgggacgtgggagttcttctctgattcagtggttatcgcttctcagaatgcccccgtatatccggcttccgctggtgccgctgctggcatgttggaggcgaaatcttgggtgtccggagccaatacgttctgcgtccaacgctacactgatcgcgtcgggaacgtcgctgtgcgcgggcttaatgccggagcgtggaccaactggatgtatgcggtaaacgtcatggcccttcaacaaggtcgggtcacctatggagtcgcggccggatcggcgaacgcttacacgttgacgctagttccgcagctccaaggcggcctggtggatggcatgattcttcgggtcaagttcaacaccatgaacaccggcgcctccaccatcaacgtctccggactcggcgccaaagccatcgtcggcgcggccaacttccctctcaccggcggcgaacttggccaaggactcatcgctgagcttgtattcgacgcagcaggcgaccgctggagaatcctcgcaggcgcgccacgcatccaagttggcaacgccgatcaagattaccaggcccccagctggaaacaggtgaaggattacgtcgcgtcccaaaagctgactgaagtggactgggctgacgtcgtcaacaagccgaacgtcgctatccaagacactacgccgtggttcgccaatctggagttgtctgacgctcggcctttcatcgatttccacttcaacaacaaccgcgccaaagacttcgactatcgctttatctctgaagctgatgggtcgatggcgttctactctcgccaggggtcagctggtcctacccaggatatcctgttcagcaggtcgaatgttacattcctccagccgcgactggatgttgcgaaaaacctcgcgtacatcgcgaactctggccccctttggcagaacaccactgccgatcagcctggttggaaattcaccttcgcacaaggtgtggacgccaacaacaacgcggttatcgcagtcaataccaccaatccggacggctcctatcgctcacagatcatgcgatgggactgggcgtccacgaacgtcatattcaacaatcgtccgctctttgccggtcaatacactccttgggattctggaaactttgatccctccaccaagttgactgtgaatgccacgaaccaaatcgccggcccgaccgggattcggaatacaaacggcaacaccggcaacatgaacacatggggctccagttccacgacggcttcatacggaaacgctgctcttcaaatcttcgggaaaggtggtggcgagcctgccgcgctttatttcgacaactcccagacaggatggtatctggggatggacaaggatggacagctcaagcgggccggctggtcgctcggcaataacgcctacgtgattaccgacgaatccaacattcgtttccacgtgaattccatggctggcactcctgtttggggcggaaacgaattctgggggccgtggaactttaatccgaacaccaagctgaccatcaaagccggcacccaggaaactagcagcactgcgatattcagcggaactatgccattcgctccaatcgcatcgctgtccgattattctcaggcccctttgacggtttacaacgcgccaaccggtccgtctgcaaaaccggccgtcatcgcgttcattcgtcctggcaactggggcgcgttcttcggcatcgataccgacaacaagctgaaatggggcggcggatcgctcggcaacagttccagggaaatcgccgattccagcaacatcatgaatctttgggcggccaacccgaccgcgccgtcctggaacggccaaaccgtttggcgatccggaaactttgatccggcgacgaaagtggatttgaacgccgcgaacgccaccaacggcaacatggtcttcaaccgcatttctggaactggtagcggcatagcttcgtcaggtcgagttggcgccatcaacctgcagaatggggcgcattcggggcaagcggcagcagtcactttcgagcggggcggcagtaccttcgtcaacttcggcttggataccgacaacgttctcaaagtaggtggcggaaacctgggggcaaatgcctatccggtcatccacgccgggaactacaataactacatcaaccaggcgctggttcaggtgggtcttggcggagtcggttcctatggcatctttgcggttctggacaatgccgctccaaccgcgaccgttcaaccgggagtggttgtggacggttccattctcatctactcgtcttgcgccgcaaactacaatagcggtcaaaggcctgccggaacttggcgctgcatgggatatgtagtcaaccgggatgccaacactcctgactccgcgacccttttccagcgagtgacgtaaaatgaaatggacgcggatcagaaaccctcgttggctggatgaaacaaacatccacgccatggtgactttcgaggggatcggggaagttcctttcactgccaatccgcacgacgtggaggcccatggaagggccatccacgctgcgatcctgtccggggagcacggacctatcgccccggtagattcgacgcgggagaaggccttgcaggacgctatacgagcaagggaaaagcgggctatccttcgcgatacccgctggcccatagatcgtcacgacgagcagaggcggctgggtatcgaaaccactgacggacctgggctgatagcagctcttgtttcctggaggcagcagattcgcgattggaatagcggggatcggccgcgacttcccatggctctgaaaacgatgtttaaaaatcaggagtattgatgaaaatcacgaaggatattctgatcaccggaaccggttgcaccacggatcgggcgatcaagtggctggatgatgtccaggcggctatggacaagttccacatcgagtcgccgcgagccattgcggcctacctagccaacatcggcgtcgagtccggtggactggtgagtctggtggagaatctcaactacagcgcccaaggattggccaacacatggccgcgccggtacgcagtagacccgcgagtccgcccgtatgtcccgaatgctctggcgaatcgtctggcccgaaacccggttgccatcgccaacaacgtgtacgcggatcgcatgggcaatggatgcgagcaggatggcgatggttggaagtatcgcgggcgcggcttaatccagctgaccgggaagtcgaactattctctgttcgccgaagactccggcatggacgttctggagaagccggagcttctggaaactccggccggcgcgtcgatgtcttcggcctggttcttctggcgcaatcgctgcatccccatggcggaatccaacaacttctccatggtcgtgaaaaccatcaacggcgccgcgccgaacgatgcgaaccatggccagctccggatcaaccgttatatgaagaccatcgccgcgatcaatcaaggctcctgatattcgcccaaaagaaaaggccgcttattcagcggcctttttgctttccggctttgcctcttcaaccatcttgacttcaaccggcgcggcggactcttcctgagtgaccgaatccacatagttccctagtgaactcagaacgccgattaacagcgctcttactaccttgtccttgactgtctcgcctatgatcttggtcagaacggatattaactcttcccggagtctggggctgattcttggccgaaagcgcttgcgatgctctttgcgtttcatgtttagtcctctgtctgcggtcttctcctcaccccgataatggcttggggatgcgctgtgttaatcggaaggttcgggcgctattataactcgtcgaaaatgctcgcgcttaactgtttaacgatacgcaccgcgatattaaatcgccttctttctggccaaggaactctggcggccgggtccggtctaaggcctaatttgtcgacattaaaacgagaaaacccggatcgcctgtagggcaatgcgtccgggtttatttctatctagtgtacgctaggatcagtgacttccgccccacccgtccagccagcaatcgaagacggcgtgcctcggcttgtccttggcgccatgggagaagtgcttgaaccggatgacctggcccttgagatactccctgtcattccagcggcgctgtttctcgtcgtgggtcaggctggaggccgacacgttgaaagtgactccaggccacagacgttcgttgcggcagactaacgcaccgaccattccggacggcgacaggttttctgcgtggctggagcgggccgtgtggccaagttcattgatgaaagcttcattgttgttgtgcatcaactcttccacgtcgatgatctcagcttcatcgtagtcgtatcgcttgactttcacacaatgcccttccttggcagtcgagcgaccgaacttgtacagcccatcagcgcgcttgcccatggaaccttcgaatcccagcattgtgtggcggcgctcgacttcgctgaactgttcgatggaagtcaccagttcctgctcgaccaggtgaatcctctcatagccgaggcagtgacgaaggaagttcacgcgctcggccgccctggctaggcgatcttcggtcggtgcgcgaggatcggtgaaatcatcgaacacatggaaagaccagtccggctcaccgctgtggcggcgaagatcgccggacgacttctggaaaactttcgggtcgctgatgtcgccgcagaccagctcgccgtccaggccgttgaacagtttatcgctgaggtattcgtagatcgattgattgttctgccgcttgagttgacgagtcagcgcctcgccttcgaatacgaagcagcgaaatccatcgatcttcggcgagaaatacatcggcagttggccttccagcagcttcgggtcaaaattcgatgcgagcatgggtttcatacagttctccagaaaagaagcccggcgaaccgggctaaatggcggtaagccggctcagatggtttcgttggcgtggttcagttcggccatgatcgacgcatagcgctcgtccgactccttgatgaacacgccgtcgtacatgacgcctttgcgatccttgatggtgtcgtaggccgcagcgtagcaggcgagcatggtagtgtcgtgctcttccgtcacatcgaacagagtcatgacggccaataccaggctcttgatggctaatccatgatttccgcgtgccagcgcgccggccagatgtccgaggtgctgcaaatcgtcgccgtaggtgggatgaacttcgacagtctcgctgaagaccgatagatgatcgaacagattttcaccgagttgcgcggccatgatcgtggcaaccaccattacgtcgccgatgccgtctttcacctcgactggtttgttataaacccaggcttcgcaaacttctgcgaactcttcgaccaacttcaggaattgatccttggccgaagagcctttgatcaggttccggtcggaaccccatttaacaaccaggtcgtgaagttcgcgactcatgatttgttcgatattcattctttcgattccttttggatttgggattttactgcgttgattatggacgccgtgctctggcgcgatccatccttggtggtgccgaagtagaaggccattaccgacttcagctcggcgaaccaatagccgatgatggtgccgatggcgaccgaggatgttgggtccatcagagcctcgcggccgaatgtgaagattgcgatgatgatgagaatggagcctgtcagaagagcgaatgtaatcgccgggcgaacgaaatcgttctgctgcgccgcaagcctcctcgcagaatccctgtcggccgcctctgcggcgaactggctaagctcggcctggagctggttctgctcagactgaaggcgattttgttcggcttgaatcgcaagctcctggagacgaacgcgctcggcgctctggagttcggcgagacgcgctagagcttccggattcgcgtctagagcgctagcgaccgaggctgggtcggccttcgaccccagcgccgtcgcgacgatagcacccacggcggcgcctgcaggcccacccaggagcgaccccagagccggggcagccgcgccgatcttactacctatgtctttccagtccatttcgactcctcaaaagaaaggcgccattacagcgcctttctccggccggtgattcagaactcttcggcttcggtcgcatcgccgacgccaccggcgtcactgcgaggctgttcctgcttgctgtagtccaccttcacctcgccgccgacgaacgacttgtacaggtcggccgcagccttgaagtgatccgggttcttcaccaggccttccagctcgaactggacgccggaccagctacccttgtcgttcgacatgcctacggtggtcatgcggaccaggttggcgaaagtcggcggggtgcgcaggccctgcggggtctgaacctttttctgggacagcgcggtcatgagcttcttcgaggccttgatctgcgaagacgacagggagatcagagcctggccgaaatcgccggtgtccggatcgatgacgatgacgtaatgaccacgggtgtcggcgaagtagtcagacttcttgtcgctgaccgaaccgtcttcgttcggcgcgtacaggcgtccttcgacttccttcaccttggtcgggtctttcatcatttccttgaagtcttcgacgctgatggcgcccttgaaaccgccctcggcctcgcgaccggcccagcggatgaactcgcggcggtacgcggccggaatgatcagcaggccggtcttgccgtcgtaaatcttgccggtgacggtgttcaggaacatgccggccttcgcgccttcgatgtacttcgggtcatcttcatcgacctggggagacatcttctgcagaacctggatgaaggggatggcataggactcggcatcggcgccttcgaagcctgcgccgtcatacgatcccaaatccatgaagtcgggaacttcggtagttgcgacggcgccgccaccggtggcaactgctacggccttggtttcttcggttgcttcggaagtttcggttttcttaccagccatgttaggctccttgtttgtcgaatttcagttatcgctaactgtgggtttataataacggaagttgcaactaagtaaagcaaattacatattaagatttgctctttttcatcttcggtttcgtgatcttggcctctttgtattcgtgcacgccgatgaaatctggcagctcttcgcccttctccagatactcgcggccgaacgcctggagggtctggtaatggacatcgcggttgatggtggcgtcatagccggcttcgatgatggcctcggccgccttcttcgcatcttccatttcgccgcgaccgaactcggccagaaccttggtcttgatgatgccgtcgttgtctgtgtcttccagccacttccagaacttcgatttgttctcttccttgacggaaatgatggccttcggctcgactttgaccgtgcgaccgtccgccagagtagtggtcttttgaccaagctcctccaacagctccggaatggtgttgcgcttgagggttttcagctcctcttccttttcggccagcgccttttgaagatcgaggatttcgacgtccagctgcgaagccttgtccaccaggttcagcagtcgatggccgatgtcggtagcttcgaccgccatttcatccatgacgccaaaatagtcgatttcgcccggtgcgttctctttcaggtattccgggatttcaagctcttgctctttcatgtccgcctccaacttagtgatgttcccttacttgaactaagtattgagtagatattatgccgcatcttccttgatacggctactgatttacatattaaatttcgtcgcgagtgctaacgtcagcctcaaacactccatcaacgacataacttgccaggttgcgcttccactccaagctgacctggattttctcgtcgatggaatccagacagatcaggtcgaagtacaaaaccgagttgacggtgccgattcggtgatttcggtcttcggactgcatccgcaactcgttgtcttcgtcggtcgtgtagtaaatggccacgtctgcggcggtgagcgtgatcccgatccctgctgcggccgggttgcccaggaacacctggacgcgcttggcctggaaatcgtcgatcaatttttcccgctcggcctctttggtctcgccgtagtatgtgccaaacgaaattccttgggcctccagatacgccttgatctggtcgatttcctgaatgcgcatggcccagatgatgatggagcgctccgggtcttcctccagcagaccctccagaagatcagtaaacacggcgaatcgcgggttgtcttcgggcggcaggatcaccggctcgccatagacgttgatatagccggatgcaacttgcttgagcttcgaacgcgctgccgcagcatcgaaagatacgtccagcatgaagtcttcgttcttgagaacgaagtggtagtcttcttccacgcgctggtaaacttttcgttgctccggcgacatttcgaagtatatgcgcttgtacaccttgtccggcaggaatgggagtgcttccttcttcgtgacccggaaactgtgcggctcgatcagggaccgcagcttgtccaggttccggaataccgggcgcccacgctcgtctttttcgaccagttgcggcggcatggtttgcttcccttccagcttgcgcatgatagcgatcattcgaggatcgtcactgggaaccaaaacggaaaattcggccacgaacgcccgataggatttcgttccaagaattccatcgcgcaagaattggaactgcatgaacaaatcggtaggcgcccgcgttagaggagttccggaaaggatgcgacgggccacggccttctcacccagctttacgatctttttcgcacgcttggcttgcgggtttttgatcctcgtggactcgtcaacaattgcgcaaaccttgaaagtttcaaggaatcgcaagacttcatcatagccagcctggtgattgatggcgtcaacgttgatggcgaagacgcgaagaactttttcatctgcgaacgtctcggcatacagacgatccaagcgcgccctggcctttttggaagtcggtcggccgcgccaatccacgctcaaagtcttgatcgcgacgtgggtgggaatctcgcgcagaatccagttggtgtggacgcccttgggggcgacgatgagcagcgcgtccacgcgcccctgtaggaagaggcgaacggcatcggccaaagtcgtccaagtcttcccggtgccctgctccatcaggtatgcgaaattccgtttgttcagggacgcggccagggcattgaactggtgctgcatggcctcggtcttcatgcccttgacgggatatgttttggctttcatttgttctccaaatcggcgaggaactgaacaatgttatccagtccttctgcatagctcgcaatttccaccaagtcgcggctgttaagctcgaacaaatcgagcatgggattcagcagcagccaatcggtcccgatcttggccaggacgaagccccggccgccccagccgatccgttcccgaaggaaagggatttgcccaggctcgaaacatctggccattgggcaggtggaggcgcgtttcggccactcctccaacgccttgaactcgacccagaactggacacctcgacgattcaggcaaatcgaatcggacataccagaccgccgcgtctccagaaagtcgatcaggattcggccgagtgagcgttgcttaaacgcattcgccgctttcgtttcgcgatcattcatcgccttcgccctctttggaaactttctctgcttgcgctgccagctttgctttttcgcgttcggtcaaaatcctcttgacggccttcacgatgaacatatcgattccgctgagcttccagcctttgatgaggaaccaagagcctgtcggcgttccttcggcaatctgctttccgtattgcagatatttttcaggcctaattctgaaacgtatcggctgatcaaccgagtcgtcaacacacatgatgtcgaggaactgcgactggcccttgtacaccgggtttttcccttgatctgccctcttcttctggcgaatcggttcgttctcatcagacagaacttttttcaccatcttgacaatgaccaggccatcgtctccatcgcggatatcccgaatgttctggatggggtttccggaagttactccaaccaactccggattgtcataagcatgaccccagagcgtgtgagcttcgttcaaatctgcgaattgaacttcagaattcgacagactcgcggcgactttctcccaatcctgaagcgtcttcaggtgggttccggccagctctttatattgagctttcagctccctaagatcggcctttaactccttcagatcggccttcaacagtttttccagttctttgtcttggctgattttcgccgaaagaatctgggcttccagcgctgctacatcagcagccttgtcctcaacatcctgtgccgatatcgggcaattggccagggcgatcctcgcggccttgacgtcatcacgaaggcgcaggaacttctctgccttcgccgggccgaagcctttggcgttcatgatgccgccgatcaggcgtccgtccgccactacccagttaagttcggaatgctccgggtccagggccgtatattctacgccttccttggccaattcgcgaaggattgacacagtttgctggtcgtctttcgccgcccgaagacacgcggccgcgtattccaggcgatgataccgcttcatgtagcaggtccagtacgtcaccacggcgtagctgaccgagtgggagcggttgaatccccaggcgccgaatgtcaccatttcctgccacacacggtgagcatcgtccggggcgacgcctatggtcttggcaccctcgatgaacaattcccggcgcttgttgaagaactcttcaccctttcgcgcagacatggctttccggattgccgatgtctgctcccagtcgaactgtccgatgtccttgacgatggacatgatctgttcctgatataggaagacgccgtacgtccctgacagatattgctcgacctgcggaatggtataggtcacaggctcgcggccggccacgcgctcgatatacttggtggccataccagaagacaacggacccggacgggctagcgccgtgatgtggtcgatgttttcgaacgcggtgatattgatcgcgtttgcgaccgaacgaactgcctgcccttcgaactggaaaatgccggacattttgtcttcgttgagaacatccaggaccgccttgtcgttcaaaggtaagtcgtacaactcctgcgcagtcacacagttcgcgtcctggatgacgcccagagttcgaaggccgagcgcatcgatcttgaggagattcaaatattccgaatccggcttatcgagctgcgcgacgccttcagaagttaccgtacagaagtcgataacttcatcgttgcagaccaggatgcctgccgcgtgtacgccagagtgggatgggtgaatttcgaggtcgcccatgcaggcggacgcgatctcatacttttcgcggaagtcgcggccgggctgagttttttcgaaagtgtcctccaatccttttccatatcgttcgtccgccgacgtatattcaatgatcgagtttttgatgttgtcggtatcgtggaaggggatgccgaagcgctttccgacgtgagcgataaccgatgcggccttgagcgtgttgatgttgcccaacttcaccacgttccaagtgccatacttctgctggagatattcgaacactagatagcgatgggtatcggcgaagtcgatatctatatcgggaagatcggaccgggaaatgtcgataaagcgctggaagagaaggcgatgagggagcgggtcaacctcggtaatgccaaggagatagcagaccaaagagccggccgaagagccgcgagctgggccgaccagcatatgcttcttggcgaacgcgaccagatctgccacgaccaggaagtagctgtcgaaatctttcagctgaatctgcttgatctcttcttggaatcgatcctcatactcctgggtccattccttgatgtggccgcgactgagacggtaggcttgcccctcgcgagccagcgcgacgatatccccatccaggtggatcataggcgccttcgccagtttcacatccgccaattgttcgactaccgcacgagtattggcggcggcggcatcgaactcttcgcgagtcatgatgtggcgtaaacggctccacaactcctcttcggtggcgatgtggcgaaggccgaccgattcccgcaccttccaggccgacgcgaaatcagcatggtcgatggacggcatgtcgttgtaagaggtaattaccaccggctttccgaatgccctggccgtctccatagcgccgtgcgcggcgaccatcgacgcgggattgatgtcaatgtagtcgattccggccagatccagatgggcataggcctcgccagcgaatttgatgacgccgtcagcttcctggaattcttgcggagtcaatccttgattctggaccgacttggaagtcaagcggtagaacttcttggtgtccttggcgagcacccaggctttgagcttcagctctttctcgccatcgtcggcgcatttgatcgggatttccatgccgaatccgcgaggcagttctgccttggtagcggcttgttcccaacggacgtgaccccatgttccatcatcgacgatggcgacgaatggggattcgatctctttggcgcgctcgatgatctccgggaatcgaccatatgcggcgccgtaggagtaaccagagcgaacgcggagctgagggaaagacatcatgcggcctccattgcttgatacgcccgatacactcccatgcgcttgcagacttcgtggagcagccgcacgtcgtcgagcgcccggtgtttctgtacatatgggccgcagtagtgctcataaagatgttgcagccgcatgcggtggccgaacaacggcgccgactcttccacagtacagatatcgagcgatgggaaattgacttcgtccaggccgaacttgccgcgagccagatcgcaggtcagcatgaacttatcgaatggcaggttgtgggcaatattcgcgtcggctctggaaaagaagtcgcgaactttctggcgctgatcgaggaaagatgggtgcttgatcaggtcttcgttcttcaacccggtgatcttggtgatgatttcctcgataacgattccaggattgcagatgaactctacttcatccaaaatcttttcgccatcagttatcacgccggcgaattcgatgattctcggctgctttctcagactcaccctttggtggaacgggagtcctgtggtctcagtatcccatacagcgaatatcatgtttgttccctcttatgtcgaaaggccggctgctttcgcgaccggcctgaggagtataccgcgacggctgaagatttacgccttctgtccgtctttcggcgtgatgcggccggagcgcatggtggcgtgaacaaacgccgaatagttgatcgagtccaaggccgaatcggcatccttgaacccgctattcgccaggcgagtgagtttacccaccgtgtgcatcacgaacagggcgagtcgatgatcatcggcggtcttcgccaccaggccgttcgggaagaggatttccatgatctttccgtacatcaggtcattgcgaccataggtgctctggcgggcgcggaagacttctgctgcggcgtacagattgttgagaacatcttccgcgaaatcatctggatgggaatcatcttcgcccggccagacggattccatggcgaacggcgcggcgtcttcggtcgggtcttcgggctgagccgtttcagcgagcggagacggggctttcgcaaacgcctcgtcgagggtaggggcggagttcggggcggccgggaacggctcgcctgccatgtcgttgggcgcgctatcggggtcgctatcggccgcgacggcgaagaacggcgcatcgcaaccttccaggttcaggatgtaggagtcgatccccaggctattgtaggcatcgatgatgtcctggcgatcatcgaacgccgcgacgatcttggtgacgccttcgattttcttcaggatgtcgagcgcgactgcccgcttgaactgaggcgccggctcggtgttaccatacggccgcatgatgagttcatactcgcgatgttcggcgatgccgagttcgcggtggagcttggccctggtctggaaaaagtggttgtcggttcggccggtgacgaagaaaatcatgaggtcggcgtcgatggcattcctgatgcgacctacagcgtgcgggttgagagtgtccttgtcgagacgagaatgatactcgtcccattgtcgttccaaggctaagctcttgcggtggctatcgtcgaagacgcagccgtccaggtcgaagatgatgatgccattcttgggtttgcgttccatattcagatttccttggtggttgctttctgggtgacggttttctcgatgaacgtcccatcagaagtgaggcggaaaacttcgccgttctggatgaaatcgaacgattgcacgttcatcgtgatgcgaatggattcgctgccgttggtaacttcgacttgtgcgatgtcgccaactttctcgacaatgatcttcatgttacatggacttcccgttgacggccacagggttggcctcctgtttttccgatccccagaaatcgcggcgcagctcttcctgctcggccgagcgatccatccaggggcgatagaacttgcactggtagataggttccaacggaacatcaaccacaggaatctggccgggcttcgtctccagagcggacatgaaccggtcataggatttctgctggatttcctcttcattcatcaccttcgacccatagcgcgggaaggcgcaggagccggtggcgacgcagtgcggctggagtaggctgtcgaacatcggatagacttccagaaccagccggcgcatctcgcggaacacttcctggtattcaccctgggtccgaacgcacaggcgaaccttcgccatgtcactgagagtccgcagattgaacttggccgcgatcttcgtttccatgttggaaggaatgattgcacgagcgtcctggagcgacgcgccggcctccagcagcttctggtaactggtctgcgcgtcggctatggcatcgtgccacaggcggttcagctcttcgcgggcgtggtaggtcgggtcaggctcgccatttaccgtagccggttcgtcgaattcccagcggaatgcttccggctgaacgacggcgctgatttccagagcgcgactggtttcctgctggtaagccccggtgcgagtccgaacgagttgatgggtgaaattcttgctgacgccctcgatctggaaaatgaagtccacgaactcgaacggcgagcggatggtgtccagcatgtacttccagtggtcgagcttttcggcctcggtcatggtcgccgggtcttggccgcgcatgcgggtggacttcgtgcccaagagcaattcccaggcgttctgggtgtaactaatcagagaaatcttcatcagaaatcttccggaattggcgtgaagtggaatttttcggtgagagccagggccaggccttgggcttgctccctgttaaggccatactgctctatctcttccttgagcagttcgcaggcctccaggcgcgcctcatactcttcagcctcatggacggatgagaagacggctccatcagaggttcggtacacaagttcgatcgccatggtgacctcagtagcagcggatgatttcggcgcggatgtcgcgacggtcgaggtagtgctcacgaatcttgtcgcgggcacgctcggcctcttcgcggctgccgaacgacaggttgaacgacgtgaaaggcttatcatccagttcagcgccggtctgatacaggattcctaccagaacgaaagacggcgcggtcttcggctgctggtcggtttgcagttcgagaaaggacatagggagacctcttcaggatgatctggtgcgtacattaatagcgctcctgctgagcagctacggtttccggctcatagatgagcatgtcaacgatttccgggcactggcctttcacccagtcgatggccgcgaccagtgcggtggaagcggagaaagagaaagtgcggtaagactcatggatgtacggcgaccccatggaatcgcgctcggtggtgcgcgaaatgactgctttgatattaacgatccggcccatcttcggcctccactttagcgattatatcggacaggcttaacttctcgccattcaggaaataactggcgcgaaacttcctgtcgccctctggcccgacgattcgggccgttattgtgagactcccgccgccaagggcatcggtgtcccggaagaaagctagcagcgcccgcttgagcgctgcttcgcgaggatcgacggccattaacctaccacgttccagccgtgctgagcgcaccacacggcaccggtccctgcaggaagactattcagaaggaacacaggagtcaggcggccatcctcggtcatatggacgaagtagcgggcgccttcaccgagccactcggccttggcgatggcgcgttcgagattggccttggtggcgtaggtcttggtgtggttcttgtcggtggagaaggttacttcgcgggccatttgtcgattccttttggttgaagggtttcgcgtttcgatgagggaatattacgcccacctgatccagaagtaaagcacttttgtaaattacttcacgaacattttcttggccttctgataagacgaagaagtcatcaggcgctcgatgacgtccatgtcagaaaccagatcgtccagaaggacgttgcgccaggtagcgaaccggccgagcgagaagatgccggcttcatgggtgagattccagatcatggattcgcgctcgtcgcggccgagcggaacgattttgcctttggtctggatggtcggctcgccgtcctcgatgagatgccttttccttatgccgaaggccgcgcaaacgtaatccacatcccagtcgctgtcccattcgatggtttcgattttaccatctaaagtctccactatccccttagtgatggattcgacgatcagagtatcaccggtgatggacgctcgaaacgttcccactttaggaccagggaaatacacggtctggaagacatcacaggggatggaaagcttgtatcgactcacgatgatggaggttccttcaccgaatgacgggtcgattcccaggtccagccctgccgcagccagattggcgcggaacggcgcggtgctgatgatattcacgtggtcatcttgccggcgaagatactggaagaaagaggcgtcgaaaggacggctccaagtgatacgattcgcaagcttagccaccagctgctcatagtagtcggccggtgcgatccaacgcttttcagtcgccagattccagatggaccggtccgacaggccgcccgttactttcctggagtacatgttgcagtggtcgatgcgcggctgggaaatgaactcgccgtcgatgtagatagctttgtgtacagtgacttcgcggaacgggatgccggtgagttggccaatcactggcgagcggaatcgcagaagtgcgttgtggcgctccttattctccggcgtcgccgcgtcgatgatttgggcttgaggaaagcgatgcgcggcgatcagtccggcgagtccggcacctacgatgattactttctgatcaggaatcatgatgtgtcccttatgagtgtacaaaacttgagaggataaaaaagggacccattttcatgagtcccttgaagagctagacgattcaggctcagaggagcggcggcttactcctcctcaccttcggaaccatcggcgccctgatcttcaccgtcgtgctcctggccttcgtcatcggccttctcgtcatcgccctggccagcttcgtcttccttcgaagcgatggcaaccagatcgacccagcccatgatttccagcttgctcaggtagctgcgaaccgaagtgccatagagcagatgggccaccttctcgccgaaggattcgatttcgaccggctcaccaacggtgcagtgctcgttgatgtatgcgaacaccttgccgcgagtcgagaaggcctgcggagtgccatggccgtcgccggtcgggatgaagtgggtggcgcgcggacggcgggagccattggacttcaggtcttcgcggcgggcttcggccttcttgcggcgctcttcctgctcttccttgcggcgctgcttctcggcttcgcgctcagccttcttctgctcggccaggcgcttgcgctcttcttcgcgagcgactttctgagcttcctgggcggccttcttctcttcggcctttttggctcgctcggcttccttctcggccttcttctgctcgcgctcggcttccttggccttcgccttctcggcctgctcggcttccttcgccttggccttttcagcacgctcggcttccttggcggcggccttttccttcgccttctcggcgcgctcggcttccttcttctcacgctcggccttgcgcttctcttcgcgctcggctttcttctgttcggcttccttggccttggcctcggccttctcggcgcgctcgcgctctttacgttgacgctcagcggccttctcggccttgcgcagggaggctgcttgttccttggtcagctcttcgccttgggtctgctcgttctggtctttctgttccatgttcttactccgggaatgtttaaagggatggcttattggcctgtgaggggattatctctaaactaattgaagaagggaataccttagcctgaactttcctaaatattttctttcgggaaagtccagactccagggaacttatttatgttcgcgaagtttaactcttgcgcaaaaacaacaagtattcaactgcacgagttatgccagtatacatcaactgactataaggaattgacggtaagttttcttccagcattgcgactcgcttccattccgatccctgcgacttgtggaaagtcatcgcccaaccaaagtcgaatccgccaatggccttctgcgcctccagccgcacatcttcctcggccgaaaagctcaaaggattgaacttcacccagcgctcatagttcgtgccgataatgcgaactttggcaaacagcatttcatccggctcgtcatcatcttcttggccttcggggaccggcttgaagtccagcagaattgcttgctcgccgttcatgatgccatattcgtgctggttcccggtgcacaccagcttctcgccgatttccggttgtacacccttgtagccgaggatgcggcgcgccctggcgttcaagcggcggcgagtattgttgtaggcgcaaaggatcacgccatcgtcatccaggaacgtccgcatttcgtcgtccgacatatcgaagccagcccggactaggatatcatcatactcgcggcagggcaggcgtttgccctggcggacgaacatcgacgctcgaacgatattcccggcgttacgctcgatttcagtcatgactgtgtcgcagctatgttcgtggaaaacctgaacgccgcgcacagggggaacttggccaaagtcgccgatctccagaaccggaattcgatgcgccaacaagcgctcttcatcccactcaccggtcattgacgcctcgtcgagcacgaccaacttcggcttctcgtcgagcgagtctttattggcgaacatgatttcgccgtcttcatcctcgccaatcggccgatagatgaagctgtggagggtccgggcattgatacatcccttctcgcgaagccttgcggccgctttcccggtaggtgcgacgaagaccgtccagtccatcgagcagcaaagttcggcgatgatcttcgcgatggaagtcttaccagtaccagcgaagccggcgagtcgatagacctggcggcggtgcgctcgatcacaccaaccgcgataccagtccacaacggaattgatcgcgtcgatctgctggctgtttggccgaaaaccgaatcgctcttcgatctgatcgacggtgaagttagatgctgacatatttgcgttctccaacgctaggtttaattgaatcgagactcagtttaagcacgccgtccacagaccatccagtatcacgacgatacttgcggccttgcggatcgacatagaagttcttcgtgcgccgcagcagaacatagtgccaagcagctccaagtgcgtggacccttcctttatacggaaaagccttcgcctgctctgcggcctccttggctccagggagccagcgtacggtcgaaaggaccaggaccgcacccttaatagcctgggaagcggcgcggccgtcctgtgggctatagcgatgtctatcgaagtctacccagtggtggttgccgcgccggagcttgaccgttcgggatcgcccctcgaacaccaccgtgccttcgtgagtaaaaatatgttccgccatcgaatgttcctttataacgtacagttatgctttacctctgcgcaggaagagtatactatcagctgactcgccaaagcgagcgaatttaatccaactttacttcggcaggaaagtggccgatactagcgccgccgcctgtactgccctccaaaacagaggatacattaaatgcaagaatgcaagatttcccgcgaccaactcccggtcggtaatccgaatcccaatgtcgacaagacccgcgacccgaacctgaagcccggtttcctgcgccgcagccgcgagctggacccggcgctggcagttcgcattcgtcgcgagctgatccacgccgaagcgtccgacttggccaaggccggatgggtcaattcacagtccagcctctatggatcgaaagccttcccgcgccattccgtcgttcgcgttaccggagttccggaagatggggctttcatcggcatgctgatcggcttcatcgagcatcgcgagcacggcgaatgggcggtcatggaatccggaacgaaagaaggcggcgccgtcaccattccagtcgatcacatcatgcgagcgtcattcgccgaagccgaagagttcgccgaaaagtgggagcggaacttggggtggcgtctcctgcgccagctccgcgagtgcggcgccctggccgggactgaagacgagttcctgcggcggatcatcaatcgatacgttcgtgatcgcacgatcctcgatcaccacaaagtcggcgcggacaaagactacactgatgcagtactcaaaagcatcggcgaaacatggccgaaaattccttcggggaaattcgtcggacaccgagtcgcgcagctcctgatcggccacaagctaggtcgagcggggaccatcctgaatgacctggtggacttcctggagaagttcgcggccgggcgcgataaagttctcaacatcgccatctgtaattgaggtgaagggatgaacaataaaccgacgctgaatcaccaccatcaaactgcattgttgtatctgtataacaatccaaatcagccggccttcacaggccccaacaatcaggcgctcaatgaacttcggcagatggggtatgtaaaggcgaaagaattcgaaaactgggcaggcaccggccatcttaggatggaatggacgctcaccaaagccgggattgagcgcgtcgaagtcgggcttctggggaagtgcgacgcttgcaagggaatcggtcagactttgcttcgggggaagtgtactgtttgcaatggccgcggccaggggtggatcagcgaatggtcgcagaagccaatcgaagataatcctcaaattgtccctaagttcgaaaagaccgatgcgaataggcttgcagacgccattgaagaaatcggccggctggaaaaggcactggccgaatccgaaaagcgcgggagcgagctggccgcgagctattgtgacggcgtagtcggcgatgaatacggccatccttattgtcgttataaagtggaacgcgacgccgccttggccgaagtcgagcgcctgcgagaatcaaaaggcgatccctctggcagcttcgacaggtgtatgaagatgatgtacgagcgcgacgagaatgcaaaacgactcgacgccgccttggccagggtcgcggagctggagaaagaactggcgatggcacgcgacgcagcagcaaagggtgatgctgcccgccacgctgctggcggcatggaaatggagattcatgagctgaagacgaagctggccgagctggagaaacaagagccggtggcatggggagccttccatttcggcgggaagcgcgacggcaagctgtatgcgcaatgcgaaactgaggctcagatagaggcgtatatcctcgacatgcaccgaagcagcgactcattgacgctcaggaaaggccccctctacaccgcgcctgtagtccaggctcaacccagcgtgccggaggggtggaagctcgtaccgatggacccgacatcgcagatgacctctgtcggtcagtccctgcgttatgactcggtaaacagcatcggcgagatttaccggcaaatgctcgcagtagcgccctcacccatcgatccggccgcgcatcctcagccgtgccagcaaccacaggcccatcctgcccgctgcgggtgcgagcggtaagtgccaagtaaggagtttatgtaatggaacagcagaaaccttcggaagtagatggagccatcgccatgaccgatctcgatattcgcattcttcgaaaggcgaagccagaagcgcaggacgagtgcgccgtgtccatgttcgcaacggcgatccgccagaaactgcagcgctcccgcgataaaggccgaggcggctggatcgactgcgacgaagatattctgatcaacggattcgccgaacatgcgctgaagggaaatgagaacaacctcctggacctggcgacgttcctgatgttcatgtgggtgcgcggcatcgatgatgcgaagattcccccggcgctcgaaaaggcgagacagcacaagatcatggaagcctggagtcgaatccatgaagacggcctgaactccgccagaaaggcgagtgctgcgcgacagttcgtggaagtgccacgacgcaaggggcgcccggagcgacttgcatgaagcctcacgaaataagactggcccaggccgaagagttcctgcgcgaactcggccgagggattccggacgacgaacgggtaatggtcggctacgctgaagaggccacagtccagaccgacgagaacggccgcaagctcaacgccggctggtggcctgtgccctggaaggaagggaaatacatcaactccagatccaacgcctacgcgtgcatctcgtcgtccatcaagacgcccaacccgaagaccggccagatgcgatactggcgcggcgaagcctctttcggccacggcctggcgttgatggtcgatgacatcggctcaggcaaagggtccaagggtgacttcgaccgcgacgagttccgcgagcgactggagccgaccgcgattgtggagacttcgccgaacaactaccagttctggtatttcttcaaagagccgatgtcccacatgctccagttcaaggcgctgctctattcgttcgtggaccaggtgctaaagaaaggcggcgacaacaccgtcaaggacgtcagccgttacggccggatgcccttcggcttcaacaacaagcgcgggaaagacggcaagttcaaatatgccgacgaaaacggcaagcccgaactcgtgcgactgttcagcgccgactattccaagcgctactcgccagaagagatcgcccaggcattcggcgtccgcatcatcatgccacagatgaagaaggtggagataaaccgcgacgattgggtgtatgaccaagtatggctgaagtatgccgagcacatctgcacgaaatacaagatgggcgaagcggcaggcggccaggtccagcagaatatgtccggcaaataccgcatccgctgcccgtggggagacgagcacacaaatggcgatccattcggcgcctactttcgcggaccgatccctggagccgagcacgaatatgtgttcggctgcggccacgatacttgccgcaaagagcatcgccggacgtgggcggccttcacggatgaagtcgtgctaccctatatcgtcgaacaattggaaagaatcaaccgccgtcatatcggtgaggagtagacaatatgcaaaacgatcctggaatcctgattaccgccatcggcttgctgttcctcggccttatcatcttcttcgaaggcctaaagggatggaaaatacaagtcgcaaacttcctcgcgtcgcttctgtgcttcttcttcggcctttctgctttgacgttctggttcgtcgttgcgtttgacgtattttaatcgacgaacggtacagaaattttcggatgggggcggaacttattagctatgccggtttaggtaggagataatagccgtccctttcgcctcaatgtgtagaggcaatgttgaatccgatcatgtaaagcagaaggcggcaaacctaacatgattatcgacgaagataatatttttgatgatggcgaatcagggtccagtgagtttgatctcacgcagatagaagatgctggaatggaccctttgatgaccgccgcgagcaaggcggccgatgatgcgattgcgaggaacgaaacgcatcgcgcgagcaaggcggcaagatacgccgaggcgtatgctgaaccagacttgaggaagcgagcgcggttactgatgctcgaccaggcgttcgatcttccggtcagccgggtggtgaaagggccgttcgatgacttcatcacgaaatacagctcgacgtcagacagcaactacctcgcggtctatgatacgttgttctgtaagggcgacggaaccgtcccacacccgcacttcgacgagtttcgcggccggctggtggaccatcgcggcgtggcgttcaacaacaagaccctcgatccgattgacctgatgggcgccctcgcggctgcggccttggacgatccatcgatcaagaagacgattgagacttgctgcgtttgggcgcgtcgatatcgccgcaactcgctgatcgagacgtttgagaagaagataccggattgggacggcgaagagcggatcgaaacgctgctgatcgacttgttcaaaccgttcgacaccgagcttaaccggatggtgagcaagtatttctggctgagcttgtactgccgcatcaactaccctggaatctcggcgccgatctcgttggcgttgattggtgggcaggatgcggggaaatcatatttcggcttgctgatctgtaaggaactgtccggtgggcgcgatctggctccagttcagctcgacctgagccgacacgaccagacgccgttcctgcgcaacatcaccggcaactcggttattgcgaacgtcggcgaaatgtccggcttcaaaaagggcgacatggaacgcatcaaagaattcctggtgcgatcttcggatacattcgatcagaagtttgagcctggcgaaacgatcaagcgacaatggatcaccatcatggacggcaacggatacgatggactccagcgggacgactccggcaaccgtcgattctatccgatgttcgtggcacaacttcccgacgaagatggaaagccgaactgggttaagccgggcgatggtaatgaaccgttcaaggtggacttcaccgacttcggccgcaaattctggcaagcgatggctgaatgccgcgcatggatcgaagagcatggtgtcgatggatacttgaatatggtgtctgaagcgaaccgcgaagtgcagaacttctctatttcggaaatggagaatgcgcgtggcgtagttcgtgacgatacgattgacatgtatctgatcaatgttctgatcagttgcgagttcgaagagatcaagcctggcaggaatgccaagaatcctggatggagggctgacaccgtcgccattctgaaatggttcgatattctcgccaggaagaagccgatttctcgtcaccttactccgcacctgaaggcgctgggattcatcccgaataagaacggcctggctggttggtgcttacctgtcgataaggttgcgcctggatggacgaatggcatgcacacgacgttgccgccgttcaatgatgcgcttgtgtacttgctgagaaagggcgacccggatatcactgatgaggctgccatggcaaaaattcgggcagtccgggccgagcgagccaagattttgggcgaggatttctgatgggctgatggaaggtactgatggagtgtacttggactaggccgccttcgggcggtcttttctttggcgcggcgtacattcgatttaggttgtggccgagtgagattcggaagctatctggtaattagggtggggtggcggttgtgtattatggaaagttagtggacggtggaccgaggattttgtgtggtgagtgggtgaattgtggaaaatcgacgattctgactggatttttgggtcggccgcgtcgagcttaccggtaatttacgaaaccaggaattagggtcgagccttagtgccgcgtgggtttgaagggcttaaccggatactttccggtttcggatgcagccgcaaaagtatactacagcgaaaatcgattgcac

SEQ ID NO: 44 - DNA, 66907 bp, synthetic construct
  source 1..66907: mol_type = other DNA
aatcctaatagaaaaaatctatcacggacgttacctatctttaaaattaattaaattaatggtaatttggtaatttggtaaactttagtatttgaaagcctcgcggcactaagcttgtacatatcccgtgaagtttccgattccagccagctcgcggcagggtcgccggaaacttccggacttccaatccatgggtcgcggcaacaccacggcggactaagcggcaagtgccaaaactcgacgaacggaaccggaaatttgggagcgcgacagaatcgctcagctggacatatttctaacattcgatttaacactcaatccaaacactcaccaccatcatctcccgccaaccgccgactcgaccctcacccaccagcggatcgcccgtataacatcctataacaccacctaacactcattcatcatcaaacccacccagacctacagcccacccacaagcagcccatagacgcgatccctggccccatagtacaatcgcgccatactcagtgtcgcggcagagcaccaggcccatccaccaccaacgccaccgcgacgactccagaatctaactccagggacgcagcaccaaatgaccaaatactacagccccgacgatctagtcacgccacaggaattcgcagacccgcatttcgcggcgatcaaccagaagcgtttcgatctgtatatcgacctgcgcgtccaaggctacagctcctggcgggtcttccgggccatctggggcgaggagcacatggacggtccagcccaggctcgcatcttcgcgatggagtccaacccgtactatcgcaagcagttcaaggccaagttgaacgcgaccaaaacgtccgatttgtggaatccaaagacggcgctccacgaactcctccaaatggttcgtgaccccaccgtcaaggactccagccgtctgtcggccatcaaggaattgaacgttctggctgaaatcacgttcgtggacgagtctggcaagaccaggatcggtcgcggtttggccgacttctacgcatcagaagccgatgctcagactgccaccgtcgctgctgcagccgaagccaatggctatgtaccggaaggcgaagagggcgattttccgtctccgacgccggaaccgaccgaggaagaccgcgccaaccccatttagacataaaataacggctaaggatttaaggtaaggaggttatttatgcaggataaaaagtctaaaagtaagactgccaagattgattggtctcactggacagtgacggtccctgaggagaacccggacaagccaggtaagccgtattcactgggttatccggagattctcaattatgcagaggacaaaatcgcgtcaaaatacatgtacgacgatccaaaggacaaaagtgtcgtgttctacgcattcccgtccggcgtgactaccgctaacacccattacagccggtcagagttacgggaaactatggagaccgggtcaaacaaagttaactggaccttcgctaagggtggcaaaatgcgtggtacttacgctatcgacgacatcagcaaagagccggatggtaagtattcccgcgtaattatcgcccaaatccacggcgtactgaccgacgagcaacgtgatcttattgggcaaaaggacaataatgcccctccgattctcaaggtgtactgggataaaggtaaaattcgggtaaaaacgaaagttttaaaggacctgaacgccccttacaaagagatgcttctggaacacgcttggggtgatgacgaaggccggaactttaaagagaagattgacttaaatacacggttcacattggaggttaaagtgagcgatgggcggatggaagtcattcttaacgacaccgaaagtttggtctatgacgacattcacatgaaaaaatggggcattttcgaaaactactttaaagcagggaactacttccagtctaaaactccgggcacttttgcaaaagttaaaatttattcacttcaggttacccactgattattcgccagcttcgatgatttcgaagttgtatttgacgccttcgtgctcgaaagtcatcttgccagccgccttcagctgcatgcggaagcggatgtgtttcgaagaaggcaggccgaactcgatgaatgctgcgttggtggaccggaactcgccgcgcttgcctttgacagtcacagccacgccatggcgctgagtgcgtttcttggaaacttccgggtctttccaggagttggcgatggctgccgacaggtctttggtctctttggccttctccggcgcgttcttggcctcttcgcgcatcttccggatttcttccagcgcttcctcttcggtgatctcttcttccggcttcagattctcttcctcggccttctcttcttccttcttcttggaagtgcgggttttgtaaacctttgccggggcttcctcttcctggaaggcttcttcctcggccggcagagcattcaggatggcgaggcagcgacgctcagcagtcttgcggtcagagaaacgcttgacagtcgcatcggcgttgtgggcgttgtagaaggcgaccagttctttcatttctgcgttctggatgtcgccgaaggttttgatggagttggtcattttgcgatcctctgttttggaagatttcgttcgggcttcggtttgtcgccccgttgaaagagattatgcctaggtcgatgctgcgtgtctacatttatttcatcagattgatcgcaaagccgacgaacggttgtcggatgtgaaaacaccgcagagcaggctgcggtgtttgttggcgagggcgatggtcaagcgaacggatcgcccagcatatcttcagacggggcacgttgcatatcgcccagcttgtcttcgtcagttgccggactggacgggatcgcgccggaccgaagcgacagagattccgactgcctgctcacctgcggagccggaggagccggaggagccggaggagcttttggcgcagtaggggcaggcgggaccggcaggcctggaggagccatcggcgccctgggaggttccggaagatcgggaagactcggcgctatgccgccaaaggaccgctgcgactgttgcgccggattgtcgccgaacatttcggcggatcggttgtccttgatgacttgacctatggccgtcttgtcgccgcccggctctgccggatcgaagcccgtgaatggagtggtaacgcagcgcatgttcggatgggtaggcagatttttcaggactatggaatctgcccagacatacggattcttgtggttgccgggtccgtggctgatgatctcggcaggaatatggccgttcatggtgagccattccgccatcccttgccgagtcagcgggcttaccacgatctggccagtagactcttcggcgacggcgaacagatcaccgagcttgaacccgatgattatgtagttggacctggactcgccgacgaaagccagggtttcgatgttgtggtggatatcttggtcttcccagatgtaaagcatgatgcgctcctcaataaggctgcttgttgtgttcgaccagagacataccggccggaactttgaagcggacgtattcgatcatcatcgccgttcgacgccgattcgtgccagactcgtcattaacgaagagttcgcactgatgcggaatgactcgcgtcaccaggtcttcgcctttcgaaccgtagaacttgatgtaggctgcgacgcctcgcgtcatgctcagatggatcgtttcgcagagtcgctgcgcggccgacgcgctggacagatcggtcggactgaccgtcacccagtaatggccactttgttctttatcggacataaactgccctccaatgagaaagcctctgccgagtcgcagaggctggttgttagtcgcgcttcagcagaacgactttgtcatgcgctcgatacttcccgcgccagtcttcccagtattcgccggccgggcagacaagctccagagtgatttcgtcgcgccagcattcgacagaaagtacaatagccttgttccttgctgcggcatctgctctgagcttaaccagaatttcgtcgccagttttcagctcatcaactcttacaactttggccatgacacactcctgtttgaagaggcgcggccggaaccaacccagccacgccgatggattaacgtttgtgaaggatggacacggtgtccacgtcgaggatgctgatggtacggcgacggcgcggattgctgcgttcatggatgcgaatcaggttcgcaactggagcttcgtccaccacccatacatcttcctgcttctgcgtccggagcaggaccgttacttctgtgttctgggcgaggccgttgcaaatgaacgtgaatttggacgagggagttctgtacatttcgagattcctttttggacttcgggtccggcttctcagccggtgaagagattatgccctgattctcaccgccgagtaaagcatttgtgtaccaattctcccgtcaggtggaaccaaagtgcggtatcgcttatggctacgctaccgcgccatggcccttcttgctcgcacactgcgaaccacaggctgatttccatccttgccaggactcggccgaaagattcgaacctgcgccgactggacaggatgtcgacattcactcgtcgattgacctcataccggcgaccgttgatgacgaagaccagccgcagggtttgtccgtcaagacactcccagtatctggtttcataccgaagccagtagcgctttccagccgggcctaccatggtcatttaatcgatgctcctggccgcgccacgcggtccggtcggcggcgcaggatcgaaccgccccaggatatagtcgggccggcgcgcttcctgaggacacacggcgagaaggcgccatcctgcgtccagggcgtactggagttcgtccgtgcagcagtcttccttgagcagcagacggttgacgctctggagattcggaccagggatggccgagctggtgtgcgagttccaaccttcgatgccgtccaccatctgtggttggttgatgtagccttcggacctgccagccaaccggctcgcggccagctccaggcgctccagcatgggtcgcagagcagcttctgggtcaacgtcgtcccagagaaggaccaagctgatgatggtgtatggatagtccttgtccagatcccaggccgaagcggtcagacggcccaggccgatttcattacacatcacgggaacgtcgttgctccatgtggacggctcccagttccgctcaccaggattcccgattgttacgccttccaggttcccaaggagaacgtggagcttgctgacgtattccgcctccagcgctttccgctcttcgtcggtctggttgtggcgatagaaggatggagggctgacttttgcatggtagagtttcatggcggttcctcggtttttgaaggcttgaacgttagagaatggtgtcgcagtatttctcgaaaggactctggcgcttcttctcgcagatcgcgcaggtgatttccaggtcgggcagctcgctgcaagtcttgccgagatacagccagcgcttgcacagactgcggccgtccgacgtgaagaagtggactttgcgagcattgccgggttgcgcccagccaccttgatcgtttttgcgcttgctcatggcgatatttcctttggatctggaatccatgccgtccgttcgctcacccaaactccgtctacatagatcaggactgacagagcagtcgcgccaaacccgaagcctacatagaatgaaccgggatcgatttccatggtggcgctattggtggcgctattgaaatcgacttcaaagtcgaacatcgaatggccactcataccatcaccatgtcgatttcattgatgaagaaatgaacatcgacaccatcggcgcgaccggtgtaacgcagccgagtcgtcccatcaatgtgggcttcctcgacgccgatgacttccaggatggtgtcgttgcagtaaagcttgacgaacatcttgatgccggagccaatcgccgcgaaggcgatctgcttgtacaggtcttgcttgatcacgctttgcgctcctgtttgcggatgtattctgccctggcttcggcttcgaacttcgcccaaagcgcgttgtcgactggaccccagggaccggtctgagtcccgtccaccggcgcgaacttgccaccggcgcgacgatacttggacagagttctcaggctgatgattttctcttcttgggaatcgagttggacgatcacttgacatacttcccgaagtagcaggtgtggagtatttccatacccttggagatagccttcagcttgataccgaaattcttgatcgcccagtccagatcgtggtgatagaactcgatgatgttgacgatttggccggcgctgtagtggatgacgcgaaccttgccgttccagtggaaatcttcgcggctgtttacggcctcgacttcgatggtgtcgtttctgccgatggtccatttggagctagtcatgtcgcaatcctctttttggagtgtttcgcgtttcgatgaggtaactatacctcagtcacctcatcgagtaaagcacttttgaacagattatttgaaatttctggaagacagattcatcggctgattcagtcagtggaaccgagactccatccgttgcgggcgaaggccgagcgaccagacagcttgcggcactggatggagctgccatcgtcgaaggtgtaagatacggcccagtccaggcgctcgcgacgtactgccgcagcagcgatatcttccagacgggctttgagaagttgttctgctttggtcatttagagttcctctttggagcgcttcgggtttcgatgagatgactatacctcagtcacctcatcgagtaaagcactcctgaggaattatctgaagtttctggaggccagaaattgccgccagagccagtcaacgtgatcgttgagatagcgctcgccatcggacgacagagccaggcatccatcctttatgccgagcttggagccggcaatccattcgaactcgaactggagcgttcctgggcgagggatatgggacaggatgtacttttgcacggtcagtagtcctcgaaaggattcatgttggcgatggccgcgattttctgcatgccgatgcgatagaattcggcttcttccctggccttggccagattctccctggcttcgcacgccagcttgtactggttgttggcgttctggatgcttccgtccagactcctgtccagttcttcccgaagagccttctgcgacgctagctcggcctccaaatcctggattctgagatgaagctggcgatttctttccgcaacctcgttttcgcgagcgatggagttctgaaggcattcgtcaagacgagtattttcgcgcaccagctgatgcttttcgactttcgcctttcggcatgtctctcgcatcgctgaaagctcactggcgtgcaaatcagcgtccgggtctttacgctcttccttcgaccccatccgcaggtagtattggccggccgcgaaagcgagcatagcctggtcggcatactttacggcctcacccatgtagttggatttgtagcgaggcagaaacttgcactcctctggatcccagagaagactatcggcaataggccagaatttgcggaagccatcaggatcgacttctacattgaccatttgcagctggccgccctccacttcgacttccagaggaacctgaatggcgccggtgatgtactggaagtacactatgctagacataacacaatcctcataagaagtcgcggccgggaccatcccagccgcatcgtaatcactcttcgccttcgtccgtgctcagccactcttcgaaggcgaaattcaccttcgactcgacccaatcctgaagctcgtcggcgaactcgtcactgtcgatgtccatggtgattcccataacttccatgttccatagcgcggcattcagttcgaactgtaccatctgctcgccatcgacttccagcaggattcggtctgcgacttcatagtcgtctacatcgaacagatggccgcccgccaggaggtgctggacgaaagcttcatcgaggttggtgacttcgatctggacttgtttggtcatttccgtctccttacttagcggctttgaattgggctttgaggttggccagttcagctttcagatcgatcatcgcctgaccgcgcaggccttccatttcggcctcgctgatcgcgatcttggctgcgcggattttgtcgttgatttgatctttagtcattttcggcttccttttgtttgaagggttttgcgtttcaatgaggagattatgccgaaagtcagaatggaagtaaagcatcttgatgagaaaatttctgccctccatcgaacggtcgtgctcgaccgtcgatggagggtgtgcataatcgaagtcgcacgacgcgaccggtgatgccccggcgaaccgggacggggtggttaggcggtgcgctcggcggcgcgttctgcgttacggtcgtgcgccatgcgcgcccatactgcggcccagcgcgctttatcggcagagttcggcttgtacacgtcgtcagggtgcggttccgggccgtaggcgttgcagctttcgtcgtattcgtaggtcatcatcttgccctcaaggggtcatggcccggcgaaccgggcgggtgattacttgcgatatttcttaataaggtcgtgtgccatggcgatggcatcagaataggtttctccgccggcctccatttccttcacagccttattgcgcagtgcgttcagcttgttgccgttgatggtgcctttttcatccttggcagcttcgcaggagtcgcgcagagttttcagggcttggtaggtggcgttcatcgtcttgttctccgggtttcgcgtttcgatgaggagattatgccgatagtcagaatggaagtaaagtgtctgaatgaagaaatttctgaacaccgacgaacggttgtgctcgaccgtctgctgcggtgtcgatatactcggcctattgcgaacaatggactgattaaatgtacaaactcaatcctgcgctgcgagcggtctggcgaactcgcgcccgttacaaagtcatctatggaggccgggcgtcttcgaagtcgcacgacgctggcggtatagccgttttcctcgcggccaactacaggctcaagttcctctgtgctcgccagtttcagaaccgcatcagcgaatcggtctacacgttgatcaaggacaaaattgagaattcagagtacaacggcgagttcatcttcaccaagaactctatcaagcacaagaggaccgggtcagagttcctattctatgggatcgcccgtaacctgtcggaaatcaagtccaccgaaggcatcgacattctctggcttgaggaagctcactatttgacccaggagcaatgggaagtcatcgagccgaccatccggaaagagaactcagaaatctggatcatcttcaacccgaacgaagtgaccgacttcgtgtatcagaacttcgtggtcaagcccccgaaagattcctgcgtcaagatgatcaactggaacgaaaatccgttcctcagtgagacgatgcttaaagtcattcacgaagcctatgagcgcgaccgggagcaggccgagcacatttatggcgggattccgaagactggtggcgacaaatccgtcatcaacctcaagttcatcctcgcggccatcgacgcccacaagaaactcggctgggagccagccgggtcgaagcgcatcggcttcgacgttgcggacgacggcgaggatgcgaacgccacgactctcatgcacggcaacgtaatcatggaagtggacgaatgggacggcctggaagatgaactgctcaagtcgtccagtcgcgtatacaatctggcgaagatgaaaggcgcctcggtcacttatgactccatcggcgtcggtgctcacgtcggttcgaagttcgccgagttgaacgatgccagccccgacttcaaacttatctatgatccattcaacgcgggcggcgctgtcgataagcctgatgatgtctacatgaagctgccgcacacgacgatcaagaacaaagaccacttcagcaacatcaaggcgcagaagtgggaagaagtcgcgacccgattcaggaagacttatgaagcggttgaacatggaaaggtttatccattcgacgaattgatttcgatcaactctgaaacgattcacccggacaaactaaatcaattgtgtattgaactttcgtcgccgcgcaaagacctggacatgaacggccgattcaaagtcgagtccaagaaggacatgcgcgagaaacgcaagatcaagtcgccgaacatcgctgactcggtgattatgtcggccattctgccgatccggaagcccaaaggcttcttcgatttctaaacacagaaaagcccggatcgctccgggcttcgggtcttactcggtatggttcctggcgctgagtgtcgatgcaacggcctcgccgactcccagggcttcctggccggccgcgagcgcttcggcttccgactcgacgatgaagtcatcaccttggccgtcgccgggcggaacctcgaccagcacggcttcttcgccctcgaaacgcagatcataggtcttttcgacggacagaccgtaacgggcgttgagcgcatcccagagctgagcttcatagttgcgcaggtcttgcagagatttctggtggctgagcatcgccatatcgacggcccgttgcagggtttcgtccaggacgttgaatcgcatgcgaagagaacgaatccgctcgaccacttccgcatccaccacatgtctttcgatcatcacttttcacctttgctgaatgtaacgttgtagccgttgtcggccaggtaggtcagggcgccttcgaaggaagttccgacgaggtgcttgagcttcatttcgcgttgcgcggccaaccagaatgcagttccggaaaactctgcgcggccttcggacaaaaccctgcaatcaggcccggcgatccgtacatggacggaagatagcttgatcggcatcagtgaatacctccgctggcttgcgacggcatgctttcggcgcgagcggcttcgcagtccgggcagggacaggcttggcggacgcgctccaactcgtcggcatccatgacatagagcttcccgtcggcagtgtcatgtgccatagcgatgttcgggaagtcggttgcgctcaggccggcgacagtgcggatttcgtcccagagcaccagatgctcggcattcagtcgggcggcgagcgcttcgtgctctttagcgacgcgcgccatgaactcgtccatccggaatgcgaattccgcatcgatggcacgggccgaggccatggagctgagtcgaatcggttctttcttcatgatgattctcttttggttggtggttgttagctgctcaggcctattcaaggccggctcaacgcggcgaagaacaacacgatgaaaaggagcgaaaagaatgcgaacgccagagatattccggaaatcagctttgctatgccctgcatctcagttgccttggcagcgagtctggccttagcctcgataacttccggtcgtggcgactgaacatattctaaggcctcttcccgcgctttttcggcctcgaccaacctagggtcgcgggccgagacttcgctgtgccctggcctcgcgggatgggcttgcagcgatggaggaagttcagcagccacgactccatagtcggcgcaggcccaagcgatcccgatgaggatcgcgaggatggactggacgattcgcagcatcactttgtcgctagggaagttcacgatcaatcctccaccgaccgaacgatttccatgttgcgaccggcattggtcccggcattgaaggcgcgccgaccgtcgctatcgtccagacgcatgagcttagtaacattcgatttcttgtagccaggatcgccgaaatgttcgtgaaccgcagcttccttcaccacaaccagagacgttccggcagaagataccagctccatgcgcttcctggtgatggattgaaggcgatagctgatttcctgggtcgcggccagcttgaattgcgcggcaacctttacgttgaaacgttcgtacccttgagccttctgatactcccggcacagacgatcaatggcctcgaccagggagttgaacatgttcaccgccagctcaacgtccgacttgtagcctttaaagcgtacggcatgaccccagcgcttggtagtgcttccgtcgcgggcgcttctggatgccttggccgatgctcgatggttgttgatgccaccggcgaaatccatgatgcagtcattgtacgtcgccacggccaccgagaagaacttcatccagttcgggattgcggaatagtaacgagtcgcaatctgctcgtcgaactcttcacgaatctcgccggtcgcttcgaagccgtggaggtcatacttgtccttcagcttcttcacgcgctcggctgcgatggccgcttcgtgcgggctggaggagtcggctgccatggcggtcagtttgcggatgcggtctttcgccttctcgatggcttccggggtgaattcgttctggtcggtcatggtcggttccttttgtctgaagggtttcgcatttcaatggagctattctgccttcattcagaatggaagtaaagcactttcttccactatttcggcatcgactggaagaaattccagatccaatcacctgctaccagcaagaggatgagggcggcaaagaacaagacagcggccgcgagctgtgcgcccggcttcagtttgggatggctgagcttgggctctacgggaacggccggagcgctagcgctgcaaccggcgtctcctgggccgtagccgatgccgcgttcacacgcctggagcgacaccagggatttaagatactcggtctgcttttgcgactcttcgtagatgccggcgacggcgaaccagagggcgaacaccacggacgtacacacaacccaggcgccggtcagcaggagggccagcgggccgatgacgaagacggtagcagccaggacgattgcgccgccccagatgatgaagccggccagaccattggtgatgtcgacacagaactttttcattttcagattccttcggttacgggatggaggggatttgaaactctgcgccgccgagaacatcaatgacgacttcccagagcgtcggaacagaccactggtaacggtcgaagtcggtttcaggatcgacgcccagcgtcacataggaagtggcaggccatttatgaatactgcctttccgcatgagagtcgccacgcggccgtcaccgagcggattcgtcctgtgcggaacgtacgcagacatcgaatattgctgcccggcgtcgacaacaaatctttgcctctggcgcagacatacagagcccacaggattccagccgcgaccgccgcaagcctggcgagccgaagaatgctcataaccttcgtgagtcatttcgccgaggcaagccgagcgatcctcgtaatagttgatgttctccatcgatccaaccagcaccagagactcgaaatcgaatcgatgatcgtggatggccgagtgattgaagcaaagccgacgcggcagctccgggtgccaaacatggaggcgaccggccggaagttggacctgaatgaaccccaggccgtgcagagtgatcttgtccttcatcgggtcatggacggtgctcatggataatcctcagtagcagaaatgtattgtgagagttacgattgacaagccggtcgcccatagaagggcgaaccaggccatggctttgatggtcgtgtagatcatccgaagaattttccggcacagatcgggccaatgcccatttcgatggatgcgtggttggtcaactcgcgaccgcagcaggagcactgaccagtcttccgaccgtaggcgactgccgattccatcggcttttcgaacatcttcagaacgtcatcgtgctcagtatcggtgcagtcgcgactcttgatgaatttgccattggtgatccggccgaggtagatgtcgcccaggacgtacaggctaccggcgttccggctgtgagcgctagcctctttcacaacaacgatgagcggctcctcgccttcgccagctaggcggattttcgggcgcttgataccagactctttcgccttctcaaacgctttctcgatgccggaaatgtccagagtcggcgcagcagcttcctgcgcggccactttctcgcgatacttggcgaggttttcgatggcgcgcttcgcagcagcgatctgattttctgtcaaggagccgtatttatacaacgactcctgaaggctctgagcgaagctgaaggaatttccagtccaccactcgatgatgtccgggtgcgcggcttcgaaggccttaattttgaggtcgcgctcttgcgcagcgctacagattttctcgatgcgcttttctgccgccttagcacggctcttggcgcgctgctccgggctggttttgtactctttgtatccgacgccgccgcaggcaaagcaggcgcgaccataagacgaagggccacggtacaggccggtgcctgcgcatttggtgcacttgtcgcgatacagcttcacttccttccgggagttcgggcgggcgcccatggacacgtcttccagggtcttcggcgcttcgttgttgatctctacggtagcgaagtcatcacccaggtcttcgaagccggtgaacagattctctgctgcgttcatgtcgattctcctgtttggaaagttcgtttcgatgagttgactatacgccagaaatggaaaaacggtagcgatttctcactaccgttcgtcgggtcgaagacaatcaataaatgtcgctattgatcttgaacccatgctcagcgccgtcgttgtagtcgtactcaacataactgtcgcagtagtcgttcaaatgccgaatgatgcctagaacgtcgttcgcggccttgtgccttttcgcggcgatggtcttggcgatgctgtcgccgacttccagggtttcggccgtccggcgatggatcagcaggcgactccaaagatagagccggacgcggcgaatgatgtcgcgatggcgctccagtcgtccgtgcaactcttcaatttcgtgctcgcgagattttaatactcgtcgaagctgttgaacttccaactccaaatcggccttagtagccatgttcacctcagaaaggaaaatcgtctgagactccaggaagctcgacgattattgttgagcctgatcggtctagaatgcatccgaccgagccagccctgtgtggatagggtctacacgaactataacaggtgacttccctgactattcgccaggtcgatcctccacaccatctgcaaattggcgggcgcttcgacttcagttttcgttcgtccaggacggcgcgtctgtcgcaggaaaggcagcgtgccttaaccgacgtaaccatgggtatagtcgatcattcggatgagctcatcatcctctgattctctcgacttcagaccgcccaaagagtccgactggccgtcgcatttcgcatcgatatccatcgaagacaggaatcctgccgatactgcgatgatatcaactttgtcgccggccttcttgaagccttcgcactcagcatcgagggccacaattgcactcgcggccatgttcacatgactgatgaggtcggggaagatcacaggaacttcacgcgacatgccacggaccgtcagcttcaggactacatacttcatactcactatcccttttgtatgtgaggaaagaacttgctgttttccggatggtgaaaacgctcggtcgcaggcggtctttcttccggacattgaatcgtcgaaggcgggaaaaccgcgccggcgataatcgccgcgaggagtgcagcggatgtcgacatccagagggcggtttccaggctcacccgaacttccggacggcgcggcttcattcgctccaccctcttcccggttcataggatggtagactgccgccgcgaacccagttgtcccacatatggttcagaccagtcggtggctggggtggcggactgtagaatccgggagtctcagtgctgctcaggaaataaggcgtgcaaacggcctggacgaccaattggtgtcgctcccacatcttatcaatcgctcttagcatgacgtcttcgcactgagccttactgtcgaaccgtctgctagtatggtccggcatctggacgcagccgtctccagtgcaaaggaaagcagtagcaatccatacggtgatactcgccatttcgtcaccctctttagttgatgagcagagtctattccatctgctcgccaggagtaaagcgcttttcgtcgggataaatgccgatgatgtctgcgtcgagcatccaaatctccacggacggatcgtcgctgctgatgtggtacaggttgtacagctcccgtccgccgacagcgcgctcgcctcgcggctcaaccgccagaaccttgccgtgcccttctccgtgctcgtccaggtatatgacgtgatcgccgacttcatagctttctttcgtgacgaggcgtgaacgcgagctgttctgcgattccaccacccaggaatccagcacgccgcctttcatgtcgcgaaacaatcttgccgatttgtcgcaatcgaatacgcccagaacttctccgtctttcaacacgatatgtacgattggcaaaagagtattcatgtttaatctccattggttgataattagagtctaatctgccgaaaagttcccgtaaagaattattttctcataactgattagttgcaactgttaatctgatgtatatgtttgaatctcttttgaacgtttgatgtttcccctataataagcgcacacagccaacaaccacgtggaactacaatgtttaaactttcctggatattcgggcgcaaaaaggataatgctgcctgttctgaatcggcgccggagaaagtcgcacaaatccctcaacacgatccgctcgaccccatgatcaagctgggaaggattcgcggctggaacgtcgagccggagaaagccccggtcattcgtagtgtgaaagatttcctggaaccgggcctatctgtcgcaatggatagtgcgtatggtgatggaccaaccccggccgcgaaggctgctgcgggcggccagaatccctatgtcgtcccgactatgttgcaggactggtacaattcccaagggttcatcggataccaagcttgcgcaatcatttcccaacactggttggtggacaaagcttgttccatgtctggtgaagatgcagcacggaacggatgggaactcaaatcggacggcaggaagctatccgatgaacaaagtgcgctgatcgcccggcgcgacatggagtttcgcgtcaaagacaacctcgtcgaactcaacagattcaagaacgttttcggcgttcgtatcgcgctgttcgtcgtggagtctgacgatccggactactacgaaaagccgttcaatccggatggaatcacgcccggctcctacaagggaatctcccagatcgatccatactgggcaatgccgcagctcaccgctggctcgacggcagatccgtcttccgaacatttctatgagccggatttctggattatcagcggtaaaaaatatcaccgcagccacctagtggtggttcgtggaccgcagccgccagatatcctgaagcctacatacatcttcggcggtatcccgctcacccagagaatctatgagcgcgtgtatgcagcggaacggacggcgaacgaagccccgctgcttgccatgtcgaagcgaaccagcaccatccacgttgacgtggagaaggccatcgcgaacgaagaggccttcaacgctcgcctggcgttctggatcgccaaccgtgataaccacggcgtgaaagttctgggaattgacgaaggcatggagcagttcgacacgaacctggccgacttcgacagcatcatcatgaaccaatatcagctggtcgcggccatcgccaagactccagccacgaagctcctcggcacttctccaaaaggattcaatgccactggtgagcacgaaacgatttcttatcacgaagaactggagtccattcaagagcacatattcgacccacttcttgaacgccactatttgcttctggcgaagtcggaagaaatcgatgtgcagctggaaatcgtctggaaccctgtggactccacgtccagccagcaacaagccgaattgaacaataagaaagccgcgaccgatgaaatctacatcaactctggcgttgtgtcgccggatgaagttcgcgagcgtctgcgtgacgatccgcgttccggctacaaccgactcaccgacgatcaggcagaaaccgaaccgggcatgtctccggaaaacctggccgaattcgagaaggccggtgcacagtcggccaaggcgaaaggcgaagccgagcgagccgaagcccaggcgggcgccgtagagggcgcaggcgcccctgttcccgccgctccacgcgggactaagcctctcgcgaaagcggccgaggaaggggccagcgaggtcgctgaaccgccgtcgcggccggaccccaaggccgagctgcggaacttgttggtcgatcttttgtcgaagctccaagacctggacgacattaaggcaccggatggcgtagacatagagcacaatgatgcgcctggcttaaagcgcacgtccaaacctggcgtgtctggcatggagccttcggtgttttcgtctaaccgcatcgtcgggcctcgtgatcattcggaactccagagaatcaaggtgaatggaataaccaccttgatcgaaaatccgcgcggaagcattcggcaaggaaaggatgggagttggcgagttcagatgaaacaccactacgggttcatcaagggaacgaaaggcgctgatggggatgaagtcgattgcttcgtcggtccgaatctgggatccaaacgggtcttcgtcgtcgaccaggtgaacaaggaaggtcagtttgacgagcacaagtgcatgctcggcttcaacaacatcaacgatgcgaagtctggatatctgtcctgcttccgtccgggctgggatggtctcggctccatccatgaagttgacctgcccgctttccgtcgctggctggcgaatggcgacaccaccaaaccattcgggggcgagtgatggcattcaaggcctccaaaaagcgcgagcgccgggcacctcttccagtcggaagagggaagcccataattccatcagcaggaatcgaggcctggtatcgaaagcagatgaaggatatttccaagctcatgatctccgactatcgaaacgagattgagaaggcgctgtcccagcctgcggccgaacggttcttcgccagcgacgaatccgtgaacgtcctgttcaagatgacccttcgaagcctacagcagcgatggagccgcatttttgaaggcttcgcggccaagatcgccccggagttcgtcaaccggaccgaagaagccgccaccgccgcgacccttcacagcttgtcggtggccggcgtcgatcagccacgagctgcgtataatgagagcgtcaggaacaccctggaggccgcaaccacttacaatcatactctcatcaccaagatccaagaggaagtccacgagaagatttacacatcagtaatgctgtctctgacttccccgaatccggaagagcaaggagcttccggcataactaacgcacttcgcaaagtcgggaagttttctgaagatcgaatcgaactcatcgcaagagatcaaaccagcaagctttacagttctctgagcgatgagagaatggcggaaaatggcgtcgaggagttcgagtggctacactcttctgccggcaagactcctcgccacacccacctggagaaagatgggaagaggttcaagctgaatgaccccagactttgggagggtccgaaagcagaccaggggccgccaggatgggcgattaactgtagatgcagaaagataccagtcatttgacatcgataggagcgctatatgccgttagttcatggcacttccaatgaggctcgttctgaaaacatcaagcgggaaatcgaagccggtaaagacccaaagcaggctgcggccatcgcttattccatccagcgcagtgagaaagggaagacggcgaaagattgttcgcctaagctcgtcgccgatcttcgcgccctggtggacgctctgtcgaggctcgtgaaatgaaccgcaagacgtgccggcgccgactcgtggtcgatgtaatcagggccaatattcacggcggattcttcagcctgaagtttgccgccatcgatttggcaatcatcggcttcgccatcttgatggcttttggccgataatgctgagaaaatctggattctgactaaaaattctagtccggatagccgcaaattaccgtttacggaaaatagcagtaatttggaaatcctactgccgcgaggctttaacagagccagttcctaatttccgatttagccgcatgcttcaaaagtatatagcctgggaaattagaagtaacgttccaatagaattcatctataagtaacgctataatataacgtcaatctatatactctagacgtattgaaattcaatttttaatcggtaaattggtaatttgaattagtttaggagttgaaagcctcgcggcagtaggcttagacaaatcccgtcaagtttccgagaccaaattaccggattttcgcggctgaggaaactggtaattagatcacaatacaaattataatgtaagttaacagtcgcggctacatctaattattgttccgcttatttacccttagatgtactgcgtatataatacagccatagtccacgactcttcgaattaacgatggcaaagtcgaaaagaaaaattgacgaaaatggatatatgaccatagagggctgcccgatcagctcttatggcgttttccaatattctgctggtcaactcggtcttccgggcgatccgacgcggattgtcaacgtatatcgcccggagtctgccgtcagcgatccggagtacatcgaatctctgaagaatctcccgttgatcgacgagcatgagatgctgtcgggattcgacgatgatgacgatagcgtggcccccgaagacaaaggggtggagggcatcatcacatccaacgcttactacgaagccccatgggcacgcggcgatatccgcatctattcccgcaacatgcagaatcagctggaaaggggcaaagaagacctgtccctaggctatagttgccgctacactgagcaacccggcatctggaacggaacgccttatgaagtcgtccaggacaagatgcgcggcaaccacattgccctggtaaaagagggtcgtgtgccgggggccagagtattggatggtctgtgttttgaccatctcagttttgatttcagaccatccgatgagggtaatgaaatgagtctcaagaaagccaagcggaagccccctgtccagcgcgtagggcaagctgctgactcggcggtcgaagagttgcgcgccctgtggccgaagctatctgcgtctgtccagaagttcctgggcgaagaagagcaggagccggagcatcaggaaggcgcagctccggccgaaccgaccgacagcgagcacctgaccgagcatccgactctggaaggtgctcagaaggatgacgaagagcaggaagaggagccttccgttgtcgatccggccgtggccgccgtcgagccggagcatcaagaaagcgccgcatccgaaatgtccggtgaaggcgaagtcgccgaactgatctctcaggtcaaagccattctggctcgactggagggcacggtagccgaaggggcagacgaagagcatggcgaaggtcaagatgtcgtcgagggcttggaggagcagagcagcctcagcggctcgcaaaccgccagcgacgatggtggtgagagcaaggataacagcgaggaacttcctgaaatggcacagaagaacgcgcaagatgctgcaattcgcggtctctatcgcgacattgctgctaaagatcgcctctacaagcgtcttagctccgtggttggtgcgttcgatcaccgagctatggactcggctgaagtcgctgtttacggcgtgaaaaagctgaacatcagctgtgcgaagggccaggaagctctggcgctcgacatgtacctgaaaggcgtcgaagcctcgcgcggcgcggccagccgtcaatcgaaagcccaggattcggccggttctgctccgcagtgtgccgagctggacagctacctgaagggggagtaactcatgttccagaaacaagtttaccgccagtacactcctggttttccgggcgatctgatcgaggacggcccgaagcgggcgcggccgggtcgaatcatggctctgtcggccgtaactccggctgccaccgccaccggccccaaccgcatcagtcgcgctttcggttatgccggtgacgtcagcgccctcggcgaaggtcagccgaagaccatcgcggctcgtgcttctgaagtcgtgatcggcggcgccaacttctttggtgtcctcggtcatccgaagcactatgctctgttcggttcggccggagactccctggctcccagctatgatctgcccgatggcgccgaaggcgagttcttcgatatggccaccggcctggtcgtcgaaattttcaacggcgccgcaaccgccctggacctggactatggtgacctggtcgcctatgtccccaacaacctggctaccgccgacaacgcgcttggcctgccggccggcgccctggttggcttcaaggctggctccatgccgaccggcttggtccagattcccaacgcacgcatcgttaacgccatcagtctgccggcccagtcggcggggaatctggttgctggcgttaccatcgtccagctcacgcagtaaggaggcgtcatgagccagatcagcaagacccattcgcgcctcgcaggccgcaatgcgaaacctttcgacctgaaaaacatcaccaatgacgccgtggcgtctctgcgccgcatcggcctggtattcgatcacgccgtcgtccaggaccagatcaaggccttggcgaaggccggcgcgttccgctccggctcggccatggacagcaacttcaccgccccggtgaccacgccgtccatcccgactcccatccagttcctgcagacctggttgccaggcttcgtgaaggtcatgaccgctgcacggaagatcgacgaaatcatcggcatcgataccgttggctcctgggaagatcaagaaatcgtccagggcatcgtggagccggccggcactgcggtggaatacggcgaccataccaacatcccgctgaccagctggaacgccaacttcgaacgccgcaccatcgttcgtggcgagctgggtatgatggtgggtaccctggaagagggtcgcgcctcggccatccgtctgaacagcgccgaaaccaagcgccaacaggcggccatcggtctggaaatcttccgcaacgccatcggtttctacggctggcagagcggcctgggcaaccgcacctatggtttcctgaacgatcccaacctgccggcattccagaccccgccgagccagggctggtccactgccgactgggcaggcatcatcggcgacatccgcgaggccgttcgccagctgcgtattcagagccaagatcagatcgatccgaaggcggaaaagatcaccctggccctggccaccagcaaggtggactacctgtcggtaaccacgccttacggcatttcggtttcggactggatcgaacagacctatccgaaaatgcggatcgtgtcggctccggaattgtccggcgtccagatgaaaaaccaagagccggaagatgctctggtgctcttcgtcgaagacgtgaactcggccgtcgatggcagcaccgatggcggcagcgtgttcagccagctggtacagagcaagttcatcaccctgggtgtcgaaaagcgggcgaagtcgtacgtggaagacttctccaacggcaccgccggtgcgctgtgcaagcgtccgtgggctgtggtgcgctacctcggcatctaacagatgcctattcaccaaaggccgggcttccggcctttgttcactatgactctaactcggttgtaggggccggttagggcataattactaggactacgccaatgactgtttatatcgtttcctccatgactcaatcggtgtcttacaatgcgtatgacacctctgatccgtccaatcctcgcctccagcgaaagattctgattcgcggccgcgcaggcatcgcatccgaaacttccggcttcggcgacatgatttccgacgaggccggacgtccgatctggaccccacagggcgattgtactgccgtgagcgattcggatttcgagctgcttcaggccaataagattttcatgcgtcacatggagaagggttatctgcgagtcgtgaagaccgacatcaccagtgaccaccagcggatttccaaagagactcgcaccatggagcgcgatggattccagcctctggatgctactcgcctgcagcagaaaatcaaggtgaccacagccagcgcttcccaggaacaagagttccggatttaaccgagggtttcggtatggtgattttcgacgaacataagtttcgcacgctgtttccggagtttgctgatccagccgcttatccggacgtgcgcctgcagatgtacttcgacattgcgtgcgaattcatttctgatcgcgattcgccataccggattctcaatggtaaagccctggaagcctgtctgtatcttctgaccgcccacctcctgtcgctgtccacgatgcaagttcagggcgcggctggaggtggcgtcactgccggtgggacccagggcggtttcatcaccagcgctactgtcggcgaggtcagcgtggccaagctcgcgcccccggccaagaatggttggcagtggtggctttccgggacgccttatggtcaagagttgtgggcgctcctcagcgtcaaagcggtgggcggattctacatcggcggtcttccagagcgccgaggcttccggaaggttggagggacgttctggtgatccctggtgcgaatcttctgcgaatggccttcggggtcatcggtactcaaattgtgaaatatcgcaagtttgagcagcgagtgaagaatgatcaagctcagtacgtttccatgttcgaggagcctttcgacctggcagcgtctgttcagcgagtccgacgcgatcagtatgtccagtttaatctggagttccaacggaattacgttatgatcttcgccaactttgagatggttgacttggatcgcgatgtggccggtgaccagttcctctggaccggaagagtctttcagctggagtctcaaggctcctggttttatcaggacggctggggagtttgcctggccgtggatatcggtgcggccaagctcactgatgacgggaaaccgactttctaggtgatgtatgtttgacggcgaactgatagcgaaactggttgtcgagttgaatgcggcgatgacatctgctcaagaggctttgcagttcccggattttgaagtcgtccagaaagctcagccgacccaacagggaacgtcaaccaggccgaccatctttttccagaaactgtttgacattcctcgcggctggcctgccaccgattggcacctggacaacacggcccgcaaatatgtagaaataactcgacagcatgtagagacgactttccagatcagttcccttcattggcagaatcctgaaataactcacgtggttacggcttctgatatcgccaactatgtgagggcttatttccaagctcgatccacgattgagcgcgtaaaggaactggacttcctcattcttcgcgtgtctcaaatttccaacgaagcattcgagaacgacaatcaccagttcgaattccacccaagttttgacatggttgtaacttacaaccaatatattcgcctgtacgaaaacgcagcatattcggccgatggggtattaataggcatatgagtctgaggcgcgattcagagctaatcgccgcgcacctccagatgttaagagccatgcgcggcaggtccgtttcagccggatggtattccacggctcgatatcctgacaaggcaggcggatcggtcggaatacaagtcgcgagaatcgcacgtctcaatgagtacggcggaactatcgaccatccgggcgggaccaggtatattagggacgccattgttcggggtcggtttgttggcgttcggttcgtcagaaacgactttccgggagaaaccgaggtaactaagcctcacagaattaccatcccggctagaccgtttatgcgatatgcttggaacttgttttccgcagatcgcgccgcaatccagaaccggatagccatgaggctggccagaggacagatcactccagatcaagctcttgcccagatcggcctggcgttggaaggatacatagccagaagcatcaggaccgggccatgggtggctaactcagcatctacggtcaggagaaagggattcaacagaccgctggtcgatacggcgcacatgcttcaatcgattagcagcagagtaacataaccaggagatcatccagtgatcagtcagagccgttatatccggatcatttcgggcgtaggcgcaggcgctccggtcgcaggccgaaagctgattctgcgcgtcatgactaccaacaacgtcatcccgcccggaatcgtcatcgagttcgacaacgccaacgcagtcatgtcatacttcggcgcgcagtcggaagagtatcagcgggctgcggcttatttcaaattcatcagtaaaagcgtgaattcgccgtccagcatcagcttcgctcgctgggtaaacaccgccatcgcgccgatggttgttggtgacaatctgccgaagaccatcgccgatttcgccggcttctcagcaggggttctgaccatcatggtcggcgcggccgaacagaacatcaccgccatcgatacgtccgcagcgacttctatggacaacgtggcgtcgatcatccagaccgaaatccgcaagaacgccgacccgcagctggcccaggctaccgttacctggaatcagaacaccaaccagttcaccttggtcggcgccaccatcggcaccggcgtcctggctgtggcgaaatctgccgatccccaggacatgtccactgccctcggctggtccacctccaacgtcgtcaacgtcgccggccaggctgccgatcttcccgacgcggccgttgccaagagcaccaatgtcagcaacaacttcggttcgttcctgttcgccggtgcgccgctcgacaatgaccagatcaaggccgtgtcggcctggaacgcggctcagaacaaccagttcatctacacggtcgcaacttccctggcgaacctcggcactcttttcaccttggtgaatggaaacgccgggaccgccctgaacgtgctgtcggcgactgctgccaacgacttcgtggagcagtgccccagcgagattctggccgccaccaactacgatgagccgggcgcttcgcaaaactacatgtactaccaattccctggccgcaacatcaccgtttccgacgataccgttgcgaacaccgtcgacaagagccggggcaactacatcggcgtcacccaggccaatggccagcagctcgcgttctaccagcgcggcattctgtgcggcggtccgaccgatgctgtggacatgaacgtctatgccaacgaaatctggctgaagtcggctatcgctcaagcgctcctggacttgttcctgaacgtcaatgcggttccggcgagcagcactggcgaggcgatgaccctggcggtgctgcagccggttctggacaaggcgaccgccaacggcacgttcacctacggcaaggaaatcagcgccgtccagcagcagtacatcacccaagtcaccggtgatcgccgcgcctggcgtcaagtccaaaccctgggttactggatcaacatcaccttctccagctataccaacagcaacacaggcttgaccgagtggaaggccaactacacgctgatctattcgaagggcgatgccatccgcttcgtcgaaggatcggatgtgatgatctaatggtttgcggcggactcgatccgccgcgaccttccataaatggagtgaggaataagcaatgatcaacatttctgcgttcggctcgatctgccagttcacggcaagcagaactttcccgaacggattcaccgtcaccgagtttgccgacgatgcggaccccatcgacagcccgccgttcactgcggccgataccggcgtcggcctcaacggtgacatggtagtctggaaccgggcgaacatcctggaagtcgtcgttaacgtcattccgaataccgagggcgagcgcaacctggcagtcctgctggatgccaaccgcaccggaaaggacaagtcgggcgctcgtgatgtcgtcggcctggtcgtggcgatgccggacggcagcaaaatcacctgcaccaacggcaccccaatcgacggcgttctgatcaacgcggtggcaagcgtcggccgtctgaagaccaagccgtatcggttccgatttgaaaaagtgatcaaagccggtactagctgatgaagaaaattccgctgacagcagtccccaatcaagcgatctcatttaacgccggtagcagctattggaagattcgcctgtaccagaacatggacatgatgaatgccgatatcagccgcgacggcgtgatcgtttgccatggggttcgctgcttcggcgggattcctcttctccagtacagccatcagtaccgacctgactatggcaatttcgtcttcgaccgcgacgccgattggacattgttcggcgacggcatcaacctgttctatctggacggcgccgaattcgccgagtatcaggcgcttgccacgaggaaagaatgagcacatcaacgatcagaaccgggacgaacaacgatatccttttggacgacaatggaaacatggttatcctcagggatgtcgaagcgtgcgcccaggacgttcgggcggcgatgctcatgcgcaccggcgaaaacattttcgatgtgaactccggcgtgggatatttcgaatacatcttctcgccgcagaaaagctatgatgacgctcgcaaatccatcgcggatgcaattttatcctcgccggatgtgaccggcatcgagcagcttgacatcgacataaccggggaagtcttcggcgtcgatgcgaaagtcatcaccatccacgggcctgttaccacaggagtttgaaatgagtaccatccgcatccaatacgccaacggcacccaactgttcctggacggcaaaaatccgccgcccctggacccgctgccctcgtttaacccgtctgtcgaagatctggaaggcctggaccgcgaaaagaacatcgacaagggcgactcctcgccggccggtcttcccgttcccccggtaaacgtcgattccaatgtcgacaacggcggaaccatcccggctccggtatcgaccgacgctgctgcggccgaatcggccccagaaggcgcccaggaagctcctgcagcaggccaaggcgacgagaaaggcgccgaggaagccccgactacagccccggtagaaaaggccgaggaaacggcctcgccggccgctgaagaggaaaccccggctcccgccaaggccacctctcgcaaaaccaccagcaagtaaggactcgacatgatcaacgtcagcggcttcggcacaggaattgtaatagtttcagcctcatcgttcccgatggggttttccttgtcgaagttcgctgatgatgagagtccgatatcctccaaagagctggagccgttcggatatgagatgctttatgacggcggcctattcgcctttgacaaggctgctcctctggaagtatctgtatccgtcatcgcagggagcgaggatgatattaaccttcgcatccttctcaattccaaaaagggatcattcagatttcttccgggcagcatcccggatatgacgactctcgtggccactcttcctgatggcggccgcaccgttctgtccaatgggactatcatcaagggtccggccatcgacaccatacagaacaccggacgacgcaaaggcaacacgtacacttttgttttcggtagctatcttggcgcccagactgcgcgtcaagccatttctaacgttatccaatcggtgctggaggtggtctgatgttggggattttcaccagcctcctaagttcgcgatctttttcgattgtggaccaaaacacaaaccagctagttgctgcggatttgaggataagccgggtcaacacccggttttcttctgtagggcaacgccacatgctggaagatggtacgaccaagatggattccagaacgatccaccctatggaaatcatcgtcgaagtattttgcccttcaattgatgtcgtcgatcagatcaatcaattgctcctggatcgcgacacactgtacaaagtcatcactcgcggcatgatattcgaacggatgatgtgtaccagcgaagcgctcaatcagactccggatatgatatcggcgactcctgcgcggctgacattctcccaagttctcgtccagaatcccaagcctataatgttcagaaatgcaggggactcttctatgatcgaccgagggctggccctagctgaagacgtggttggctcggccggcgatctgttcgactacgcagtaaacggcgtccagaacgccgcagacttgttctgaggtgccaattgaactctttcctcaagtctattctcaacacgcccactctcaccatacgcaatgatgttaccaaacttcctgtctggaagagtcttcaagtcaagaaagtggaaatttactcgccggcttccgtagtgtcgaaacctctggcgacgaaagaccagacggaagctcaagtgtacaccgaagctctggacattgatgtgaagaatggaaagatcatccaaccggtgcgactccgcatcaatgctatctgtccggacctgtccaccgttgaaagtatcatgaacgctttcaatgataacacctcgactttcgctatcacttctaagtcgatattggccgataaaatggccatcatggcgctcgatgtagatcagtctccagacatgttgaacgcggctgagatcaatatggaattcgagcaggttgagcctccagtattgaatgaattcgatcctgcgttccctcaagatagtccgacttatggggtacagattcaatctctttctgatgctaatttgctggatttgggcgccatcggcgattcgatatcttcggccgcaaaatcgctatataatcgcgtgaccagctacttctgaggatgtatcatgcttgaaatcaatcttcccgatggccgtcaaactcgcgtacaaatcgaggcgtggtcggcattggatggctgggacctccagcgccgtttcgtcgaattcgctgtcagccaagattccgacttccgccgctctttcaccatggaaatcctgggctatgcgaaagtgctgcttggcgacgatgacgccggcattccgctgaccaccgcggcagtcatcaacaaccacctcggccactggaagaacgtggaactggttttcaactctgttctcaagcacaatggcatcgacccggccacgcacgccgaccggccggactattgggaacaagtcggatcgcagatggccatcgcatttctggccgaggcgtccaagctcattggtccagcaatgaagatcgccgaaggactcgccaacaagccggagtgattcatgtctagtgatttggacgaattcatacttcggtatgaggccgatactgccagagccgagcgcaatctggagcgcctccagaaccagatcaggcgcgtgaacagcgcatcgacgagtggccttcaggatttgcgccacttcgcagacggcgcggccaccgaactcggcagagtcgttccgcagattgattctgtgacgagcgcaattcgcggaatgaacgcgcaactggcaataggcgccactggcgtggccctggtcgcggccggcgtcaaggcgttcatgaacaccagggaccagtacaatcagcagcgcatccaggcgatggacatcggcatcgccccggcacgcttggaagagtaccagagaaaattcgttcgccagtccggtggaaccatcagccgcgagcagggcgcggagatgaccaaaaatctggcagacactttccggcgtgcttatcgcgatatcgggcgagtcggcccggaagcgcgaattctgcgtatggccggcgtcgatgtcgggagcttccaaaagggcatgcggccgctcaacgacatcatcaccgatctggccacgaaaatggccaagctgaagccggacgaaatttctgcctacgctgatgcccttggcgtctcgcgagattacctgagcaccctggcgaagatcggcccggccatgggaaaagtcactgagatgacgactgcggaactccagtccagggtccagggcgagtccaacatccagaaattcaacgatgccctggcgaatctcaaccagacgttcactaccctggaaaaccgagtcggcgaaaagctcgcgcctgcgttcaccaagctgatcgaaatcatcgacaagatagtccaggctattcccaatgaagtggaaagcttcgcgaaggacaccaaatcccgttgggaagatggagtgctcgggaaggcgaccgttggcagtgatatcctatccctcctcagccccggcgccctgctcggtcgcctggcagcgtgggggactcgtcgcggcatggaagaatcagggctcatcgacaaggacaaggttcccggcgctcaaaccagcgaagacctggccaagaaacaagaagaccaggacaaggctactaagtccatgaaagagctagagaagctggctgaccagaccacgaagtctaccaatgattttgcggtggcgatcaacatgttcagtggcgcggtatcgtcgttcgcgaatgccgttgacgagcgccaagcttgggcagcctgggcgggggaaattggtcgggcggtcggcatgggaagcaccgcgccgacttcgcgggccaccggcgtctatccgcacgcgatctatgatcagtcgaagagtggcgcggccggacaagtcttcggcgagccaatcggcgcccagtctcttcgcaatcgcatgttctcgccgcagcgcaaggcagagccggtcaccgttccatcgtacatcaacgatatcatcaaagatgcttcgaagatgtacaacattcctgagctggacatcaagaaactcatatacaccgaaagccgattcaacgccagggccaccagcgaagccggagcgaaaggcctcatgcaactgatgccggaaatcgccaaggcgtatggtatcactgacgtatatgaccctcgccagaacatcctcggcggaacgcgcctactgcgtgaaaacctagatcgagcaaatggcgacatgcggttggccttgacatactatcatggcggactcgatccgaagaactggggcccaaggactcgcgcatatccgggtttggtaatgagcgctccaatcgagctgatggaagaggctcagcgcaagcagaaggctgcggccatgaccgtcgccaacgagacgttcgccccggaaggcggcgacatggacattcgtccctatgatggcgggcgactggaaaccccagaccagggcaagaaggaagatgagcgccgcgaagcccgtcgatatgacgacagggttgtgcgaccggaaattcgcatcatcgaccgcatgccagaccgcagcgacggcgaaatcctcaagatgtctaggcgtcaagaggccgaccgggcagactctggattccggaagttcccgaatcaggttcgcggcgagaccaagcagaacatccaggcccaactcactgccggagccatcgcgcaagtgatcggcgttaaccccaaccagatcatgcgccgcgaaatcagccgttctgacttgctattcggatacaaccaagccatcctgggcaagcagcaggagatcaaggccgccgcgaccgaagccaacaacgtattcctgtctccagccaagctcgccgaagccactgccaaggtgaacgccgcatcgcgagaaatggatattctcaggacgtacggcgagcaacttctgaagagcgctccagagcgcggccaggagctgaccatcggtcgaatcgatatgttggtcaacgttaccggcgcgaattctccggaagaggctcgcgagatattcagcaagcagactgcagaccagctgactacggcaatccaagatgcccaaaacgattccgcaactaagatactctactgatgaaaaagagaattctgcgagtaacattcaacatgccttatggacccgaagtcatccgagaggatttggatgttcgggtccggatcatgaaggctgcgttgcggattcagaaccgggcgactatggaaattttcggcctaaccactcagctgcgtgagtctcttctgtcacagttcaccgcgtggaagcaccggcaacgtcaagtcggcagggaagacgaattgatgatcaaagtgtcggtggaagccggctactctgaccaggggcgcgagcaagtttccagagtctttgtcggcgaagtggccattgtcgatatcatttcgccgccaccggacattggaatccgcatccagtgctacaccaggcaaatcgacaggacgaagaccattcgaaatatgccgcccgccaacacgacgttcgtcaagttcgtcgagtggggcgcgaacgaaatgggattgaacttcatctgcgataccagttacaacgatcaagttctgaagaatccgggccggtctatcactgtcgcgtcggcaatcctggcgtcgattcaggatatgtacatgccggacgtggccgcgttcgttgatgatgacatcttgatcgtgaaggatcgcgataaagtcattcgccctgatgaggtgaccaacgtcaattcgttcgttggaattccatcttggtctgaatggggcgttgaattccagtgtctgtttgagccatcgattcgcgtggctggaggcgtggcggtcgaatcgctcatgaacccgagcgtcaatggcaactatgtaatcactgctctggaatacgatttggccagtcgggatcggccgttctatatcaaagtcatggggagcccagcagcataatggccagggaaatcaaaccgttcaacatgttcggcgttcactatacttcgcggcaattctctgctgccgatgggctcagcatgatgtcggaaattcagagtgtgccgccagaagaactgctcaagggaaccagtgtattggcgcatccggaagatcatccggaaggcatctggcttcccttgaccgctgcgaacatcaatctttatgtagttgatcgggcgaaagtaatagctcccgtacaagttcttgcacttctgtccgaagtggtaattgactggaactttggtttcctcaaagactggaccggagtcaagattccatccagatttgtcgaagatatcaaaagcgtgaagacggcacattcgccttctgtagttgcgagtttggtagcgaacggctcagcctctatgcgcgagttggaagagtattattcgactcaagatgcatttaagatgatagacatcatgacggcgaagagcgtgaacgaggccttggcgtcagaggcatcgcacaacagaatcaaaaagggataattcctaaccgggcctgggaaggctatactagacctgccaaatcagaggctttcccatgtccaatatttctctaacatcagcaaaagctcccgacagaacgcgactgatcgccgctcttgacgctcggtcgcgacgggatgctctagatttcgaagtaatgataccggctcaggttgttcaatatgaccggaccgagaatatcgcgacgattcaacctctcatcacctgggttgacacggaacacaatgccgtccaaaggcaccagctggtggatattcctgtaatttccatgggggctggcggcttccacataagtttcccgattcagcaaggtgacataggctggatttatgcggccgaccgcgacacgtctcagttcctggagtcgttgtcaatgtcgaagccgaacaccggccgcatccataagttcgagcacggcctgttcatcccggacgtattccgtcgatacaccatcaattccgaagattcggccgctatggtcatacaatcgacttctggagcgaccagaatttcgattcgcggcgataacatcaagataactgcgccgtcgaacgttactgtggatactccgcaggcgaacttcaccggcaatgtgactatcgctaacaccctggtcgtaaacggcatcaacgtgaacaaccacggccacctcgaaaacaacccgcctgatgcccggacgaaaggcggcatggttgcttaaggagattttcatggcaagttttgatttttctgatttaacagcggggggtgtaatggctaactacaactacatcgtcgatactggtgtgatagtcgcagataccgccgacgttctgagcgacgttgaggccgagttccgcgccgccctcggtgccaatatcaacttggccgcgagcactccgcagggatcgcttgtcgcggccgaggccatcgcccgttccagtgtcatgcggaatgaagcgcgaattgccaataccataaacccgaacgtttcattcggaacgttcctggacgcgatctgtgccttgatggggatcgagcgcggttctgatctgtcaaccttcggctatggagttcaagtcaccggccgcagccaaacccgcatttccaccgggtctagggtccagactccggccggcgcgatcttcacagtgatgagcgatgtcacgatccctgctggtggtgtcgcgaccatcgatatcaaatcgcaggagtatggcaacattcctctgccggtcgggaatctcatcatcatcgacggaacaattggatggtccggagcaaaagtcatcacctccactcgcgtcgatccgggcagccgccaaatgagcgatgcagagttgaagaatgcccgcgttaatcgattggccatccaaggtcgcaactcgactatggccatcaaggcgtatgtgagcgccgttccaaacgtcacgtcggtgaacgtaatcgagaacaacaccggcgccgttcaagtggtgaatggagtctcgtttacccttccgtatgctgtttgggtctgcgtcgccggaaacccggataaacaagcagtcgccgatgcgttgtgggccgcccataacggcggaactccatgggactatggtgcgacgaacaacggcgtcccggtggacggtccgaatggcgttcctgtgcgcgatccggcgtccggtcgaaagtatgtcgtgaagtggaccactccaattatgtacgatggatatgttaacgtaacagtccagcaaggttcctcctctgtagctccggaagccattcagaacgcagtggtcaattacgcccaggggaaagtggaaggggaagaggggctggtggtgggcgcgagcctgtcggcattcgaagtcgccggcgccatcgctcgcgaaattcccggcatctacatcaaactctgccaggtcgcgtgcgtcgcggctggctcgccggctccggctccgggcgatttcacttcggaatacgtcatgagcgcattcggccaggctaccatttccgttggtaacgttcgggtgactttcgtatgactctgcctgcgtacaattcggacatccaacaagctctgaaatggctccataaccaggcgcctggaatcaccggcctgatccagagaaaggcgcaatggtatgacagattcagccgccaattctgggccaactgggagcgcgacgttttccacttgaaaactgccaacccgttcggccttatggtttggtgcatcatcctcggcacgccttcgaaagggttcggcctttatccaaaaaacagttcttgggcattcggtcggctacgccagaacttcatctatagcggtacacaagttccgccaccggcagacgcatcgcctggcggcaacttctacggtggcggcaatgccgaaattctcaacttggacgaaatcaggaaagtgcttcagctaagatatgtagcgctgatttctaacggctcgattgcatatgtcaatcgcatgcttcgttacatattcaatgatgatgagccatgggacgaggcgaccggtctgtacttctatctcatggactcaaccggcgagaatggccctgtggagaacttggcgatatatcggaaagattgggaaggtatggtgctgttgtccagttcgcccagagcgaaccacgtgctgacatcgacccctgccagcgacgccgattggccgggagtcgatccggccgcgagcggtattccggtaacggtcgaaacggcgtccgctacggccccggacggctccgctacggtgtgcaagcttactaagccggccgggagtaccgcttacgtctccgcgccgatagatgggccgctggggtccggtagcactgtaacgttctcgttcttcgcgaaagccggctccacccgtttcattgcaattcagtcggctgccgatttccccagtcgagccgatgccgttttcgacctggattccgggaacgtaatcagcgatcagatgctggacagcagcgtggtaagcgcccgaatgattcgtctggaaaatggctggtggcgttgcgttctcacgaccaagaccgtcagctcttcgttccgcgctgcttacgtcgctccggcagaaaccaacttcagctggattgattcgaattccagcgcggagattgacgtgcttatctggggcgctcagatcgaactgggtgatactccaactggatacttggaaactaccggggcgcccgtaaccatgaccgattatgttttgcagaacgcccagaccggaacagtcaagttcacacagccccttccgaccggagtagaagcgtattggactggagactggaaaggcgggactgcagcagaaccggccagattcgcagtcgggaatgggactcaggatacgtttactctgtcagaccccgcatacatcggcctacccaccagtggggcgttcaagctagaatacagggttggtccggcgcttaatctgtcgccgcaattgatcaacctcatgaatgaccgggcagttggtattatgccgacttgcgccggttgcgatgtcaaagtcattcaggagtaatgacgtgatcacacccgaactgatccccagtccgtttgccgctcagggcgataaagacccgattccacaaacctcctccactggcttcgcaaaccttctcgacggctatacgccggactacgaaatcagcctggcgtcgaacaacccgcaggccaaagcggtcgagcggaagattcaaaaccaactcttcttcatcgctacccagaacgcacaggcgtggcagcgacaaatggcgccgccgtggtttcagggcatgcctggcggctacgaacagaatgcagaagtcgtgcgcgtcggaaatgacggcataatgcggcgctatcgttccatggtgaatgccaatgcgagcgaccctctcagcagcacgacttgggaagaacaacccgcatggtcggcgatgcgctccaacatcccgatgccggccggaggcccaggcctatcttctggcggagaagtcatcacgaccggccgcaacttcaacgacctgttaaatgggacgtgggagttcttctctgattcagtggttatcgcttctcagaatgcccccgtatatccggcttccgctggtgccgctgctggcatgttggaggcgaaatcttgggtgtccggagccaatacgttctgcgtccaacgctacactgatcgcgtcgggaacgtcgctgtgcgcgggcttaatgccggagcgtggaccaactggatgtatgcggtaaacgtcatggcccttcaacaaggtcgggtcacctatggagtcgcggccggatcggcgaacgcttacacgttgacgctagttccgcagctccaaggcggcctggtggatggcatgattcttcgggtcaagttcaacaccatgaacaccggcgcctccaccatcaacgtctccggactcggcgccaaagccatcgtcggcgcggccaacttccctctcaccggcggcgaacttggccaaggactcatcgctgagcttgtattcgacgcagcaggcgaccgctggagaatcctcgcaggcgcgccacgcatccaagttggcaacgccgatcaagattaccaggcccccagctggaaacaggtgaaggattacgtcgcgtcccaaaagctgactgaagtggactgggctgacgtcgtcaacaagccgaacgtcgctatccaagacactacgccgtggttcgccaatctggagttgtctgacgctcggcctttcatcgatttccacttcaacaacaaccgcgccaaagacttcgactatcgctttatctctgaagctgatgggtcgatggcgttctactctcgccaggggtcagctggtcctacccaggatatcctgttcagcaggtcgaatgttacattcctccagccgcgactggatgttgcgaaaaacctcgcgtacatcgcgaactctggccccctttggcagaacaccactgccgatcagcctggttggaaattcaccttcgcacaaggtgtggacgccaacaacaacgcggttatcgcagtcaataccaccaatccggacggctcctatcgctcacagatcatgcgatgggactgggcgtccacgaacgtcatattcaacaatcgtccgctctttgccggtcaatacactccttgggattctggaaactttgatccctccaccaagttgactgtgaatgccacgaaccaaatcgccggcccgaccgggattcggaatacaaacggcaacaccggcaacatgaacacatggggctccagttccacgacggcttcatacggaaacgctgctcttcaaatcttcgggaaaggtggtggcgagcctgccgcgctttatttcgacaactcccagacaggatggtatctggggatggacaaggatggacagctcaagcgggccggctggtcgctcggcaataacgcctacgtgattaccgacgaatccaacattcgtttccacgtgaattccatggctggcactcctgtttggggcggaaacgaattctgggggccgtggaactttaatccgaacaccaagctgaccatcaaagccggcacccaggaaactagcagcactgcgatattcagcggaactatgccattcgctccaatcgcatcgctgtccgattattctcaggcccctttgacggtttacaacgcgccaaccggtccgtctgcaaaaccggccgtcatcgcgttcattcgtcctggcaactggggcgcgttcttcggcatcgataccgacaacaagctgaaatggggcggcggatcgctcggcaacagttccagggaaatcgccgattccagcaacatcatgaatctttgggcggccaacccgaccgcgccgtcctggaacggccaaaccgtttggcgatccggaaactttgatccggcgacgaaagtggatttgaacgccgcgaacgccaccaacggcaacatggtcttcaaccgcatttctggaactggtagcggcatagcttcgtcaggtcgagttggcgccatcaacctgcagaatggggcgcattcggggcaagcggcagcagtcactttcgagcggggcggcagtaccttcgtcaacttcggcttggataccgacaacgttctcaaagtaggtggcggaaacctgggggcaaatgcctatccggtcatccacgccgggaactacaataactacatcaaccaggcgctggttcaggtgggtcttggcggagtcggttcctatggcatctttgcggttctggacaatgccgctccaaccgcgaccgttcaaccgggagtggttgtggacggttccattctcatctactcgtcttgcgccgcaaactacaatagcggtcaaaggcctgccggaacttggcgctgcatgggatatgtagtcaaccgggatgccaacactcctgactccgcgacccttttccagcgagtgacgtaaaatgaaatggacgcggatcagaaaccctcgttggctggatgaaacaaacatccacgccatggtgactttcgaggggatcggggaagttcctttcactgccaatccgcacgacgtggaggcccatggaagggccatccacgctgcgatcctgtccggggagcacggacctatcgccccggtagattcgacgcgggagaaggccttgcaggacgctatacgagcaagggaaaagcgggctatccttcgcgatacccgctggcccatagatcgtcacgacgagcagaggcggctgggtatcgaaaccactgacggacctgggctgatagcagctcttgtttcctggaggcagcagattcgcgattggaatagcggggatcggccgcgacttcccatggctctgaaaacgatgtttaaaaatcaggagtattgatgaaaatcacgaaggatattctgatcaccggaaccggttgcaccacggatcgggcgatcaagtggctggatgatgtccaggcggctatggacaagttccacatcgagtcgccgcgagccattgcggcctacctagccaacatcggcgtcgagtccggtggactggtgagtctggtggagaatctcaactacagcgcccaaggattggccaacacatggccgcgccggtacgcagtagacccgcgagtccgcccgtatgtcccgaatgctctggcgaatcgtctggcccgaaacccggttgccatcgccaacaacgtgtacgcggatcgcatgggcaatggatgcgagcaggatggcgatggttggaagtatcgcgggcgcggcttaatccagctgaccgggaagtcgaactattctctgttcgccgaagactccggcatggacgttctggagaagccggagcttctggaaactccggccggcgcgtcgatgtcttcggcctggttcttctggcgcaatcgctgcatccccatggcggaatccaacaacttctccatggtcgtgaaaaccatcaacggcgccgcgccgaacgatgcgaaccatggccagctccggatcaaccgttatatgaagaccatcgccgcgatcaatcaaggctcctgatattcgcccaaaagaaaaggccgcttattcagcggcctttttgctttccggctttgcctcttcaaccatcttgacttcaaccggcgcggcggactcttcctgagtgaccgaatccacatagttccctagtgaactcagaacgccgattaacagcgctcttactaccttgtccttgactgtctcgcctatgatcttggtcagaacggatattaactcttcccggagtctggggctgattcttggccgaaagcgcttgcgatgctctttgcgtttcatgtttagtcctctgtctgcggtcttctcctcaccccgataatggcttggggatgcgctgtgttaatcggaaggttcgggcgctattataactcgtcgaaaatgctcgcgcttaactgtttaacgatacgcaccgcgatattaaatcgccttctttctggccaaggaactctggcggccgggtccggtctaaggcctaatttgtcgacattaaaacgagaaaacccggatcgcctgtagggcaatgcgtccgggtttatttctatctagtgtacgctaggatcagtgacttccgccccacccgtccagccagcaatcgaagacggcgtgcctcggcttgtccttggcgccatgggagaagtgcttgaaccggatgacctggcccttgagatactccctgtcattccagcggcgctgtttctcgtcgtgggtcaggctggaggccgacacgttgaaagtgactccaggccacagacgttcgttgcggcagactaacgcaccgaccattccggacggcgacaggttttctgcgtggctggagcgggccgtgtggccaagttcattgatgaaagcttcattgttgttgtgcatcaactcttccacgtcgatgatctcagcttcatcgtagtcgtatcgcttgactttcacacaatgcccttccttggcagtcgagcgaccgaacttgtacagcccatcagcgcgcttgcccatggaaccttcgaatcccagcattgtgtggcggcgctcgacttcgctgaactgttcgatggaagtcaccagttcctgctcgaccaggtgaatcctctcatagccgaggcagtgacgaaggaagttcacgcgctcggccgccctggctaggcgatcttcggtcggtgcgcgaggatcggtgaaatcatcgaacacatggaaagaccagtccggctcaccgctgtggcggcgaagatcgccggacgacttctggaaaactttcgggtcgctgatgtcgccgcagaccagctcgccgtccaggccgttgaacagtttatcgctgaggtattcgtagatcgattgattgttctgccgcttgagttgacgagtcagcgcctcgccttcgaatacgaagcagcgaaatccatcgatcttcggcgagaaatacatcggcagttggccttccagcagcttcgggtcaaaattcgatgcgagcatgggtttcatacagttctccagaaaagaagcccggcgaaccgggctaaatggcggtaagccggctcagatggtttcgttggcgtggttcagttcggccatgatcgacgcatagcgctcgtccgactccttgatgaacacgccgtcgtacatgacgcctttgcgatccttgatggtgtcgtaggccgcagcgtagcaggcgagcatggtagtgtcgtgctcttccgtcacatcgaacagagtcatgacggccaataccaggctcttgatggctaatccatgatttccgcgtgccagcgcgccggccagatgtccgaggtgctgcaaatcgtcgccgtaggtgggatgaacttcgacagtctcgctgaagaccgatagatgatcgaacagattttcaccgagttgcgcggccatgatcgtggcaaccaccattacgtcgccgatgccgtctttcacctcgactggtttgttataaacccaggcttcgcaaacttctgcgaactcttcgaccaacttcaggaattgatccttggccgaagagcctttgatcaggttccggtcggaaccccatttaacaaccaggtcgtgaagttcgcgactcatgatttgttcgatattcattctttcgattccttttggatttgggattttactgcgttgattatggacgccgtgctctggcgcgatccatccttggtggtgccgaagtagaaggccattaccgacttcagctcggcgaaccaatagccgatgatggtgccgatggcgaccgaggatgttgggtccatcagagcctcgcggccgaatgtgaagattgcgatgatgatgagaatggagcctgtcagaagagcgaatgtaatcgccgggcgaacgaaatcgttctgctgcgccgcaagcctcctcgcagaatccctgtcggccgcctctgcggcgaactggctaagctcggcctggagctggttctgctcagactgaaggcgattttgttcggcttgaatcgcaagctcctggagacgaacgcgctcggcgctctggagttcggcgagacgcgctagagcttccggattcgcgtctagagcgctagcgaccgaggctgggtcggccttcgaccccagcgccgtcgcgacgatagcacccacggcggcgcctgcaggcccacccaggagcgaccccagagccggggcagccgcgccgatcttactacctatgtctttccagtccatttcgactcctcaaaagaaaggcgccattacagcgcctttctccggccggtgattcagaactcttcggcttcggtcgcatcgccgacgccaccggcgtcactgcgaggctgttcctgcttgctgtagtccaccttcacctcgccgccgacgaacgacttgtacaggtcggccgcagccttgaagtgatccgggttcttcaccaggccttccagctcgaactggacgccggaccagctacccttgtcgttcgacatgcctacggtggtcatgcggaccaggttggcgaaagtcggcggggtgcgcaggccctgcggggtctgaacctttttctgggacagcgcggtcatgagcttcttcgaggccttgatctgcgaagacgacagggagatcagagcctggccgaaatcgccggtgtccggatcgatgacgatgacgtaatgaccacgggtgtcggcgaagtagtcagacttcttgtcgctgaccgaaccgtcttcgttcggcgcgtacaggcgtccttcgacttccttcaccttggtcgggtctttcatcatttccttgaagtcttcgacgctgatggcgcccttgaaaccgccctcggcctcgcgaccggcccagcggatgaactcgcggcggtacgcggccggaatgatcagcaggccggtcttgccgtcgtaaatcttgccggtgacggtgttcaggaacatgccggccttcgcgccttcgatgtacttcgggtcatcttcatcgacctggggagacatcttctgcagaacctggatgaaggggatggcataggactcggcatcggcgccttcgaagcctgcgccgtcatacgatcccaaatccatgaagtcgggaacttcggtagttgcgacggcgccgccaccggtggcaactgctacggccttggtttcttcggttgcttcggaagtttcggttttcttaccagccatgttaggctccttgtttgtcgaatttcagttatcgctaactgtgggtttataataacggaagttgcaactaagtaaagcaaattacatattaagatttgctctttttcatcttcggtttcgtgatcttggcctctttgtattcgtgcacgccgatgaaatctggcagctcttcgcccttctccagatactcgcggccgaacgcctggagggtctggtaatggacatcgcggttgatggtggcgtcatagccggcttcgatgatggcctcggccgccttcttcgcatcttccatttcgccgcgaccgaactcggccagaaccttggtcttgatgatgccgtcgttgtctgtgtcttccagccacttccagaacttcgatttgttctcttccttgacggaaatgatggccttcggctcgactttgaccgtgcgaccgtccgccagagtagtggtcttttgaccaagctcctccaacagctccggaatggtgttgcgcttgagggttttcagctcctcttccttttcggccagcgccttttgaagatcgaggatttcgacgtccagctgcgaagccttgtccaccaggttcagcagtcgatggccgatgtcggtagcttcgaccgccatttcatccatgacgccaaaatagtcgatttcgcccggtgcgttctctttcaggtattccgggatttcaagctcttgctctttcatgtccgcctccaacttagtgatgttcccttacttgaactaagtattgagtagatattatgccgcatcttccttgatacggctactgatttacatattaaatttcgtcgcgagtgctaacgtcagcctcaaacactccatcaacgacataacttgccaggttgcgcttccactccaagctgacctggattttctcgtcgatggaatccagacagatcaggtcgaagtacaaaaccgagttgacggtgccgattcggtgatttcggtcttcggactgcatccgcaactcgttgtcttcgtcggtcgtgtagtaaatggccacgtctgcggcggtgagcgtgatcccgatccctgctgcggccgggttgcccaggaacacctggacgcgcttggcctggaaatcgtcgatcaatttttcccgctcggcctctttggtctcgccgtagtatgtgccaaacgaaattccttgggcctccagatacgccttgatctggtcgatttcctgaatgcgcatggcccagatgatgatggagcgctccgggtcttcctccagcagaccctccagaagatcagtaaacacggcgaatcgcgggttgtcttcgggcggcaggatcaccggctcgccatagacgttgatatagccggatgcaacttgcttgagcttcgaacgcgctgccgcagcatcgaaagatacgtccagcatgaagtcttcgttcttgagaacgaagtggtagtcttcttccacgcgctggtaaacttttcgttgctccggcgacatttcgaagtatatgcgcttgtacaccttgtccggcaggaatgggagtgcttccttcttcgtgacccggaaactgtgcggctcgatcagggaccgcagcttgtccaggttccggaataccgggcgcccacgctcgtctttttcgaccagttgcggcggcatggtttgcttcccttccagcttgcgcatgatagcgatcattcgaggatcgtcactgggaaccaaaacggaaaattcggccacgaacgcccgataggatttcgttccaagaattccatcgcgcaagaattggaactgcatgaacaaatcggtaggcgcccgcgttagaggagttccggaaaggatgcgacgggccacggccttctcacccagctttacgatctttttcgcacgcttggcttgcgggtttttgatcctcgtggactcgtcaacaattgcgcaaaccttgaaagtttcaaggaatcgcaagacttcatcatagccagcctggtgattgatggcgtcaacgttgatggcgaagacgcgaagaactttttcatctgcgaacgtctcggcatacagacgatccaagcgcgccctggcctttttggaagtcggtcggccgcgccaatccacgctcaaagtcttgatcgcgacgtgggtgggaatctcgcgcagaatccagttggtgtggacgcccttgggggcgacgatgagcagcgcgtccacgcgcccctgtaggaagaggcgaacggcatcggccaaagtcgtccaagtcttcccggtgccctgctccatcaggtatgcgaaattccgtttgttcagggacgcggccagggcattgaactggtgctgcatggcctcggtcttcatgcccttgacgggatatgttttggctttcatttgttctccaaatcggcgaggaactgaacaatgttatccagtccttctgcatagctcgcaatttccaccaagtcgcggctgttaagctcgaacaaatcgagcatgggattcagcagcagccaatcggtcccgatcttggccaggacgaagccccggccgccccagccgatccgttcccgaaggaaagggatttgcccaggctcgaaacatctggccattgggcaggtggaggcgcgtttcggccactcctccaacgccttgaactcgacccagaactggacacctcgacgattcaggcaaatcgaatcggacataccagaccgccgcgtctccagaaagtcgatcaggattcggccgagtgagcgttgcttaaacgcattcgccgctttcgtttcgcgatcattcatcgccttcgccctctttggaaactttctctgcttgcgctgccagctttgctttttcgcgttcggtcaaaatcctcttgacggccttcacgatgaacatatcgattccgctgagcttccagcctttgatgaggaaccaagagcctgtcggcgttccttcggcaatctgctttccgtattgcagatatttttcaggcctaattctgaaacgtatcggctgatcaaccgagtcgtcaacacacatgatgtcgaggaactgcgactggcccttgtacaccgggtttttcccttgatctgccctcttcttctggcgaatcggttcgttctcatcagacagaacttttttcaccatcttgacaatgaccaggccatcgtctccatcgcggatatcccgaatgttctggatggggtttccggaagttactccaaccaactccggattgtcataagcatgaccccagagcgtgtgagcttcgttcaaatctgcgaattgaacttcagaattcgacagactcgcggcgactttctcccaatcctgaagcgtcttcaggtgggttccggccagctctttatattgagctttcagctccctaagatcggcctttaactccttcagatcggccttcaacagtttttccagttctttgtcttggctgattttcgccgaaagaatctgggcttccagcgctgctacatcagcagccttgtcctcaacatcctgtgccgatatcgggcaattggccagggcgatcctcgcggccttgacgtcatcacgaaggcgcaggaacttctctgccttcgccgggccgaagcctttggcgttcatgatgccgccgatcaggcgtccgtccgccactacccagttaagttcggaatgctccgggtccagggccgtatattctacgccttccttggccaattcgcgaaggattgacacagtttgctggtcgtctttcgccgcccgaagacacgcggccgcgtattccaggcgatgataccgcttcatgtagcaggtccagtacgtcaccacggcgtagctgaccgagtgggagcggttgaatccccaggcgccgaatgtcaccatttcctgccacacacggtgagcatcgtccggggcgacgcctatggtcttggcaccctcgatgaacaattcccggcgcttgttgaagaactcttcaccctttcgcgcagacatggctttccggattgccgatgtctgctcccagtcgaactgtccgatgtccttgacgatggacatgatctgttcctgatataggaagacgccgtacgtccctgacagatattgctcgacctgcggaatggtataggtcacaggctcgcggccggccacgcgctcgatatacttggtggccataccagaagacaacggacccggacgggctagcgccgtgatgtggtcgatgttttcgaacgcggtgatattgatcgcgtttgcgaccgaacgaactgcctgcccttcgaactggaaaatgccggacattttgtcttcgttgagaacatccaggaccgccttgtcgttcaaaggtaagtcgtacaactcctgcgcagtcacacagttcgcgtcctggatgacgcccagagttcgaaggccgagcgcatcgatcttgaggagattcaaatattccgaatccggcttatcgagctgcgcgacgccttcagaagttaccgtacagaagtcgataacttcatcgttgcagaccaggatgcctgccgcgtgtacgccagagtgggatgggtgaatttcgaggtcgcccatgcaggcggacgcgatctcatacttttcgcggaagtcgcggccgggctgagttttttcgaaagtgtcctccaatccttttccatatcgttcgtccgccgacgtatattcaatgatcgagtttttgatgttgtcggtatcgtggaaggggatgccgaagcgctttccgacgtgagcgataaccgatgcggccttgagcgtgttgatgttgcccaacttcaccacgttccaagtgccatacttctgctggagatattcgaacactagatagcgatgggtatcggcgaagtcgatatctatatcgggaagatcggaccgggaaatgtcgataaagcgctggaagagaaggcgatgagggagcgggtcaacctcggtaatgccaaggagatagcagaccaaagagccggccgaagagccgcgagctgggccgaccagcatatgcttcttggcgaacgcgaccagatctgccacgaccaggaagtagctgtcgaaatctttcagctgaatctgcttgatctcttcttggaatcgatcctcatactcctgggtccattccttgatgtggccgcgactgagacggtaggcttgcccctcgcgagccagcgcgacgatatccccatccaggtggatcataggcgccttcgccagtttcacatccgccaattgttcgactaccgcacgagtattggcggcggcggcatcgaactcttcgcgagtcatgatgtggcgtaaacggctccacaactcctcttcggtggcgatgtggcgaaggccgaccgattcccgcaccttccaggccgacgcgaaatcagcatggtcgatggacggcatgtcgttgtaagaggtaattaccaccggctttccgaatgccctggccgtctccatagcgccgtgcgcggcgaccatcgacgcgggattgatgtcaatgtagtcgattccggccagatccagatgggcataggcctcgccagcgaatttgatgacgccgtcagcttcctggaattcttgcggagtcaatccttgattctggaccgacttggaagtcaagcggtagaacttcttggtgtccttggcgagcacccaggctttgagcttcagctctttctcgccatcgtcggcgcatttgatcgggatttccatgccgaatccgcgaggcagttctgccttggtagcggcttgttcccaacggacgtgaccccatgttccatcatcgacgatggcgacgaatggggattcgatctctttggcgcgctcgatgatctccgggaatcgaccatatgcggcgccgtaggagtaaccagagcgaacgcggagctgagggaaagacatcatgcggcctccattgcttgatacgcccgatacactcccatgcgcttgcagacttcgtggagcagccgcacgtcgtcgagcgcccggtgtttctgtacatatgggccgcagtagtgctcataaagatgttgcagccgcatgcggtggccgaacaacggcgccgactcttccacagtacagatatcgagcgatgggaaattgacttcgtccaggccgaacttgccgcgagccagatcgcaggtcagcatgaacttatcgaatggcaggttgtgggcaatattcgcgtcggctctggaaaagaagtcgcgaactttctggcgctgatcgaggaaagatgggtgcttgatcaggtcttcgttcttcaacccggtgatcttggtgatgatttcctcgataacgattccaggattgcagatgaactctacttcatccaaaatcttttcgccatcagttatcacgccggcgaattcgatgattctcggctgctttctcagactcaccctttggtggaacgggagtcctgtggtctcagtatcccatacagcgaatatcatgtttgttccctcttatgtcgaaaggccggctgctttcgcgaccggcctgaggagtataccgcgacggctgaagatttacgccttctgtccgtctttcggcgtgatgcggccggagcgcatggtggcgtgaacaaacgccgaatagttgatcgagtccaaggccgaatcggcatccttgaacccgctattcgccaggcgagtgagtttacccaccgtgtgcatcacgaacagggcgagtcgatgatcatcggcggtcttcgccaccaggccgttcgggaagaggatttccatgatctttccgtacatcaggtcattgcgaccataggtgctctggcgggcgcggaagacttctgctgcggcgtacagattgttgagaacatcttccgcgaaatcatctggatgggaatcatcttcgcccggccagacggattccatggcgaacggcgcggcgtcttcggtcgggtcttcgggctgagccgtttcagcgagcggagacggggctttcgcaaacgcctcgtcgagggtaggggcggagttcggggcggccgggaacggctcgcctgccatgtcgttgggcgcgctatcggggtcgctatcggccgcgacggcgaagaacggcgcatcgcaaccttccaggttcaggatgtaggagtcgatccccaggctattgtaggcatcgatgatgtcctggcgatcatcgaacgccgcgacgatcttggtgacgccttcgattttcttcaggatgtcgagcgcgactgcccgcttgaactgaggcgccggctcggtgttaccatacggccgcatgatgagttcatactcgcgatgttcggcgatgccgagttcgcggtggagcttggccctggtctggaaaaagtggttgtcggttcggccggtgacgaagaaaatcatgaggtcggcgtcgatggcattcctgatgcgacctacagcgtgcgggttgagagtgtccttgtcgagacgagaatgatactcgtcccattgtcgttccaaggctaagctcttgcggtggctatcgtcgaagacgcagccgtccaggtcgaagatgatgatgccattcttgggtttgcgttccatattcagatttccttggtggttgctttctgggtgacggttttctcgatgaacgtcccatcagaagtgaggcggaaaacttcgccgttctggatgaaatcgaacgattgcacgttcatcgtgatgcgaatggattcgctgccgttggtaacttcgacttgtgcgatgtcgccaactttctcgacaatgatcttcatgttacatggacttcccgttgacggccacagggttggcctcctgtttttccgatccccagaaatcgcggcgcagctcttcctgctcggccgagcgatccatccaggggcgatagaacttgcactggtagataggttccaacggaacatcaaccacaggaatctggccgggcttcgtctccagagcggacatgaaccggtcataggatttctgctggatttcctcttcattcatcaccttcgacccatagcgcgggaaggcgcaggagccggtggcgacgcagtgcggctggagtaggctgtcgaacatcggatagacttccagaaccagccggcgcatctcgcggaacacttcctggtattcaccctgggtccgaacgcacaggcgaaccttcgccatgtcactgagagtccgcagattgaacttggccgcgatcttcgtttccatgttggaaggaatgattgcacgagcgtcctggagcgacgcgccggcctccagcagcttctggtaactggtctgcgcgtcggctatggcatcgtgccacaggcggttcagctcttcgcgggcgtggtaggtcgggtcaggctcgccatttaccgtagccggttcgtcgaattcccagcggaatgcttccggctgaacgacggcgctgatttccagagcgcgactggtttcctgctggtaagccccggtgcgagtccgaacgagttgatgggtgaaattcttgctgacgccctcgatctggaaaatgaagtccacgaactcgaacggcgagcggatggtgtccagcatgtacttccagtggtcgagcttttcggcctcggtcatggtcgccgggtcttggccgcgcatgcgggtggacttcgtgcccaagagcaattcccaggcgttctgggtgtaactaatcagagaaatcttcatcagaaatcttccggaattggcgtgaagtggaatttttcggtgagagccagggccaggccttgggcttgctccctgttaaggccatactgctctatctcttccttgagcagttcgcaggcctccaggcgcgcctcatactcttcagcctcatggacggatgagaagacggctccatcagaggttcggtacacaagttcgatcgccatggtgacctcagtagcagcggatgatttcggcgcggatgtcgcgacggtcgaggtagtgctcacgaatcttgtcgcgggcacgctcggcctcttcgcggctgccgaacgacaggttgaacgacgtgaaaggcttatcatccagttcagcgccggtctgatacaggattcctaccagaacgaaagacggcgcggtcttcggctgctggtcggtttgcagttcgagaaaggacatagggagacctcttcaggatgatctggtgcgtacattaatagcgctcctgctgagcagctacggtttccggctcatagatgagcatgtcaacgatttccgggcactggcctttcacccagtcgatggccgcgaccagtgcggtggaagcggagaaagagaaagtgcggtaagactcatggatgtacggcgaccccatggaatcgcgctcggtggtgcgcgaaatgactgctttgatattaacgatccggcccatcttcggcctccactttagcgattatatcggacaggcttaacttctcgccattcaggaaataactggcgcgaaacttcctgtcgccctctggcccgacgattcgggccgttattgtgagactcccgccgccaagggcatcggtgtcccggaagaaagctagcagcgcccgcttgagcgctgcttcgcgaggatcgacggccattaacctaccacgttccagccgtgctgagcgcaccacacggcaccggtccctgcaggaagactattcagaaggaacacaggagtcaggcggccatcctcggtcatatggacgaagtagcgggcgccttcaccgagccactcggccttggcgatggcgcgttcgagattggccttggtggcgtaggtcttggtgtggttcttgtcggtggagaaggttacttcgcgggccatttgtcgattccttttggttgaagggtttcgcgtttcgatgagggaatattacgcccacctgatccagaagtaaagcacttttgtaaattacttcacgaacattttcttggccttctgataagacgaagaagtcatcaggcgctcgatgacgtccatgtcagaaaccagatcgtccagaaggacgttgcgccaggtagcgaaccggccgagcgagaagatgccggcttcatgggtgagattccagatcatggattcgcgctcgtcgcggccgagcggaacgattttgcctttggtctggatggtcggctcgccgtcctcgatgagatgccttttccttatgccgaaggccgcgcaaacgtaatccacatcccagtcgctgtcccattcgatggtttcgattttaccatctaaagtctccactatccccttagtgatggattcgacgatcagagtatcaccggtgatggacgctcgaaacgttcccactttaggaccagggaaatacacggtctggaagacatcacaggggatggaaagcttgtatcgactcacgatgatggaggttccttcaccgaatgacgggtcgattcccaggtccagccctgccgcagccagattggcgcggaacggcgcggtgctgatgatattcacgtggtcatcttgccggcgaagatactggaagaaagaggcgtcgaaaggacggctccaagtgatacgattcgcaagcttagccaccagctgctcatagtagtcggccggtgcgatccaacgcttttcagtcgccagattccagatggaccggtccgacaggccgcccgttactttcctggagtacatgttgcagtggtcgatgcgcggctgggaaatgaactcgccgtcgatgtagatagctttgtgtacagtgacttcgcggaacgggatgccggtgagttggccaatcactggcgagcggaatcgcagaagtgcgttgtggcgctccttattctccggcgtcgccgcgtcgatgatttgggcttgaggaaagcgatgcgcggcgatcagtccggcgagtccggcacctacgatgattactttctgatcaggaatcatgatgtgtcccttatgagtgtacaaaacttgagaggataaaaaagggacccattttcatgagtcccttgaagagctagacgattcaggctcagaggagcggcggcttactcctcctcaccttcggaaccatcggcgccctgatcttcaccgtcgtgctcctggccttcgtcatcggccttctcgtcatcgccctggccagcttcgtcttccttcgaagcgatggcaaccagatcgacccagcccatgatttccagcttgctcaggtagctgcgaaccgaagtgccatagagcagatgggccaccttctcgccgaaggattcgatttcgaccggctcaccaacggtgcagtgctcgttgatgtatgcgaacaccttgccgcgagtcgagaaggcctgcggagtgccatggccgtcgccggtcgggatgaagtgggtggcgcgcggacggcgggagccattggacttcaggtcttcgcggcgggcttcggccttcttgcggcgctcttcctgctcttccttgcggcgctgcttctcggcttcgcgctcagccttcttctgctcggccaggcgcttgcgctcttcttcgcgagcgactttctgagcttcctgggcggccttcttctcttcggcctttttggctcgctcggcttccttctcggccttcttctgctcgcgctcggcttccttggccttcgccttctcggcctgctcggcttccttcgccttggccttttcagcacgctcggcttccttggcggcggccttttccttcgccttctcggcgcgctcggcttccttcttctcacgctcggccttgcgcttctcttcgcgctcggctttcttctgttcggcttccttggccttggcctcggccttctcggcgcgctcgcgctctttacgttgacgctcagcggccttctcggccttgcgcagggaggctgcttgttccttggtcagctcttcgccttgggtctgctcgttctggtctttctgttccatgttcttactccgggaatgtttaaagggatggcttattggcctgtgaggggattatctctaaactaattgaagaagggaataccttagcctgaactttcctaaatattttctttcgggaaagtccagactccagggaacttatttatgttcgcgaagtttaactcttgcgcaaaaacaacaagtattcaactgcacgagttatgccagtatacatcaactgactataaggaattgacggtaagttttcttccagcattgcgactcgcttccattccgatccctgcgacttgtggaaagtcatcgcccaaccaaagtcgaatccgccaatggccttctgcgcctccagccgcacatcttcctcggccgaaaagctcaaaggattgaacttcacccagcgctcatagttcgtgccgataatgcgaactttggcaaacagcatttcatccggctcgtcatcatcttcttggccttcggggaccggcttgaagtccagcagaattgcttgctcgccgttcatgatgccatattcgtgctggttcccggtgcacaccagcttctcgccgatttccggttgtacacccttgtagccgaggatgcggcgcgccctggcgttcaagcggcggcgagtattgttgtaggcgcaaaggatcacgccatcgtcatccaggaacgtccgcatttcgtcgtccgacatatcgaagccagcccggactaggatatcatcatactcgcggcagggcaggcgtttgccctggcggacgaacatcgacgctcgaacgatattcccggcgttacgctcgatttcagtcatgactgtgtcgcagctatgttcgtggaaaacctgaacgccgcgcacagggggaacttggccaaagtcgccgatctccagaaccggaattcgatgcgccaacaagcgctcttcatcccactcaccggtcattgacgcctcgtcgagcacgaccaacttcggcttctcgtcgagcgagtctttattggcgaacatgatttcgccgtcttcatcctcgccaatcggccgatagatgaagctgtggagggtccgggcattgatacatcccttctcgcgaagccttgcggccgctttcccggtaggtgcgacgaagaccgtccagtccatcgagcagcaaagttcggcgatgatcttcgcgatggaagtcttaccagtaccagcgaagccggcgagtcgatagacctggcggcggtgcgctcgatcacaccaaccgcgataccagtccacaacggaattgatcgcgtcgatctgctggctgtttggccgaaaaccgaatcgctcttcgatctgatcgacggtgaagttagatgctgacatatttgcgttctccaacgctaggtttaattgaatcgagactcagtttaagcacgccgtccacagaccatccagtatcacgacgatacttgcggccttgcggatcgacatagaagttcttcgtgcgccgcagcagaacatagtgccaagcagctccaagtgcgtggacccttcctttatacggaaaagccttcgcctgctctgcggcctccttggctccagggagccagcgtacggtcgaaaggaccaggaccgcacccttaatagcctgggaagcggcgcggccgtcctgtgggctatagcgatgtctatcgaagtctacccagtggtggttgccgcgccggagcttgaccgttcgggatcgcccctcgaacaccaccgtgccttcgtgagtaaaaatatgttccgccatcgaatgttcctttataacgtacagttatgctttacctctgcgcaggaagagtatactatcagctgactcgccaaagcgagcgaatttaatccaactttacttcggcaggaaagtggccgatactagcgccgccgcctgtactgccctccaaaacagaggatacattaaatgcaagaatgcaagatttcccgcgaccaactcccggtcggtaatccgaatcccaatgtcgacaagacccgcgacccgaacctgaagcccggtttcctgcgccgcagccgcgagctggacccggcgctggcagttcgcattcgtcgcgagctgatccacgccgaagcgtccgacttggccaaggccggatgggtcaattcacagtccagcctctatggatcgaaagccttcccgcgccattccgtcgttcgcgttaccggagttccggaagatggggctttcatcggcatgctgatcggcttcatcgagcatcgcgagcacggcgaatgggcggtcatggaatccggaacgaaagaaggcggcgccgtcaccattccagtcgatcacatcatgcgagcgtcattcgccgaagccgaagagttcgccgaaaagtgggagcggaacttggggtggcgtctcctgcgccagctccgcgagtgcggcgccctggccgggactgaagacgagttcctgcggcggatcatcaatcgatacgttcgtgatcgcacgatcctcgatcaccacaaagtcggcgcggacaaagactacactgatgcagtactcaaaagcatcggcgaaacatggccgaaaattccttcggggaaattcgtcggacaccgagtcgcgcagctcctgatcggccacaagctaggtcgagcggggaccatcctgaatgacctggtggacttcctggagaagttcgcggccgggcgcgataaagttctcaacatcgccatctgtaattgaggtgaagggatgaacaataaaccgacgctgaatcaccaccatcaaactgcattgttgtatctgtataacaatccaaatcagccggccttcacaggccccaacaatcaggcgctcaatgaacttcggcagatggggtatgtaaaggcgaaagaattcgaaaactgggcaggcaccggccatcttaggatggaatggacgctcaccaaagccgggattgagcgcgtcgaagtcgggcttctggggaagtgcgacgcttgcaagggaatcggtcagactttgcttcgggggaagtgtactgtttgcaatggccgcggccaggggtggatcagcgaatggtcgcagaagccaatcgaagataatcctcaaattgtccctaagttcgaaaagaccgatgcgaataggcttgcagacgccattgaagaaatcggccggctggaaaaggcactggccgaatccgaaaagcgcgggagcgagctggccgcgagctattgtgacggcgtagtcggcgatgaatacggccatccttattgtcgttataaagtggaacgcgacgccgccttggccgaagtcgagcgcctgcgagaatcaaaaggcgatccctctggcagcttcgacaggtgtatgaagatgatgtacgagcgcgacgagaatgcaaaacgactcgacgccgccttggccagggtcgcggagctggagaaagaactggcgatggcacgcgacgcagcagcaaagggtgatgctgcccgccacgctgctggcggcatggaaatggagattcatgagctgaagacgaagctggccgagctggagaaacaagagccggtggcatggggagccttccatttcggcgggaagcgcgacggcaagctgtatgcgcaatgcgaaactgaggctcagatagaggcgtatatcctcgacatgcaccgaagcagcgactcattgacgctcaggaaaggccccctctacaccgcgcctgtagtccaggctcaacccagcgtgccggaggggtggaagctcgtaccgatggacccgacatcgcagatgacctctgtcggtcagtccctgcgttatgactcggtaaacagcatcggcgagatttaccggcaaatgctcgcagtagcgccctcacccatcgatccggccgcgcatcctcagccgtgccagcaaccacaggcccatcctgcccgctgcgggtgcgagcggtaagtgccaagtaaggagtttatgtaatggaacagcagaaaccttcggaagtagatggagccatcgccatgaccgatctcgatattcgcattcttcgaaaggcgaagccagaagcgcaggacgagtgcgccgtgtccatgttcgcaacggcgatccgccagaaactgcagcgctcccgcgataaaggccgaggcggctggatcgactgcgacgaagatattctgatcaacggattcgccgaacatgcgctgaagggaaatgagaacaacctcctggacctggcgacgttcctgatgttcatgtgggtgcgcggcatcgatgatgcgaagattcccccggcgctcgaaaaggcgagacagcacaagatcatggaagcctggagtcgaatccatgaagacggcctgaactccgccagaaaggcgagtgctgcgcgacagttcgtggaagtgccacgacgcaaggggcgcccggagcgacttgcatgaagcctcacgaaataagactggcccaggccgaagagttcctgcgcgaactcggccgagggattccggacgacgaacgggtaatggtcggctacgctgaagaggccacagtccagaccgacgagaacggccgcaagctcaacgccggctggtggcctgtgccctggaaggaagggaaatacatcaactccagatccaacgcctacgcgtgcatctcgtcgtccatcaagacgcccaacccgaagaccggccagatgcgatactggcgcggcgaagcctctttcggccacggcctggcgttgatggtcgatgacatcggctcaggcaaagggtccaagggtgacttcgaccgcgacgagttccgcgagcgactggagccgaccgcgattgtggagacttcgccgaacaactaccagttctggtatttcttcaaagagccgatgtcccacatgctccagttcaaggcgctgctctattcgttcgtggaccaggtgctaaagaaaggcggcgacaacaccgtcaaggacgtcagccgttacggccggatgcccttcggcttcaacaacaagcgcgggaaagacggcaagttcaaatatgccgacgaaaacggcaagcccgaactcgtgcgactgttcagcgccgactattccaagcgctactcgccagaagagatcgcccaggcattcggcgtccgcatcatcatgccacagatgaagaaggtggagataaaccgcgacgattgggtgtatgaccaagtatggctgaagtatgccgagcacatctgcacgaaatacaagatgggcgaagcggcaggcggccaggtccagcagaatatgtccggcaaataccgcatccgctgcccgtggggagacgagcacacaaatggcgatccattcggcgcctactttcgcggaccgatccctggagccgagcacgaatatgtgttcggctgcggccacgatacttgccgcaaagagcatcgccggacgtgggcggccttcacggatgaagtcgtgctaccctatatcgtcgaacaattggaaagaatcaaccgccgtcatatcggtgaggagtagacaatatgcaaaacgatcctggaatcctgattaccgccatcggcttgctgttcctcggccttatcatcttcttcgaaggcctaaagggatggaaaatacaagtcgcaaacttcctcgcgtcgcttctgtgcttcttcttcggcctttctgctttgacgttctggttcgtcgttgcgtttgacgtattttaatcgacgaacggtacagaaattttcggatgggggcggaacttattagctatgccggtttaggtaggagataatagccgtccctttcgcctcaatgtgtagaggcaatgttgaatccgatcatgtaaagcagaaggcggcaaacctaacatgattatcgacgaagataatatttttgatgatggcgaatcagggtccagtgagtttgatctcacgcagatagaagatgctggaatggaccctttgatgaccgccgcgagcaaggcggccgatgatgcgattgcgaggaacgaaacgcatcgcgcgagcaaggcggcaagatacgccgaggcgtatgctgaaccagacttgaggaagcgagcgcggttactgatgctcgaccaggcgttcgatcttccggtcagccgggtggtgaaagggccgttcgatgacttcatcacgaaatacagctcgacgtcagacagcaactacctcgcggtctatgatacgttgttctgtaagggcgacggaaccgtcccacacccgcacttcgacgagtttcgcggccggctggtggaccatcgcggcgtggcgttcaacaacaagaccctcgatccgattgacctgatgggcgccctcgcggctgcggccttggacgatccatcgatcaagaagacgattgagacttgctgcgtttgggcgcgtcgatatcgccgcaactcgctgatcgagacgtttgagaagaagataccggattgggacggcgaagagcggatcgaaacgctgctgatcgacttgttcaaaccgttcgacaccgagcttaaccggatggtgagcaagtatttctggctgagcttgtactgccgcatcaactaccctggaatctcggcgccgatctcgttggcgttgattggtgggcaggatgcggggaaatcatatttcggcttgctgatctgtaaggaactgtccggtgggcgcgatctggctccagttcagctcgacctgagccgacacgaccagacgccgttcctgcgcaacatcaccggcaactcggttattgcgaacgtcggcgaaatgtccggcttcaaaaagggcgacatggaacgcatcaaagaattcctggtgcgatcttcggatacattcgatcagaagtttgagcctggcgaaacgatcaagcgacaatggatcaccatcatggacggcaacggatacgatggactccagcgggacgactccggcaaccgtcgattctatccgatgttcgtggcacaacttcccgacgaagatggaaagccgaactgggttaagccgggcgatggtaatgaaccgttcaaggtggacttcaccgacttcggccgcaaattctggcaagcgatggctgaatgccgcgcatggatcgaagagcatggtgtcgatggatacttgaatatggtgtctgaagcgaaccgcgaagtgcagaacttctctatttcggaaatggagaatgcgcgtggcgtagttcgtgacgatacgattgacatgtatctgatcaatgttctgatcagttgcgagttcgaagagatcaagcctggcaggaatgccaagaatcctggatggagggctgacaccgtcgccattctgaaatggttcgatattctcgccaggaagaagccgatttctcgtcaccttactccgcacctgaaggcgctgggattcatcccgaataagaacggcctggctggttggtgcttacctgtcgataaggttgcgcctggatggacgaatggcatgcacacgacgttgccgccgttcaatgatgcgcttgtgtacttgctgagaaagggcgacccggatatcactgatgaggctgccatggcaaaaattcgggcagtccgggccgagcgagccaagattttgggcgaggatttctgatgggctgatggaaggtactgatggagtgtacttggactaggccgccttcgggcggtcttttctttggcgcggcgtacattcgatttaggttgtggccgagtgagattcggaagctatctggtaattagggtggggtggcggttgtgtattatggaaagttagtggacggtggaccgaggattttgtgtggtgagtgggtgaattgtggaaaatcgacgattctgactggatttttgggtcggccgcgtcgagcttaccggtaatttacgaaaccaggaattagggtcgagccttagtgccgcgtgggtttgaagggcttaaccggatactttccggtttcggatgcagccgcaaaagtatactacagcgaaaatcgattgcac

SEQ ID NO: 45 - DNA, 44801 bp, synthetic construct
  source 1..44801: mol_type = other DNA
tctaattttggtatcgtcgtgtgagaaccctcccgactctgatcagcccacccttcccccgtaggccctccgcctggtgggccactgcctcgcattgcctgggtgttgcctgggtcatccctgggagcttccagctacgctgggtggtggtgggcttccctgccctgtcgctgtcctgtcgccgcccattctacgcatcctggcgggagtgtcaacccctgggtggtcggtgccttgctcggctacgctccagcgcttccgcgtggtcggctaggcggttggctcgccagcgcttcgcccactctacacctcgctccacctcggaccacttgtccgccagcatcatgcgctgccatgccgcgtcctgctgtagccatgccctgctggctctgtcctgtctgctcagcatcctctgtctcctctgtctggctccctggggcttccctggggcgctgctgtggtcctgtcgggtgatggtgcgggagtggctggccttgcctcttgtgcctctgtacctgtggcattgccctggctctacctggctgctccctgggtattccctggggctgcctgggtggccctggccactccctctaggccacgtactctactcgcctccacctgtcctgtctagtcctgctctgctccctggagcttccctggatgctacctgggtgctggtctatctccctggctctgcctggcgctgtgctgtgctaccgctggtcctgctgtcttgcctcgccgctccctcgcctgctcggtcgcacctgcggcgctgatggactcctgtttgtccattgtgtgtgacataaccgcagccttagtgccatgcgggttccagggcgatgggtctggctggttggctgctccctgggtgggggctgtcgctccctggtaacgcaaatcctggctagctagactaagcctcgcgcatggggtctctatacgcgtgggaaggctccagggagcgcctggggaggggttgacacgttggcggtaggtctgtagagttcgccctgtcttcacgcaataccgccttcacaggcagcctggagacagggttgacacactacccgggcatcggtagagtacgcagccagaacgacgggagattgcaaccttccaagcgcggcacaagccataggcgcaagggacacggcaagctcttagggcaggaaccgcagtgtgtaaggccggcaggcatcactggggggattgacaaggtaatagatgcggtaagatgtgcggcgtcaagtggtcccgatgtacacactgtgaagggattacggcgcggtcagacagatgaccggcaccgcttgacactgtaaagctcagtcggtacgatgggcacccatagcggacgtgatggtccggggcgatgcggataggacgccttgtttataacctgaccgcaaagctgtgactccagccgataggactgacccaccacgtaaatacagacgggttgacacgacaaggccaagtcgataacatggccgccacaaagggaagcgatagcttcctggcggtagaggttcgaagcttcaccagcggtacatggactggtgcggtaggttgaccgaagctgcaactggttaggcagggtcccagggaatacctgtcgggtgctgaagactcacccaaaagagtctgagcgggaagcctccccgtccacggttaagcaaaggcacgttagtgccggtgggaacgaatagagtgtcagtgggatcgagaactagaaacctcggttaatcgcgactgacagtatgctgggtagtatcggtgggccgattgaacaaggccaggcagatagcgcaaagggtacgggggatgagtgaagacgatcccgaagagtatgcgcaggacaagccagaaccgctgatactacagggactatgccaatgccaaggtttgtcccttgaggcccttccaccgaggggattcaagagacagacctagttgaggaatgccgatggcacacttcaaggctaaggctcccaagtcgcccttcgctacccaggtagcgtactggcgggattgggaagccaaacgtactaagctcatcgcacaggataacgtcgaggggcgcaaagagcttcgcaagatgcgtgacgtgcgctacgctaccgacccggagccagcgccaggacgctaccataaccctgaacagaaagcgttcgtgaagggtagcgaaggcaaggcgcggaacatcctgaagggatggaacgctaagaagtcgcaagggaagggtttgtaatgccacgtgtgaatgaactgacgccgcgtcaacgcaaggccgccaaggctcgccgcgacaaggcacgccggattgatctagcgcacaagatgccgaaaggcgccgactgcccgatcttccgcaaggctgaacaggcgcaagctaagcagccccgcgtcgataccctgaccactccccgcagtgccggctacctggccgccgctgcttacctgaacaaatccatctgaggtacataccatgaccaacgcaatctccaaaaccgtaatcgcattccgtggcaccgaagagatcaatcgcgctatcgacgccatccgtgtccgtggcaaggaactcgacgaagccatccaactgaccggcctgtcgatcatccatcacatcgaccagtgtggtgacgtgaccgtggtcaaggcgctgtatgaagccatgccgaagggcagccgccgcaatgcgctggtcgagtggctggtgctgcacggcaaggtacaggtgaataccgacaagaagtcgaacaaggacctgcccttcctgtacaacaagttcggcaagaccgatctcgtaggcgccaccgacaacccgtggtacagcttcaagcctgagaaagcgctggaccaggagtttaacctggccgctgccctggccacgatcaaaaagcaggtgctccaggctcagaccaagggcaaggtgatcgtcggcatggaactgctgggtgatctggaagcgctggccgccaaggctgcacccatcgccgagcagagcaagcgcgctgccgcccattgactcaagtcgaacgcctgctaagcgggcgttccgctggaatcaatgacaactggagaaacacgatgagctttaagcaacgtctgcaacgtcaaatcgccctggcccaatacagccgcccggctcagttcccgtacggcgagcaggccgtccaggcgaagggagagtgaccatggacttctggattgccctccccttcctcgaactcggcctcaacctcggcgaggatgaactgcgcatgttgtggttcagcggcctgacggtattcttcatccacctcctgaagcggtgactcaagtcatggccctggcgggcgaccctcgcctactccggggccatcgctggactcatcacaagcgagaactaaaccatgcaagctttgaatactctgttgatcgcaatccccaaggacccgtcgaacgcattcaatgcagccgacaaggtgctgtgcgcccatggcttccgtatgggtgacctgaataccgcgcacgtgctgacccctggcgggttcgtagtagtgggcgccggcgtgaccgtcaaccgctacgacgaagcgtatcgtatgagccggaacctcgattccgaaggcttcgacgttctgctggtccagggcagtccactgtccgggcacgtcacctgccaggcgtacggctggatcaatgcggaataccgcaagggctgcgcgaacgggcgcccgatcttcgacattgcaggaacctcgtaccatgtcctcgcgtgatccctaccgtatcggccaccgcgtggggctggtgaactacagcgaccgctacctaggtgccgacgcggcaggcaccaagggcgtcattgaagccataacccgaccgtcccgctgtatgacgatctatcacgtacgctgtgagcggaccctgcgcttgatcgaggccgaggcccgtaacgtgcgattcatcagacagctaccgacccgcaaatgacgtggcgcataatcgtcgtcagcccatcaagcggctgcgccttcgtgtggagtctcaagcggcctgtgcggccagtgcgattctactcccgcaaggcagctaaacgctggctccgcaagcaccgccgacagggcttgcctggccactactacctcatcgtgaactggagcaaacgcctatgaatcctacttacgtcgtccgcctcaaggacggaaccacccgccaggtagtcgccgacagcatcgtcaccggccacgccttcgtcgaactctggttcctcggcggggcggtcgctatctacccggcctgcgaagtacaggaggtccaccgcactgacctcgtaaaggagggtggtgatgaatacccgcactgtatacgtcaagccgcacagttcgaggtgcccgccggtattgtccgcaggacgcctgaccccgggtgaactctaccacgtgatcgcacctgccgaggtcgaaggcgtcattgtgctggcaacttcaggcccgtggcacatccggtccgtggtggtgcatagcatgcacccctcggtatatcccgtagggatggctgtcactgacgattcctggcggttccgccgcctgggtgtgagcgagtacgtccaactaattcaagggtacgaacaatgatcgccatcctgttcgtactcggtctgtactgctgcctcggcctgctggcaggcgcctgctactgcatcgcagtggccccgccattcgagaacccgacggaagtgcagttccaggacgcatgcgtgatcgggtgcatctggccactcgtgatcctcgtcggcatattcctggcactccgtgcagtaggccggggcctgctgaccgggctgaagcgtcacctgaacatccaataacctaccggaggtaacatgatccgcacccatacccacaacaccgaccgcgaacagcgccgcatctacaagctcactgagctgacgtcgggtgagatgtacagtgtagtgcagcccgagtccaagcgtggcacgctggtggtcggagtagcaacctgggatagccagagccgacctgtagtgctgcccgtggtcattcacgatgtgggtgcgcatccctcgccctgtcccaccgtgctgcgcaacgacggctggcgcatggtgcttgccgccaagggcacccaggtaacactcaccgccgagtgaccaaggcgaaggctggtgcgccagccttccaccgtggccattccttgccgcgaaccaactcaaccgaggagctacaacatgaccaacgtcaacaccgccaccaccgagaccaccaccgctgctgccctgggcgccaagctcatcaagaagccggctaccgtggaagacttccgcaacaacgtggtcttccatcacaccgccctggccaagctgaccgaagtctacaacgaggcggtcgttgccctgcaaaccgccgagcgcctgtccagcctcgtcgccggtgacgtgatcaccttcgaccacggcaagggcgagaaagccgaagtgctgagcggcgaagtcatcagcgtggttgccggcgtttaccaggtgctggtccgcttcagcgacagcgcacctgccaagctgctggacgtgaaggccagcgccatccgcgccgtccagtcgtcggcagcccaggctgctaccctcgacgaagccatcgcccagggcgagtaaggcccgcacgtaataggcccggccctccgggcctattgcgagctagccataccataggaggagtcaccatgagcaagcgtaaccccgagcacatcagcggcgccgtgcgtagcgtcagcgtccagaagtcggcagccgtccaggaactggaggatcgtctggagtctgccctggccgtgtgccagcagcgggcggaagacatcgatctgctgagccgccgtctccaggccgccgagcgcgcccgccgctgggagatcgacgagattcgcaaccaccaggcgaccatccgcctgttgcagaacgacctgaacgctgcgcatgatgcccacgaggcacaagagcgccgcgctcgcaaggcaaccatcatggcctgggtatgcctgctgaccgcaggtttggccgtcaccctgaaactggcaggagtctgaccatgcagtgcaacgacctttacactaagctcgcagcgagcatgttcaacgtgccgtgctcccaggtgaccgccgagatgcgccgcgtagccaagagccgggcattcgcgtatgcttacactcccaagcgacaggcgtcgggtgggacgtacaccgcccgcgtgagcggcgtcacctgtgacggtggcaaggtggaggtacgtctggacaacgtggagcgcgccgacacctgtggctatgccaagctggaggcgctggaagcggtcagcctgtaccagggtgccgcgaagcgcgccgatgagtatgaaaagctactgctccaggcattcccggtggtggctaagcgtcgtgagcgcttgcgtatctccgggccgctgtcggcggaagacttccgggcaaacctgctcgggacgtgttccgcatatcggaatgccctcgacgccatacggggcgagattacctcgaccggcccgttgcggaaccgcatatgggcgctggtcgaacgtatgcaccgggccgagacgaagctcaggaatgctcagtcggagatcaaccgcctgcgggagcaggaactggaccgcctccgcaaggacatgtccagctactgcgccaacgacgttacctctacggtgagtgcagcatccgcgaaggataccctacgggtggcaaccttcgccgccgccctcgccggtggcgtcgtaggtagcgccctgatgttcctgctcagctagggcgaccagggcctactccggggtcaaatctgagggcgttcctagagcgccctctcgtgtgagtctggaggatcacgaacatgcaataccatttcacgcattacaacggataccgcttcggcgtcgagctggaagacgaggctgtcttcccgtgcatcgacggtaagcgggcgacctgggacaaggtggcggcgtgtgccggtagccttgtgcattacatggcgcaggacctgattgacttcggccagcgcaagttaagggagatcgaagatgagcaagacgagcctgtacccgctgagcctgcatcccggcctgattcaaatcaggacgattcacgtattcagcattcaagctccgagcaacgccgagaactggtggcaatggttcctctggcagcggaagtaccacccgctccgggagagcctgagtccagccggggaactgagtgcgagtatcgccgagtgtgtccaccgcctccgccagagtggctggcaagatagcgacatctggcgcaagaagggaggcgtgctggccctcggtgccttcgacctgtccggcctgatggtgggttcctgcctcgtagtaggcggtgagctgaaggccctgtgcgttgatgaccggcacagcaggcagggtatcggcgctgagctggtacgagctgccgagctggccggtgctgagcacctgacctgcttcgagttcctggagccgttctacgccggcttgggctggcgcaccgagcgccgtgaggcaaactggactgaaggcgagccggatgtgctgtacatgagggcacctggccatgacgcatgaggtgatggtatggcttatcgcgaacaaaccgctggtcatcggagtcgccttcagcctggtggccctgggcgtgctgctcacacagaacaacggcggcccgcctatggcgcccgcatgacctggcacctccaggacatgttcgaggcccgaggtgggctgaggcccttgtgggaggagtggtatcaatggcactgcgccgcgactcctggctaaagcaagcgcaatccctggcagtcggccaggcgggtcgattccgccacgtcctgggatgccagagcatgagccggggcgggaccaacatgacctgcaagaacctgcctgaccgctgggtggcatactgctactcctgtcaggaaggtggcgtggtcgagaaaacgcacgtgcggagggtgcaatgcgcggatcaagaacgcttcatgccctggcccgaggatgcctcggactggacgcaagccgactgctatcaatcgctatatggtttgctgctgtccaagggcatcgactacaacgtgatgacgccggggctgccgctgctctacagcgaaaggcagcatcggcttatcttccctaccgacgcgggctggattgggcgcgctactgccgaccaaaatcccaagtgggtgggctacgggtatcctgccccggactaccatggatggccccaggaatcatcaatgggcaggccatgggtgctgacggaagactacttgtcggcgctgaaggtgcggtgggcatgtcccgaagtcttcgctgtcggtctgaacggtacaaggctgcgcgacaggctggcggcgatcatgttgcagcagacctgcaagcgcgccttcatcttcttggatggcgaccgggcaggtgtccgtggtagtgcaggcgtgatgcgccggctccggtccctgcttatcgaaggccaagtcataccaacgccggacgggttcgaccccaaggacctgacccgcgagcagataaggagcctagtaattggacgtattgacgcttcacgcactgagtgaccgggaccgcttccgcacgttgcggagtgtggtgcccgaaggaatgatggggccggagacgtgcttcgtcatcgactggatcgagcagtattggaaggtctacccggtgcatcagaaggtagacccgcaggcactgcgcgaactgatcaagctgcgaggtggctaccagccagagcaactagcggtggtcctgaacctcgtcaaccaactggacaagccggtggacccggactcgctacagggcgttgtgtcccagctcaacgaactggatttctcagggcgggtggatgccctcctggcgcagtacaaccagggcgaggacatcgacctggcgtatgagctgcgccggctgagcgacgaggccctgcgccgcgagggggtcagcacgccgaccgactacgtgacggacgacgtgtttgatatcctcgcggaggagcagggtgaccacggcatcaagctgccggggctggtgctgccggcgtacatgaagggcctccacgccggggcctcggtgctggtggcggcgccgcctgatgcgggcaagacctcgttcatggcctggatcgctgtccatatcgcgccgcagctcaagcggtacttcgacccggggcggcccatcctgtggctgaacaacgagggcaagggtcggcggatcaagccgcgcctgtactcggcagccttgggcatgaccgtgggcgagattcttgccctggacccggaggaagttcgcaggatgtacgccgagaaaatcggcggcgactctgagctgatccgcatcaaggacttccacggtgggtcgctggctcaggctgaacaggtcatcgacgcgatgaagccagcggtggtgttttgggacatgatggcccacgtcaagggcggccagcgcaaggaccagaaccgtaccgacgagatggagtacaaggtggctgaggtccgcgagatggcggtacggcacgacttcatcagcttcatgacgtggcagattagcaacgacggccacgaccagttgttcccgccgcagtcctgcctcaaggattcgaagacagcggtacagggtgctgtggacgtgcaaatccacctgggccgtctcaacggcgcggatcaacaggtcatgcgtggcctgtccctgccgaagaacaagttccagatggacgggaagccttcgaacgtggaggcaatgattaacttcgacgccgcacggtgtcgtttctttgagagtgtggatcatgcaagctaagcatagccgggtgctcgaaggcaccaaagaaattccgctgggtagcatcgcactgttaccgggcaccgtcgcgggcctgctgctgtgcctgtactccgacgcaactcacgaggagggcgtcgccttggccggtgggttccctcgcgacttgctgcacggcgccactcccaaggacgtggatgttgccctgtacagcatgacctgggggcgggcagagcacctgatccagaaggcactcccggtcctgaaccccatcttcgtccgggatggtgggtggcgctcggactacgccgatggcggcgacggtggtatcttcaagggcgtgatgtccctcgtgggctgccgtgggttgaatggcatggacttggactttaactactacgacgccgacagcctcggtcgagtgatggagtcgttcgacttcaccatcaaccaggtaggcatcgcgtacaactggcccgaccccgaaggcggtccgcgcctgggtgcgtacctgcacaaggacgttacctggggcgtgaacagggaagtcggtaacggctcgcgactgccggagcgatgcgagaagatgcgggccaaggccgcgtattacggatgggagaacgtgtgatgagcaagcgcgacgtggtactggatatcgagaaaggcatctggcgcggcgtagaccagaacgacaaggccgtcgaggccatcatcaagaagcacgggtacgtgatcgtcgagcctaagatcgacgggtgccgtgccatcgtcggtgcgcatggcgtggtgtcccgaagcgggcgccgcttcccggccctggatagcttggaagaccgcatcatcgatcgactggcccgccccgggctggactccggcctggtgctggactgcgagatgtacctggccggcatgcccttcagcgaggcgactggccgcatgtcgcgcaagaccccactgaccgaggaagagctggggtgcctgcacttcgcggtgttcgacgccacccatatagacgtgctccgcaaggcgcgcacctcccacctggtatacgaagagcgccgcgccatggccagcagcctcctggcagcttgccgcctcagcgacactccgacgttcttccaggtaggctcgcaggtgtgtcggtcgatggaggaagtcttaggccggtactccctccaccgcgccatgggcttcgaagggtcgatggagaaagacccgagcatggtctaccgcaacggcaaggtcgccggctgctacaagcgcaagccggagatcaccgtagacgggcgcatcgtaggctacgtgccgggcaggaccggcaagaacgctggccgcatcgtgggctactatgtcgagttggaagacggctcgggcaccgtggccgccaccggtctgaccgaggagcacatcgagttcctgacccgtagccaatactactcgaccgtcaacgacacgatgccaaacttcggtcgcatcgtcgaggtctctgcgatggaacgctcggccaacaccctgcgccatcccagcttcagtcgcttccgcgaccttcccagcaatccaggagtcaaggtatgaagattcgaaagtcccgtaaccgcaactacccggaagatatggtgtaccacgccaccaaccgggattcactgctgtatccgaagtacgtcatgggttccgtgttcatcagccaggacggaacattccgcatctgcgtcatggcagggacctgggaccacgttgggtccgaagttctgcatcatgcacgggacatccaatcccttggcgccggtcgccgtaagttgcaccgggtcatgcgacggctgcgccgcaatctgcaacaggtaggagtcaaggtatgagaatgccaaccgaagaagaacgcacgatccgctgcctgctggcagatatccacgaacccttgaacctgctgttccccggtatccgtgtaaaggccgagacaatgcccttgggctggggagatagtatctgtgccctggtactccgggtgagctacgaacatcgcacgctgggtcgcctggagtacctgcacgaggtccccatcctgcacctgacgcagtggggccgggacggcatgctccagcacctgatgaacgagattccccgtcgggtgctggatggcatgctgcgccaggcacagaaatacagccagagcaactggtacagcaaatgacgactatccgaatcctcgacctcgaaaccgagagctacgagcacaaagggcgcaaagcgtcgccctttgacccccgcaactatatcgtcatggccggctggcgtgacgatgttgacggcaaggtcggccagaaggtggagcatcgcttccgcagccgggccgaagccgaagatccgaacaaccgctggttcaacctcgacggcgtggacgtgatcgtagcgcacaacgccatgttcgaatcgaactggttcttcacccgctaccgggacgagtacctggccttcctgcgacgtggtggccgggtctggtgtacccagcaggccgagtatctgctgagccatcagacgtggctgtacccggcactcgacgaactggccccgaagtacggcggcacccacaaggtggacggcatcaagctgctgtgggaccagggcgtgctcacctcggagatggaccaggacctgctgagcgagtacctgtccggcccgtgcggcgacatcgagaataccgccctcgtattctacggtcagttgatgaagctccaggcccgtggaatgtgggctggctacctggagcgctgcgaggccctgatcggtttctcggcgatggagtgcgccggcctgaaggtggacctcgaagtcgcccgggtgaaccacgccaagcaactggaagaggtggccgggatcgaggctgagctgaagaagctgatgcccgacttcccggaatacttcgagttcaagtataccagcctctaccatatgagcgcatggctctacggcggcgaggtgcggtacaagggccgggtgccctacgaagatggccggatggagaaagccgacttcgtgcgcttcggcacggccaagcgggggactcctatcgagagtacctcggtgcgggtcccgatccacgaagtgaccaaccagggtgagtggcactggcccaccatcaccgagctggcgaccaagcacggcccggtcatcacgttctccgccggcaagaacaagggcagcgtcaaggtgttccgtgaggatacggacatcccggcgaccaagtgggacgatgaccagcgattccgattccccgggctgatcaacctgaacaacctgccggaagtggtgcgcgagaaattcctaggcaagcgcccggagttccagtgcgccctcaccctggcggatggatcgcccgtgttcagcaccagcggcgacgccctccaggctctggagaaacagggcttcgaggcagccaagctgttgatgcgcctggccgagttgcacaaggacaactcctcgttctacatcacccacacctacaacaaggatgggacgatcaaggacacgaaggggatgcttcagtacgtggacgatgatggtatcatccaccactcgctgaatacgaccgcgacggccacgacccgactgtcgtccagccgcccgaacctccagcagctcccgtcaaaggacgaagacgacccggaagccggcagccgcgtgaaggagatgttcgtgtctcgcttcggcgcggacgggatgatcggcgagaccgactataccgccctggaggtggtgatgttggcggccctgtcgaaggaccggaacctcctggcgaagctgatggccggcacggacatgcacttgtaccgcctggcagggaagcacaacaactggaacgggttcgattacgaccagctcgtggccatcaagaaggaccccaaccatccgtggcacggtcgcatgatgcaggctcgaaagaacatcaagcccaaggcattctcggcgcagtacggtgcgagcgcggctggtatcgcattcaacaccggctgtaccgtggaagaggcccaggaattcctggacaacgaggcggccctgttccccgagtccatcgcattccggcagatcgtccgcgacagtgcagaggccaccagcctcgtgatgtacaaggccgaggaccagatgccggcgggcgccttcagcgagatggggtcggatggtaactggcgccagtaccgccgaggattctggcaagcgccgggaggcacctgctacagcttccgccaacaggaacgctgggacaaggaacagcgcaagacggtcatggacttcaaggacacgcagatcgccaactactggaaccagggcgaggctgggttcatgatgaccgtgagcgtggggcgcatcttccgttggatgctgcatcgcccgggattcatggtcaccgagttcctgatcaacaacgtacacgatgccgtgtacaccgactgccacaaggacaccgccgccgaggtcaacaagggcgtgcgcgacatcatggccgacgcggcccgctacatgagcgagcggctgggctacgacatcgccgacgttccattcccggcagtggctgagatggggccgaacatgttcaatatggaggtgatccagtgaaagaactgcatccgctgcacacgcccgagttcgtcaaaacattcctggaccagaccgggtgcctgcctggggtacgccgtacgggccgcaccaccggcattgctctacaggccatcggcatggcgctgtcccatccgagggaaaccctgacgttcgtggaccacccggacggcagctcggcagcactggtggccagcattgaaaccatactggcgaccctgggctaccggaacgtcctcgttcgacccacaacccgtgcggacgggcgcagcgtgaacatcgtcttcaagacgctgccgaacgcctgacgaccttccctactccggccttaaatcttccttcgacacaagagagaccacgtatgactcagcaactcaacgctctgcaagctgcactcgccctggccaacaaggctgccgagaccgcaaccatcgacatgtctgaaacctccaccggcggtggcggcggtcgaatcttcccggctggcaccgccatgggccgattctgcatctacatcgagctgggtgaccacgccaaggaattccagggcaagctcaagaacccggcgcctcaaatccgcctgggcttcgcactgtggggcgacgtgaacccgcaggccggtaatccgcagagccgcccggacgacctgttccacacctacgaggccgacggctcgatcaagcccggcctgttccgtaccttcgagatgaccctcggcaacaacgagaaatcgaagaccaagctcgccttcgacaagatgaactggagcgggcagcatacccacttcgctcagatgctcggccaggcgttcatcatcccgatcaagcgcaccaagatcaccaagggcaacaacgccggcaaggaacgcaacgacatcgattggggcggcatcatgaagccctacaatccggtcgatggcagcccgtacaacgtgccggaactgccgatggacctgttgcagtatttcttcttcgacgcgccgaccaaggagacctgggacgccctgcacatcgaaggcacctcggacaatggcaagtccaagaacttcctgcaagagaccattcgctcggccaccaacttccctggctcggccctgcacatcatgctgggcggcggcgacgatctgatcatcaagccgacgacccaggccgcaggcagcaacctgccggcagtgcccaacgtggccgccgatgcaggcgtagcagcagcccctgctgtcccggcagttccgcaggcagtgccgcagacggcccctagcgtgccccaggtggcgaatgtagctgcccctgtggtaggtactgccgaggcacagaacgtgctgcctgacgtaccgcaggtggctcaggtggcagctccggcggcggtcgaagtcccgtcggtcccggtagtgccggcagtaccgcaggtctaatgcgcctgccatcggaagagttcctggcaggactatccgcgcagttcgaccgcagcatggcaggcgggacgttggtgtgtgacgccgacggacccgcctacgtggctgcggccactgctaagaccttggacactgcactccggagattctggaagctcattttggagcagcagttcctagcgcactgcacggggacacgggttcacctcacggcagcaggtggggcgaaggcgtaccgggacacgtatccgaccatgaaaccctaccagggccagcgcaagggtaaggcaaagcccgcgctgctggagcctctgcgacgggccgtggcggacgtgcatgagcgcggcggcgcacccgaagggatcgatgtcatcctgcacacgttcttcgaggcggacgacggcatgatgatggacgcctacgccatgcaggacaaggccatcatccggtccgacgacaaagacctgcggatgacgatctacccgtattgggagatcgacacggcgtgtgtgagcaggatcgaaggcggcttcggctacctcaaggaggcatacacgccttccggccagttcaagctcaagggccacggacggaagttcttccttgcgcagtggctcggcggcgataccgctgacaacatccgagggatcgatcgattcaacgggaagctctgcgggatgaagacggccttcgatatcctccacccgatcacggacgaggatgaagccatcgacatgatcctggaggcgtacgccaagatcaagcaaaacccgctggcagaggccgaggtgctgtggatgcgccgaacgcctaccgacaacgcagcgcagtacctgttaagccgcgaccttcgtccggccttccgccagtggatcatcgagctggacgcctaccacgaggcgctgctccagaagcggagggagagtgactatgacgagtgagccgaaggtctaccagataccgcgcagccaacagcgcaccttcaccctgaagctgtgggccgagcagggcaagctatgcccgctctgcggtaagcccatcgatatcagcgtgaagggcgaggcggtgatggaccacgaccacgagacggggctggtgcggggcgtcctgcatcgatcctgtaacaccgcagaaggcaagatcacgaacgcggcgggttcctggggatgcaagtcgatgaagtacaccgacatcatcccctaccttcgtgccctcctgacgtacctggaggggccgaagcatccgctgatctaccccctgcacaagaccgacgaggagaaacacgaagcgaagctggccaagcgccggcaggcagccgccaaacgcaaggcggcgatggccgtcgcaaagcacaacgcgaggaacgtatgagcaaactccgcaagcaattcaccaatgagtacctgcgcaacgtctatgtcgagctgggtctcaagaagggcgccgagcatctgaccaggcattcgcgcttcggcgaagtgagccgccagtgcttccgcaactggtgcatcaagctgggcttccacgacagcaggacacgcggcacgtacgccaagaagggtgcgctgcactggctgggccgaaaggcggccgaggtagtgcgcaagttccctggcgccgtgggcaacgtggtcggccaagggccgaaggtgttgagcctggacatcgagacctcgcctatcgagggctgggtctggtcgctctggaagcagaacgtgggcctcaaccagatcaagcgggactggaccatcctgtcgttctgcgcgaagtggatgcacagcgacgaggtgatctacatggactgccagggcgaccccctggacgacatgcacctgctggtcgccctgcacaagctgttggacgaggccgacatcatcatcgtccagaacggcaagcgcttcgacgtgcccaagatcaacgcccggttcttcctgaacaagatgccgccgccacgaccgttcaaggtgatcgacaccttgatcatcgccaagcagcaattcgcgttcaccagccgcaagctggagtacatgacccacaaggcatgcaccatcaagaagcgcctccacggcaagttccccggattcgacctgtgggcagcctgcctccaggacaacccggaagcctgggaggagatgcgcctgtacaacatcgacgacgtacgatcgatggaggagctgtacatcctgatgcgcccgtggttcgtcggccatcccaacgtggccgtgtacttcaacgacgctgagccgactatccgatgcccgaagtgtggcgacacggatgtcaagcaagaaggctgggtgcatacgcagaccggcaagtacgagcactatcactgcggtggctgtggtggctggagccgagggcggtatacccgcaacacctcggaacagcgcaaggccctgctgagcaactaaggaggctatatgagcctggcgttctccgatccctacgaatctacgggcacccagcccggccagtaccgcaaaggcgcggccccggacgagcgaaaggccggcaagctcccgatgcacctggtggttgaaggcttcccgctgctaaagcgggagcttgcccgcatgatgcagtgggccgccgaggtcaagggctacaagccccacgactggaagaagatgtcggtgggcgagttcaaggccgcccaacaccggcacgaatcccaccgcctgctggacgggccgctggatgacgagtcgaacctgatgcacctcgtgcatgaggcattcaacgcaatggccgccgccgagcgtgccttgatggaccgggagaaaggcaatgagtaaaatctgttggtgtacccgaccgcacgagaccgacgaaggtgtacgtgtcatctgggccttcaacgagcggggcatcggggtaaactacgtcacggcgtacgtcacgccggcgatgatccaccacccggactggcgcgataccatcctcccggacatcctccaggagatggcggagcgcctggaccgcgaggttaagctggtggaattgcgctggttccgcgctgagattctgagctgcggggaatggcgtgactaccgagcaatgacgctggacggggcggtcagcctggccgaggccgagtggggtcccgaggatatcgggcgcgtaatcgaaagacgataggagacggaatggacctgatacagcagcagatcgcccacgaagaggcccttgtcggggcggcgcagaacgacgcccgcattgccttggaaaaggcgatagcccaagggtccatcgaccgcatcccgagggcacgcatcatgttgatgcggatgctccccatcgtgaccgaagcgatcttcgcccaccaggaagcgaaggcggcgggaccggcagcgaagctgcgacacctgctgcggatcatcgacgcccaggacctcgcggtcatggcgctacgggccgggctgtcgatgctcatcaactacccaacgatcaccgcgacgaagtattacacccatatgggcaagatgctctgccgcgagatcgaagtgcggttggccttcaaggtcaaccaaccctattacgaccggacgctggactacctcaagaccagcaggactcgcagcgtccggcacatccagaagacgatggacgcccttctggacgcggtactgcccgaggaggcacgtatcgacctgccggatggcgactacctgcgtctcggcaagttcatcggtgacccgctgatccaatgcggcctgttcgagccgaaccgcttcacaggccggggcggtacgagcgtccacctggagccgtcgccggaggccaaggagttcctgcaagacccgtcggcggcgatgacctggggaggcccaggccgtagcgtaatgctggcaccaccgagaccctggaacgactggtgcgatggcgggtactacagcgccaaggcgcagaagcatcacgtattggtgcgtcgtaccaaacaccagaccaagcgggcacgtcagatgcagctccgccacctgggccgggacaagatgcccaaggtatacgcggcggtcaacgcactgcaatcggtggcctacgagatcaaccacgacgtgtacgagatcatcgagcgcatcttcacttccggcggcggcgtgctgggtatcccgcagcgtacctacccggacaaacctgagttcccgctcggcgacgagtgggccaaggagaacgccagtgaacaagagctggaagccttcaaccgatggaagcgatccgtccaccgatggtacaccggggagcgggagcataccgccaagcttcgcgaatttgctgcactctaccgagttgttcgagagcatcatggcaaggcagtgtacttcccgatgcacgttgactcccgtggccgcatgtactattggggcacaccgaatccccaagggtccgacatcgccaaggcatgccttcagttccacgaaaagcgcgccctcggcaagcgcggcctgtactggctcaaggtccacgtcgccaactccctcggatgtgacaaggtgtacttcgacgaccgggcagcctgggtcgatgagcgatgggacgacttccagcgagcactcgacgaaggcccggagaactatccgaatctcttccccgaagacgagtcgcccctgtgcgccatcgccggtctgctggagctgcgggcggcctacgcatcaggccagccggagaattaccgaagtgggttcatcgtccatatggatgcaacctgctccggcctccagcactactcagccatcctccgagacgagatcggcggagcatacgtcaacctgttgccacctggacttgccaaagctgacatctactcccgagttctcggtctcgttgcagagtctctggcacgagacatcgagagtgctgaaggcgaggctcggggctacgctgtactgtgggataaggccggtcttgccaggagcctgacgaagaaaccctgcatgacgctggtgtacggaaccacgttcaagggtgttgtggaccactgcctggactacctggacgagtccggcctggagattcccgagggtatcccgtcataccgcctgggaagctacatggcaacgctcatactggacgcaattcgcgagacagtaccatcggcagtcttcgccatggaatggctccagcggctcgctaaggcccttcctgacgcatccaaggatttgcactggaccacgccactcggcatgcaggtcttccagtcctacccgaagaccgaggaggtccgggtgcggctgcgggccgaggctgtcgagtacgtcaccctgtacgaggccaaggacgagctggacccggtacgcaacgccaacggcatcgccccgaacttcgtccacgggctggatagcagccacctgggcctgacagccctggcatgcgcggcggagggaatcccgatccaggccatccacgacagcatgggcacctatgcggcagacgtggatcggatgcacgtccacatacgggagcagttcatcgccatgtacagtggcccctgtgtgctcgtagagctggcaaatcagcttggggtagaggctaccccgccccggaggggatcgttgaatctggaggctgtacgggactcctgggcgttcttctgctgaggtggattatgtcacccacataggagcaagtgcatccgtccaaggccctcgtagagggagcggggagagaggagaggtcagggaagacctggtagaggagaggtggagatgagaatggatgactacgaaggattctagatagaatagactaaccagcataggagatatgatagatggctactatgaagacccaccgccctacggttatgtcacccacagtggaaggatcgagaacaggcaagggtacggcccgtcctgtcacgttcacctctcagcagatcgagtggttagaacagaccttccccgaacatcagatcggtcctggaaccacgatggaagacatccagttccaggccggcaggcgagacgttgtgcgagcagtacgactgcgccgacgtgatgccatcgcagtggagctgaagtgatgagtaagtccatctggcgagtacacgcaaaggccggcactccctcggaactccagggcctgtgctggctggcaatacaggagctggaggagttcaccctcttccgctcgaaggacgacgccctgaatgcgatgctggacagtatcgagggcaacgatcgaaccgagctgttggtattccgcgatggtcagttggccggcggtgcctgcatcgtgttcgaggacgacccccacgtcggcccgtgcgtcacagcacagtggcagtacgtcctaccgcgctaccgcaatacaggcgtggtccgggagttcatccgcgaactccaccgtcaggccggctggggtcaaatccccctcgtgtgctggagccatcgtgaaagcgatagccggtacacgatccactaccggagagccaagccttatgggcaagaaagtcaagaaggtgctaggcaagaccatcatcggcaaactcgctgatggcctgctgggcaccgaccttagcggcgcacaatccgatgcccgcaagatggaagagcagaaccgcctaatgcagcagcaggcggaccagctcgcacgaaaccagcaggttgacctcaccgccgagaacgtggcgcaggttgacctaggagcgatggccgatgccactggcaccggcactcgacgacgccggaatcaggcgggcacaggcgtatcgcaaaccctcggtatcaactactgacgaggtacgccatgaaaaccaccgcagctatgctgtgggagaaacttcgggatgggagcgtggagagtcgagccatcgagttcgccaagaccacgctgccctacctgatggtcgatcccatgtccggcagtcggggagtcgtagagcatgacttccagtccgccggcgccctcctggtgaacaacctcgccgccaagctggcgagatcgctgttccccacggggattccgttcttccgatccgaactcactgatgcgatccgccgcgaggccgacagccgggacacagacattaccgaagtgaccgctgccttggctcgggtggatcgcaaagcaacacagcgcctgttccagaacgcctccctggcggtcctgacgcaggtgatcaagctactgatcgtgactggcaatgctctgctgtaccgagacagcgccgccgctacggtggtcgcatggtcgctccgctcttacgcggtgcgccgggatgcgactggccgctggatggatatcgtcctcaagcagcgctacaagtccaaggacctggatgaagagtacaagcaggacctgatgcgcgcaggccgcaacctgtccggttcgggcagcgtggacctgtacacccacgtacagcgcaagaagggcacggcgatggaatacgccgagctgtaccacgagatcgacggcgtgcgtgtgggcaaggagggccgctggcctatccacctgtgcccgtacatcgtgccgacctggaacctcgcccctggcgagcactacggtcgcggccacgtcgaggactacatcggcgacttcgccaagctgtccctgctgagtgagaaactcggcctgtacgagctggagtcgctggaggtcctgaacctcgtggacgaggccaagggtgcggtagtcgatgactaccaagacgccgagatgggcgattacgtgccaggcggtgcggaagccgtccgtgcttacgagcgtggcgactacaacaagatggctgctatccagcagagcttgcaagccgtggtcgtccgcctgaaccaggcgttcatgtacggtgccaaccagcgcgacgccgagcgcgtcactgccgaggaagtccgcatcactgcggaggaggcggagaacacgctgggcggtacttactcgctcctggccgagaaccttcagtcgccgctggcgtacgtctgcctgtccgaggtggacgatgcgctcctccagggcttgatcaccaagcagcacaagccggctatcgagacgggccttcccgccctgtcccgctccgccgctgtgcagagcatgctcaacgcttcccaggtcatcgctggcctggccccgattgctcagctcgatccccgcatctcgctaccgaagatgatggatacgatttgggcagccttcagtgtcgatacctcgcagttctacaagagcgaggcggagctacaggccgaggcagaacagcagcgccagcaggccgcacaggcccaggcagcgcaggaaaccttgctggaaggcgcttccgacatgaccaacgcactcgcaggagtctgatagatgacccaaccgaacgaacagcaactgccgccgggcctcgctaacctggttgccaacgtaccgcctgccgccgcaccgaccccgagtcatgtgcaggtgatgccgaacccggtgatccaaccgcaggccccggtccagcccggccaggtaggtgcgccgcagcaactggccatcccgacccagcagccgcaacccgttccgaccagcgccatgacgccgcactaccaaccggtagcggcacctgccgtgggtcaacccgttgttccgcaagcacccgctcagccggccccggtagctccgccggctgcgggtgcagttcttcccgagaacctggaagtcccgccgccgccggccttcactcccaacggggagatcgtgggcaccttggcagggaacctcgaaggcgacccgcagttggcgccctccatcagctatctggaggcgttctctgacaaactggataccgtccgagccttcggcaaggccgccgagaaccgcgatcctcggttcatcgacgagcactatctgaaggaagttctcggcccggcccaggcgcagcacgtcatcaacgtggccaagggcgtcctgacctatgtcgatgcgcaaaccaaggctgtcctgaaccagacctatgccgccgtcggtggcgaggccgtgctgaagcaggccgcaggcgtcttcaaccaacacgctgacccggccaccaaggccgccatcggtcggctgatggactctggcgatgcccaggccatgcagtacgcagcgaagcagatcattgccttcgcacaaggctccggtgccgttgtacaggctaccggccaacccctgggtgctgcggcacctgcactagcagccctgaccgctgagcagtaccgcgcagaagtgtcgaagctgccgctgaacgcatccgaagccgacatggctgcactgcgagagcgccgtaaggcaggcatggcgcagggtatctaacgaccctgccctactccggccttaaactcacatccaaaagagagagaatcgcatgagctttctgaacgacctgacccgtccgaactacgctggcaaggacgcggacgttgacatccacctggaagagcacctcggcatcgtcgacaagcacttcgcctacacctccaagttcgcaccgctgatgaacatccgcgacctgcgtggctcgaacgtggtccgcctggatcgcctgggtaacgtcaaggtcaagggtcgtcgcgccggtgaagagctggagcgcagccgagtcgtgaacgacaagtggaacctgaccgttgacaccctgctgtacctccgccaccagttcgaccaccaggacgagtggacccaatccttcgacatgcgcaaggaagtcgccgagctggacggccaggaactggctcgcaagttcgaccaagcctgcctgatccaggtgatcaaggctgccgcgatggacgcaccggtggacctggaagacgccttctcgccgggcgtgctggagaagctggacctgaccggcctgaccgccaagcaggctgccgagaagatcgtccgcatgcaccgccgcgtagtcgagaccttcatcgaccgcgacctgggcgatgcggtctactccgagggcctgaccccgatgtcgccacgtgtgttcagcctgctgctggaacacgacaagctgatgaacgtcgagtaccaggcaaccggcgcgaccaacgattacgtgaagtcgcgtgtggccgtcctcaacggcgtcaaggtgctggagactccgcgcttcgccaccgacgcaaacgcagcgcatccgctgggccgccacttcaacgtgagcgccgaggaggctgagcgtcagatcgccctgttcctcccgagcaagaccctgatcaccgcccaggtggcgccggttcaggccaagctgtgggaagaccacgataagttctcgtgggttctggataccttccagatgtacaacatcggtgcccgtcgcccggacaccgctggtgccatcgagctgaagggtatcggcgccttcgacatcaccgcgtgaccaaaagagagagaatcgccggctaaggatttaaggtaaggaggtttatttatgcaccccttcgatcaagcggtcgtgaaggatccgaccgcgtcctacgtggacgtcaaggcgcggcggacgttcctgcagagcggccaactggacgatcgcctcaaggcggcgctgccgaaagaatatgactgcaccaccgaagcgacccccaatccgcagcaaggggaaatggtcatcccgcggcgctatctgtcggggaaccatggcccggtcaatccggattacgagccggtggtgaccctctaccgcgacttcgagaagatcagcgcgacgctgggcaacctctacgtggcgaccggcaaacccgtctatgccacctgcctgctgaatatgctcgacaaatgggccaaagcggatgccctgctcaattatgatccgaaaagccaaagctggtatcaggtcgagtggtcggcggcgaccgcggcgttcgccctgagcacgatgatggcggaacccaacgtcgacaccgcccaacgcgaacgggtcgtgaagtggctcaaccgggtcgcgcggcaccaaacgtcgttcccgggcggggacacgtcgtgctgcaacaatcacagctattggcgggggcaagaggcgacgatcatcggcgtgatctccaaagacgatgaactgttccgctgggggctcggccggtatgtccaagccatggggctgatcaacgaggatggcagcttcgtccatgaaatgacgcgccacgagcagtcgctccattatcaaaactatgccatgctccccctcacgatgatcgccgagaccgcgtcgcgccagggcatcgacctctatgcgtacaaggaaaacgggcgggacatccatagcgcccgcaaattcgtcttcgccgccgtgaaaaatccggacctgatcaaaaaatacgcctccgaaccgcaggatacgcgggcgttcaagcccgggcggggcgacctcaattggatcgaatatcaacgggcccgcttcgggttcgcggatgagctgggcttcatgaccgtgcccatcttcgatccgcggaccggcgggtcgggcacgctgctggcgtataaaccccaaggcgcggccgcccaggcccccgtcagcctcgaacatcaccatcatcatcattgatgccacgaaaccccgcacttcggtgtggggtttcttcaaagcctaacgacccgcgcagattccctgcgtgggtttttgcgctttaggagaaaccctatgctactactcgacgcagtgaatgtcatcctgcgcaagatcggcgagctgccgatcccgagcatggatgagacgtatcccaccatggccattgccctccctgagctggaggaccagcgcatccagttgctgacgcaaggctggtggttcaacacctggtggaagcacaagctgacacctgatcccacgggccgcatcaacctgcccaagggcaccttggcattctacccggattccccggacctccagtgggacggcctgggagtgcgcgacgccaacaccggcgacgaccgcatcggtaagtcggtcgagggccggctggtgctgtcccgcgagtgggaccgtatccccgagatcgcacagcgcgtcattgcgcaccaggccgcactcgcggtgtacacccacgagattggcccggacgagaccgcccaggtcatcgcccaggaattgcaggcgtatcagaacgaactgtcccgcatgcacacccgatcccgtccgctgaacacccaggccaagcgtagcttcagccggtggcggcgcagcttgaggacctgagcatgagctacaagcaatccgcgtatcccaatctgctgatgggtgtgagccagcaggtgcccttcgagcgcctacctggccagctcagcgagcagatcaacatggtatcagaccccgtgtcggggctgcggcggcgcagcggtatcgagctgatggcccacctgcataccgaccaaccctggccgaggccgttcctctaccacacgaaccttggtggccgcagcattgcgatgctggtggcgcagcaccgtggcgagctgtacctgttcgacgagcgggacggtcgcctgctgatgggtcagcccctggtgcatgactacctcaaggccaacgattacaggcagctacgggccgccacggtggccgatgacctattcatcgccaacctgagcgtgaagcccgaggccgaccgcaccgacatcaagggcgtggaccccaacaaggccggctggctgtacatcaaggcgggccagtattcgaaggcattctccatgaccatcaaggtcaaggacaacgccaccggcaccacctacagccacacggctacctacgtgacgccggacaacgccagcacgaaccccaaccttgcggaagcgcccttccaaacgagcgtaggctacatcgcctggcagctctacggcaagttcttcggtgcgccagagtacaccctgccgaactccacgaagaaatacccgaaggttaaccaggatgccgatgcggcaaccatagccggatacctcaaccagcgtggggtgcaggacgggtacatcgcattccggggagatgccgacatcaacgtcgaagtgtccacggacatgggcaacaactacggcatcgcgtcgggcggtatgagcctcaacgcaacggcggacctgccggccttgctgcctggtgcgggcgcacccggtgtgggtgttcagttcatggatggtgccgtcatggccaccggctcgaccaaggccccggtgtacttcgagtgggactccgctaaccgccgatgggcagagcgggccgcctacgggaccgattgggtcctgaagaagatgcccttggcgctacgctgggatgaggctaccgacacctacagcttgaacgagctggactatgatcggcgcggctccggcgacgaggacacgaaccccacgttcaacttcgtcacccgaggcatcaccggcatgacgaccttccagggtcgcctcgttctcctgtcgcaggagtacgtctgcatgtcagccagcaacaatccgcaccgctggttcaagaagtcggcagccgcgctgaacgacgacgatcctatcgagatcgccgctcagggcagcctgaccgagccgtacgagcatgcggtcaccttcaacaaggacttgatcgtcttcgccaagaagtatcaggccgtggtcccgggtggcggcatcgtgaccccgcgaacagcagtcatcagcatcaccacgcagtacgacctcgatacccgggcggcacctgctgtgactggacgcagcgtgtacttcgctgccgagcgtgccctgggtttcatgggcctgcacgagatggccccgtcgccgtccacggacagccactacgtcgccgaggacgttaccagccacatcccgagctacatgccggggccggctgagtacatccaggcggcggcctccagcggctacctggtgtttggcaccagcacggcggacgagatgatctgccaccagtacctctggcagggcaacgagaaagtccagaacgccttccaccgatggacgctgcggcatcagatcatcggcgcgtacttcaccggcgacaacctgatggtcctaatccagaagggccaggagatcgccttgggccggatgcacctgaatagcctgccagcccgcgagggtctgcaatatccgaagtacgactactggcggcgtatcgaggcgaccgtcgatggtgagctggagctgaccaagcagcactgggacctgatcaaggatgcctctgccgtataccagctccagcccgtggccggtgcctacatggaacgtacccatctcggcgtgaagcgcgagacgaatacgaaggtgttcctcgacgtgcccgaggccgtggtcgggtcggtgtacgtggtcggctgtgagttctggtccaaggtggagttcactccgccagtgctccgagaccacaatggcctgcccatgacctcgacccgcgcagtgcttcatcggtacaacgtaaacttcggctggaccggcgagttcctgtggcgcatcagcgacacagcccgacccaatcagccgtggtacgacacgacgcctctgcggttgttcagtcggcagctcaacgccggggaacctctggtggacagcgccgtggtgccgctgccggctcgggtcgatatggctacgtccaagttcgagttgagctgccatagtccgtacgacatgaacgtccgggctgtcgagtacaacttcaagtccaaccaaatctacaggagggtgtgatggctttctggctaccactattggccgctggcggcatgtccgcccttcagcagggattggccaacaaggaagagcgcaacaagatcaaggccgagaacaaggctcgactgaagacggacctcgacaacctgggcgccgccgcccgcgacatcgccaacctcggagtcatggccgctagctaccgcaagcaggccgtggcctcgcaggtggaggccaaacgccaggggatgctcgccggcggcagtgccgaggctcaggccggagcgttcggcgtcaagggcgcatccgttgatgcggtggccctggatatcgagcgggaggtcggcgaggctctgttccagattgacgacaacctggacaatcagatgtggaacctcgccgagcaggcgcactccatccaggcccaagctaaggccggcctgctgggacagaagagcaccactgcggggcaacgatccccgctggtggctggcctgatgtcggcgggttccctgtatgcaagtcaatacttcaagttcggcgccacgcctaaaggaggcaactgatggcggaatcgcaacgtgcttcccaagagcttgggatcaacgtcgggcagacgcaactccagccgggccagagtgcccggcgtggggtgcgcgactccgaagtcaactacagcgggccgagtgtaggctcacagattctcgacggcatcctcggcgccggtcagcaaatcgcaggcaagtggttcgagcacaacgtgcagcaggaagtgctgcgcggtgagcgtgcccgcatggccggcgaggccgaggaggcggtagacagcaacatcctggccaagcccttcgtgaagggcggctggcgtaagcaggactaccgtatcgctcaggcggacttcagcctgaagatgcagcagttcatcgccaacaagggccgggagatgactcccgaggagttccgcaaatacctgtcccaggaggctacgcacgtcctggactcgacaaagggcatgaaccccaacgacgccctacaggcgctggcgcagcagcagaaggccgaggagcagctcttcggcatgcaggccaaggcgtacatggactggtccatcgaccaggccgcacgaggcttccgcacccagggtaacagcatcctggccaaggctgtacaggcccaggccaccggcgacgaactgtcccgacaactcagcctggaagaggctggcctgttctataccaacatcatgacctccgaggatatcccgctggaggtgcgtgacaaggtgggcatgcagttcctggcagccagcctggacatgaaccagcggggcatctacgagagtctgcgcgatgccggcttcctggacagcatgtccttcgacgaccggcgtgcgctcaacggcctctatgaaaagtcgaaggcacagacccgggccaaggaatcgatggctaccctgcgggccgatgcggacttccagcagcgggtggctaacggggccatcacagaccttgccgaggtcgaggcgtactcccggggcatggtcgaggagggccgctggagcgacgcccaggccatctcgttcatgaccaaggccatgaccggcctgggcaacgctcagcgcatgcagggcatcatggcggccctggaggctggggacatcaacgccctgcacacgctggggacgaacgtctccgaggcactggagcagtgggacaagatgcaggcggccaacggctcaagcctgaccgatcgactcgtacagggcacgcagctcggcctgcgcctggggaccttccccaagacctacggcgagtccgtgggcagcgccgtgcggatgatccaggcggccaaggaaggcgaggcgaacccggagctggtcaatacgttgaacagcatcttcgagcaggtggcctcggcccaggagatcaacccctccgccggcaacgtgatgctatccggcatcccggaagccgagcagggcgctgtggcctgggcactcaagcagatgaagatgggcatcgccccagctcaagcactgcgcgagttcagtgccaacgccgaagtcgtgaagcagatggacgagttcgagaaaggacagaacaccaaggcattcaaggacaacctcggcaagcaggtcaacgacaagttcgtgaacaacatcttcggtcgggcctggaacatgctgaccggtgagagcgacctgagcaacaacgaggccgttctcagcatgtaccgtcgagcaaccatcgacgaggcgaactggctggccagcgaccgcaagcatgcgggtctgcttaccagtgacacgggccgcgaggccctgctggagatcgccgccgccaacgtgcgtaaccgcaccatccaggtaggcgaaggtcggaacctgaaggaaggggacctgttcagccgccgcgacagcgcgccactgatcctaccccgtggaaccaccgccgagcagctattcgggaccaacgataccgagaccatcgggaccgtcctggccgagcagcacaagccgcatgtcgaaggactcctcggttacaagtcggtagtcgccttcgagtacgaccgcaccagtggcagcctcctcgccgtcgagtacgatgagaacggtgtggccctggaccgcacgcgggtcgatccccaggcagtcggtaacgaggtgctcaagcgcaactcggacaagctgaacgcgatgcgaggtgccgagtacggtgccaacgtcaaggtcagcggcacggacattcgcatgaacggtggcaacagtgccggcatgctgaagcaggacgtgttcaactggcggaaggaactggctcagttcgaggcttaccgaggggaggcgtacaaggatgccgatggttatagtgtgggcctggggcattacctgggcagtggcaatgctggggcaggtactacagtcacgcctgagcaggccgcgcagtggttcgccgaagacaccgaccgcgcactcgaccagggtgtgaggttggccgacgagctgggcgttacgaacaatgcctctatcctgggcttggccggtatggccttccagatgggcgaggggcgtgcccggcagttccgtaacaccttccaggcgatcaaggatcgtaacaaggaagccttcgaggctggcgtacggaacagcaaatggtacacgcagacgcccaaccgggctgaggcattcatcaagcgcatggcgccccacttcgatacaccgagccaaatcggggtcgattggtacagcgccgcaacagcggagtaagacatggcacagcaattcaagggccgcatgacgcccaagtacccacttgaccaagcacagctcgacgaggcccaagtacagggccaactcgacgcagtgcctaccgtggggttcgacgccctgacgggtggcgagatcggagaacggaacgtggcagcgggccaacgagccaacgcgcgggaactggaacgcatcgtagcggaccaggaactgccggcccttgaccgtgcttccgcactctggaaccagtccaccctcgtcggacgctggggcgatgcgctccagctcgacgcggaccttgcggcgaacagcaccggcgaggtggaccccaacttcgacgccgggacctacggggtccaggcgctccaggcggcgggtatccagccgactgacaactatctccagatcatggcccgtgccggcaatgccgaggacgcggcctacctcctgtcgaggattcaacggtatgagcaggacgagcaaatcgtgcgggacaacccgtactggaacttcgcggctggcatgctggaccccgccgctctggcagttgatgcggttactttcggcgctggccgtgctctgcggctcggtcgtgctggcatggctgctgctggcggcgctgggcaagtcgggtatgttgctgggctggatgccgcaggggccgacgtggatgccggaacctacatcgtggcaggtgctcttggcgctggcgtgggtgctctgctggggtctggtgcgggacgcattgccgcagaggccccaacgcaaccgcatgtgcccgaagtatcggcgcctactgtcgggctgccagaagtagccatgaccgccgaggaggccgccgcacgcggcttcaaggccggtgacgtggtagacctgctggacgagggcaccgtgctgtcccgtgtcagctcccgtgtggagcaggccgagataccggccatcccgcgccgtgacactgccttcggcgacgagctgcacagcctgtcgggccggaagctgtccgaggtcctggaccacctcaagacccacgcagaggttcccaagccgctccagggcatcgccgccaaggtggctgataccatcaggaccctggagggcctgggccagcgaaccgcgttccgagtggtgcagggtggcgacactgccagctccgcattccttaagccgggcacggcgggcatccactccacccagggcctcgacaccttggtccaggtacgcggcagcaccgcacctggtcgagttggcaccaacccggtgaccgtgctccacgaggcggtccacgctgccaccgtaggcgtgatgaacgccgccctgcgcaaccctggcgcgatgagtccgaaggtggctcaggccatgcagaccctggagaacgtccggggtaacgtgctcaacgccctgaagcaggaccgcgccgccggtcggcaactgtccgagttcgaagagacgctgctggccggcaactccaacaccctggcaaacgtcaaggagctggtggcctggggcctgacggatacccgcttccagcggaccctgaatcgcctccgctacagcgacggcgggccgggcctgtggacccgtttcgtggagggcatccgtagcctcctgggcctccggtctgatgccgacacggccctgagtcgcgtcctggccgcctctgagacgatcatggacgccatgccggggtacactaaggctcaggctaagtgggccaacaagggcgctccggtgaccgaggaggccagcctggagaccatcgtgcggaccaccagggagcgtgcccgcgagggtgcgggcttcgtgaaccggttcttcagcgaggcggacctactggcacagcccggagagggcgcacggcgcctcctgagccgtcttatcgacgaccctgtacgtcgggatgggttcagcacgaacgacaacgcagcgagctatttgcgccgttaccggaacgagttcgagggctacgtgaagtcctacgacgagatgatggccaaggcaatggctgagcagggcgtgggcctgacggcacgtgcgctgaactcccgccgcgccatggcagtccgggaccagcttaacgagcaggtcacccgcgagctgctgcgccgggaccgggagtggaccgcctacggcagcgtccgcgtagaccccaacctgccgccgaccatcaaggccctggccgaccgctcggacgagattcacggtctgatgggtcagcgtgccagggaagccggggtccggggcttcgaggacttcgctccgcgtcccggatacttccaccgctcgtggaactggtccaagatggcgcagatggatgaggccgcccctggcctggcccggcgtgctatcagcgaggccgtgttccggggcatccctgggctggagcgtgccgacgccgacaccatcgcacaggccattgtgcagcgggcacgggaccgggctaccggtatccgctccgagttcatgggcgcgatgggcgtggcggacacggcattcatccggcaggcgctggaggaggccaacgtgtcccaggccaagttcgacagcatcatggccaagatcgagcagaagcagtccgaccagggcaccgtcaaatacggcaagggccggctgtcgctggacatgaccgccgagatcaaccacaatggaaccgtgtaccgcgtgcaggacctgatcgaccgggacctagaccgcctgatggagaactacgccggcagtatgtcgggccgctcggcactggcccgcgcaggcatgcccggcgactccgaggtggaagccttcatccgtgagtaccagcgggaggccgcgcacctgggcaccgacaaggtgcaggagctgacgggccaactgcggggcgtcttcggggacttcaccggcaacgtgccgcgagagcatcagctcggccccgtcgcacagcgggccagcgggctgaccagcgccaccatgctgggattctccggcgtgtaccagcttgctgagctggccacgatggctcaccgccagggcgtcttcaacgtaatgaaggccatgctgaactcccgcctgggtgacttcgtaggtgccatgcgtcgagacccggacctcgctgatgagatgcagaccgtcctcggcctgaacctcgccaacgacattcggatgaagccctggaagcggcagttcgacaccttcctggccagccaagacaccttcatggatcgcttcctccacgcgggtaagcaggctgtcccggtgctcaacggcatgaagttcatccacaactggcaatcccgcatgaacgccaacctcaccttgaacaaggtggcgcgggcggcgcagggggatgaagcagcccttcgcgtgcttcagcagtacgggaaggacgtggactggacgccagtcctggcgcgggttcgcggttatgtcacatacagaggaaggaacgcccaatccatgaattggggcgcctggagccaagcagacgtgaacaccgtcatgaacaccgcattgcggatcatggacgactcactgctgtacggtcgagtcggtcagaactcgggctttgcccggtcacctgtcggccaaatcctggggcagttccgcagctttgtggccttcgcgcacaacaagctcctccggggaacctatgagaactccggcgtgcttggcgtggcctcgctcctcgcattccagtatccgctcaccgcgctgatgatgggtgccaaggcagcgatcaacggcaagttcgacacctctgatgaaggcatccgcaagatggccatcgacggcatcggttacactgccggcctcggcttcaccgccgacatgtggggcgtgatcaccggacactctaggatgtccgccccggtcttcggactggcggagcactccaacgaggtgttccgtggcgtcaaggacctagtaaccggcgacgaccccgcagccgccaccggcgatatcgtcaacggcgccgcaggggcactgcctttcgtcaacgtattcccggcgaccaagttgctgctggaatccatcaaaggggaataacgtggctcggttcaagaatcccgagaccatccacgttgcagatggggtcgaggctgtcttcagtctcgacttcccattcctgcggcgtgaggacgtattcgtccaggtcgataagatactcaccaccgactatacgtgggtggacaacaccaacattcaattggccgtggtgccgaagcagggccaagaggtccgcatcttccgcgacacgcctgcccaggtcccggacactcagttcagccagggcatcccattcctgccgcgctacatcgacgcgaacaacaagcagctcctgtacgctgtgcaggagggcatcaacaccgcgaacctcgccctggatggcgtactcgacgcgatccgtatcgccgaggaagctcgccgcctggcacaggaagcactcgacgccgccaatgaggcgctgcgccgtgccctgggcttcgctgagattcgcaccgtgaccgaggactcggacatcgatccgagctggcgtggttactggaaccgctgcatcaccgctgacaaacccctgaccttgaccatgcagatggaagacccggatgcaccctggatcgagttcagcgaggtccacttcgagcaggcaggcgtgcgcgacctcaacatcgtggccggccccggcgtgaccatcaaccggttgcagaacaccaccatgcagctctacggcgagaatggcgtgtgtaccctcaagcggctgggcgctaaccactggatcgtgttcggagccatggaggacgaataatgcgcggcattatcgcgggcatcatggcctcccaaatccggcgtccaaaaccaatcctggcgacgtacccgtatcccatcctagctacagacgacgcatggtcctgccggcccaacatagtggcggcgctgacacgcgacactctgcacgaggttgtgaaccagccaggagaggacacctaccacgcgacctccagcgtggtaagcgtactgctgcggtcgctgactcagctcggctacggcggtggcgatgggttcctgaccggacctgccgtcaatgcagccttgctgcgcgatacggtgaaggaatataccgcagagccttacgcattcctgtcgcagaccgcagtggccggcgcagaactgaaggttgtggttgtatactccgagtatatcgtggagccgtacgccttcgccacctcgacagcaattaaacaggcggaactgaccaatgtttgagacacgagttaagggtcgctacaccgtgacccatctgaaagccacgggtgaagtcctggcacagtacaccttcgacaacctcatcactaacgcgggtctcgactggatttgcgccatggacacctcagacctgttctcacaggccctggccgtgagtaccagcacagcagaccccaaccccgctgcaccctccctgccggaggaagtacgacggaccacctcgtacgccccgaacggggatgttacctcgggtctggatggggagtggatttactggcacaagcggtggcgcttcccgataggcacccttaccggacaggtactggccaccgtgggcatcgtggcccaatccgaagttgggttcgagagtaacaccggcgcgaagattccggcagggactccactgtcctacacccggatcaaggatgccgccggccaacccaccaccctggtggttcaggccgacgagattctcgacgtgcagtatgagctgcgcagcaaggctgtggcgatggccgaggccaagttcgtgatctctggagtcgagcgtaccatccgccttactccgctgcccttcgcgaaccggcgtaacctctacggtgagcgctacatcttctacaacgagagtcctcggattgacggtaagaatgcgtccggctcggatgtccaggatggccagtgggtgaagctgtacccgcgatatacgcggggcacctacaaggggcagctaatgctgcgggccaccgttgataacggcaacatgccgggaggcatcaccggctgcaaggacctgaagatttacaacggtcggaactacgcactcaccatcgacccgcctgtagtcaagaacaacacgcaggaattctccatcacgatggagttctcggtagcgagggcataacccatggcactgatctacgacttcaacctggacctcgatccgaaggctaagtccaagttcgtaggtgcgcgaggccgtagggacatcagcgacgtgctagacttctgcgacgggggcgtggccatccaggacccgtcgcagggtatgatggtccgcgtgtggcgaacagagcttcgccaggacgggacctacctggggcacgaggacggctcgaacgagattcgcatcggcggaggtatcgaagaaggtatctccacgatgtccctcgacttcgacagtaacatgaactacgtgtgtgctttcgtacgagccgatcgaactggtgcaatctcctacttcaacgtgcagcagggccgccggctcctcgtggagcttgggcaggttgactatgccaaggtggccttggacgataagcgtcctggagctactgcctgggcacaggtcatcgtaccttacacccgtaacggcaacctgtacgtccgcacacagaacgagaactatacggtagagcacctggaggtggataccggcaaggtattccgaccgctggtcaaatgcggtatgggcaccaacctccgcttccaagtccaattcagagggcacatgtaatgagcaaaaagcagaccgcgagtgctgagcggctgggcctgctacacgagctggtctgcaccgctatcgagcgcaacttcaagtggtacatggacaacgacatcccgatccccgcatcggatatcgctgccgccaccaagttcctcaaggacaacgagatcacctgtgatccgtccgacaccatcaacatcgaccggctccgcgaggagatgcggcaggcgcaggccgagaaccgccgcattgccttggagggcttcatcgccggtgagaccgacgacgagatggaacgcctgtacacccactaaggaggcagcatgacgccgcaagaacgattccagatagcccacgaagtgcgggacatgtacccgcgcttccgggacttctgcctggacgccatgctgttcctcggcttcaagatgacgtggatgcagctcgacatcgccgacttcatgcaggattcgcccaacaaggcgatggtcgctgcgcagcgtggcgaggccaagtccaccatcgcctgtatctttgtggtgtggtgcatcgtccagaacccggctacccgcgccatgctggtatccggctctggtgacaaggctgaagagaacggccagttgatcacgaagctgatcatgcactgggacctgctggcgtacctgcgccccgaggcccgaatgggtgaccgtacctcggccaccagcttcgacgtgaactgggcgttgaagggcgtcgagaaatcggcctccatcaactgcatcgggatcaccgccgccctccagggttaccgtgctgacatcctaatccctgacgacatcgagaccacgaagaacggcctcaccgccaccgagcgggccaagctgacgcggcagtcgcaggagttcacctctatctgcacccacgggaagattctgtacctgggcacgccgcagagtcgcgagtcgatctacaacggcctgcccgcacggggcttcctgctgcgcatctggccgggccggttcccgaccctggaagagcaagagcgctacggcgactggctcgcaccctccatcctggcacgtatcgcccgcctggaggagaaaggccacaacccgcgcaccggcaagggcctggacggcacccgtggctggccggcggaccctcagcgctacaacgaagaagacctgatcgacaaggaactcgaccaaggccccgagggcttccagcttcagtacatgctggacaccagcctcgccgacgagcagcgtatgcagctcaagctgcgcgacctgctgttcatcgacgccacgcatgagagcgtacccgagcaagtggcctgggctgccgacgagcgcttcaagctcaagttcgacgcccaccgattcccggtcatcaagcctgagctgtacctgccggcgctgatggctggcggctgggcaccgctccagcagatgacgatgttcgtggaccctgccggcgatggtggcgacgagctgtcgtatgcagtaggcggaactctcggcccgtacatccacgtcgtgagcatcggcggctggaagggtggatttgccgaggagaacctggagaaatgtattgccctggctgcgcgttacggcgtcaaggtgatctatgtcgagaaaaacctcggcgcgggtgcagttggccagctcttccgcaaccatatgcgatccatcgacccggacaccaacaagccccgctatgaggggatcggcgtagaagaccgccagaagtccggccaaaaggaacgtcgcatcatcgacaccctgcggcccatcatgcagcggcaccgtctgatcttccacgtctcggcgatggattccgaccacgtgtcctgccagcaatacccagcggacaagcgcaacgagcgctccgtgttccaccagattcacaacatcaccaccgaccgaggctcactgccgaaggacgaccggatcgatgcccttgagggccttgtccgcgagctagcacccacgctcgtaaaggacgacgaagccgcaacccgcgctcgtgaagaggctgccaagaaggaatggctgaacaacccgatgggttacactaagtctgtccttcggtctctcggcatgggccgggagcgtcgcaagggccgcccaaaaggacgaagactatgatgctcgataccgccaccgaggcgggcaaaggcaccctcgccgtcaccggcgtggggattgccgtttactcgccctatgagatcgccagcctctgtgctgcggtactcaccgcgctctacgtgggcgctcagctcatcaccctactcccgaagatgctcgatagcatcgcggagcttcgccggaggttcaagaagtgaacaagcccctgcgcggcgcagcccttgcggctgccctcgccggccttgtcgccctggaaggcagcgagaccaccgcctaccgggacatcgccggcgtacccaccatctgctctggcaccactgccggggtcaagatgggcgacaaagccacaccggagcagtgctaccagatgacgctcaaggactaccagcgcttcgagcgcattgtcctggacgccatcaaggtgccgctgaacgtcaacgagcaaaccgccctgacgttcttctgctacaacgtgggtccagtctgtacaaccagcacagcgttcaagcgcttcaaccaaggccgcgccaccgagggctgccaagccctggctatgtggaacaaggtcacgatcaacgaccagagggtcgtatccaagggcctcgtgaatcgccgcaacgcggagatcaagcaatgcctcgaaccatcgtcgcaatactcgtccttgctgtggtagccctgggagcctcatacggcttcgtccagagctaccgagccttgggtatagcccaggaggagatcaagcgtcagacggcccgtgcggaggccctggaggtgcgttacaccaccttacagcgccacgtccaggaggtcgccgccaagaccaacacccagcgccaggaggtggaccgtgccctggaccagaaccgcccgtgggctgaccggcctgtgcctgctactgtcgttgacagcctgtgcaaccgccccggcgcccgctgtgctgtgcgaacaccctctgattgaccctaccacccaggctggcctaatccgcgctgtagcggcctatcaggacgccctggacctatgcaacgccctgaatcaaggagactgacatggcgaacacccgtgatcaatacctcgctggccgtaacaccggcctgaccttctaccaggtctgccagcccggcaccgacaaccgcatcgccctgcacgacatggacgaggccgatgtcaaggctaaggccaccgctgtgattgcagcagcctctgccctgggcggcgagggtggcgctactccaccggacccgctcaccgcctacaaggtgaagaacggtgacaccctgcccgtggacggcggtggctccgtgaaggtgaccgtagccaacggtgccatcaccaaggtcgtgtacaccgcaccggcgggctgagctacagcccgtccaacctgatccacccataacacaaggaactgaaccatggcaaccttcgccgctgcaactcagaaagacctccgcgccttcgccggcaccatcgagaacctgatccgtccgctggaggaagcggccctgggttctggctacaacgagaccaagctgcgcgctgaactggtcgcgcacctcgacgagctgatggctgctgtcgagactgccaaggcgctggtctacaagtgatcgacgagtagctcaagccgagcacctgcacagtcgggtgctccactggaactactggaatttttattgagggctggctgtgggtgggagttggtagtggtgggcgggagtagttactccgggtctaattttggtatcgtcgtgtgagaaccctcccgactctgatcagcccacccttcccccgtaggccctccgcctggtgggccactgcctcgcattgcctgggtgttgcctgggtcatccctgggagcttccagctacgctgggtggtggtgggcttccctgccctgtcgctgtcctgtcgccgcccattctacgcatcctggcgggagtgtcaacccctgggtggtcggtgccttgctcggctacgctccagcgcttccgcgtggtcggctaggcggttggctcgccagcgcttcgcccactctacacctcgctccacctcggaccacttgtccgccagcatcatgcgctgccatgccgcgtcctgctgtagccatgccctgctggctctgtcctgtctgctcagcatcctctgtctcctctgtctggctccctggggcttccctggggcgctgctgtggtcctgtcgggtgatggtg

SEQ ID NO: 46 - DNA, 44801 bp, synthetic construct
  source 1..44801: mol_type = other DNA
tctaattttggtatcgtcgtgtgagaaccctcccgactctgatcagcccacccttcccccgtaggccctccgcctggtgggccactgcctcgcattgcctgggtgttgcctgggtcatccctgggagcttccagctacgctgggtggtggtgggcttccctgccctgtcgctgtcctgtcgccgcccattctacgcatcctggcgggagtgtcaacccctgggtggtcggtgccttgctcggctacgctccagcgcttccgcgtggtcggctaggcggttggctcgccagcgcttcgcccactctacacctcgctccacctcggaccacttgtccgccagcatcatgcgctgccatgccgcgtcctgctgtagccatgccctgctggctctgtcctgtctgctcagcatcctctgtctcctctgtctggctccctggggcttccctggggcgctgctgtggtcctgtcgggtgatggtgcgggagtggctggccttgcctcttgtgcctctgtacctgtggcattgccctggctctacctggctgctccctgggtattccctggggctgcctgggtggccctggccactccctctaggccacgtactctactcgcctccacctgtcctgtctagtcctgctctgctccctggagcttccctggatgctacctgggtgctggtctatctccctggctctgcctggcgctgtgctgtgctaccgctggtcctgctgtcttgcctcgccgctccctcgcctgctcggtcgcacctgcggcgctgatggactcctgtttgtccattgtgtgtgacataaccgcagccttagtgccatgcgggttccagggcgatgggtctggctggttggctgctccctgggtgggggctgtcgctccctggtaacgcaaatcctggctagctagactaagcctcgcgcatggggtctctatacgcgtgggaaggctccagggagcgcctggggaggggttgacacgttggcggtaggtctgtagagttcgccctgtcttcacgcaataccgccttcacaggcagcctggagacagggttgacacactacccgggcatcggtagagtacgcagccagaacgacgggagattgcaaccttccaagcgcggcacaagccataggcgcaagggacacggcaagctcttagggcaggaaccgcagtgtgtaaggccggcaggcatcactggggggattgacaaggtaatagatgcggtaagatgtgcggcgtcaagtggtcccgatgtacacactgtgaagggattacggcgcggtcagacagatgaccggcaccgcttgacactgtaaagctcagtcggtacgatgggcacccatagcggacgtgatggtccggggcgatgcggataggacgccttgtttataacctgaccgcaaagctgtgactccagccgataggactgacccaccacgtaaatacagacgggttgacacgacaaggccaagtcgataacatggccgccacaaagggaagcgatagcttcctggcggtagaggttcgaagcttcaccagcggtacatggactggtgcggtaggttgaccgaagctgcaactggttaggcagggtcccagggaatacctgtcgggtgctgaagactcacccaaaagagtctgagcgggaagcctccccgtccacggttaagcaaaggcacgttagtgccggtgggaacgaatagagtgtcagtgggatcgagaactagaaacctcggttaatcgcgactgacagtatgctgggtagtatcggtgggccgattgaacaaggccaggcagatagcgcaaagggtacgggggatgagtgaagacgatcccgaagagtatgcgcaggacaagccagaaccgctgatactacagggactatgccaatgccaaggtttgtcccttgaggcccttccaccgaggggattcaagagacagacctagttgaggaatgccgatggcacacttcaaggctaaggctcccaagtcgcccttcgctacccaggtagcgtactggcgggattgggaagccaaacgtactaagctcatcgcacaggataacgtcgaggggcgcaaagagcttcgcaagatgcgtgacgtgcgctacgctaccgacccggagccagcgccaggacgctaccataaccctgaacagaaagcgttcgtgaagggtagcgaaggcaaggcgcggaacatcctgaagggatggaacgctaagaagtcgcaagggaagggtttgtaatgccacgtgtgaatgaactgacgccgcgtcaacgcaaggccgccaaggctcgccgcgacaaggcacgccggattgatctagcgcacaagatgccgaaaggcgccgactgcccgatcttccgcaaggctgaacaggcgcaagctaagcagccccgcgtcgataccctgaccactccccgcagtgccggctacctggccgccgctgcttacctgaacaaatccatctgaggtacataccatgaccaacgcaatctccaaaaccgtaatcgcattccgtggcaccgaagagatcaatcgcgctatcgacgccatccgtgtccgtggcaaggaactcgacgaagccatccaactgaccggcctgtcgatcatccatcacatcgaccagtgtggtgacgtgaccgtggtcaaggcgctgtatgaagccatgccgaagggcagccgccgcaatgcgctggtcgagtggctggtgctgcacggcaaggtacaggtgaataccgacaagaagtcgaacaaggacctgcccttcctgtacaacaagttcggcaagaccgatctcgtaggcgccaccgacaacccgtggtacagcttcaagcctgagaaagcgctggaccaggagtttaacctggccgctgccctggccacgatcaaaaagcaggtgctccaggctcagaccaagggcaaggtgatcgtcggcatggaactgctgggtgatctggaagcgctggccgccaaggctgcacccatcgccgagcagagcaagcgcgctgccgcccattgactcaagtcgaacgcctgctaagcgggcgttccgctggaatcaatgacaactggagaaacacgatgagctttaagcaacgtctgcaacgtcaaatcgccctggcccaatacagccgcccggctcagttcccgtacggcgagcaggccgtccaggcgaagggagagtgaccatggacttctggattgccctccccttcctcgaactcggcctcaacctcggcgaggatgaactgcgcatgttgtggttcagcggcctgacggtattcttcatccacctcctgaagcggtgactcaagtcatggccctggcgggcgaccctcgcctactccggggccatcgctggactcatcacaagcgagaactaaaccatgcaagctttgaatactctgttgatcgcaatccccaaggacccgtcgaacgcattcaatgcagccgacaaggtgctgtgcgcccatggcttccgtatgggtgacctgaataccgcgcacgtgctgacccctggcgggttcgtagtagtgggcgccggcgtgaccgtcaaccgctacgacgaagcgtatcgtatgagccggaacctcgattccgaaggcttcgacgttctgctggtccagggcagtccactgtccgggcacgtcacctgccaggcgtacggctggatcaatgcggaataccgcaagggctgcgcgaacgggcgcccgatcttcgacattgcaggaacctcgtaccatgtcctcgcgtgatccctaccgtatcggccaccgcgtggggctggtgaactacagcgaccgctacctaggtgccgacgcggcaggcaccaagggcgtcattgaagccataacccgaccgtcccgctgtatgacgatctatcacgtacgctgtgagcggaccctgcgcttgatcgaggccgaggcccgtaacgtgcgattcatcagacagctaccgacccgcaaatgacgtggcgcataatcgtcgtcagcccatcaagcggctgcgccttcgtgtggagtctcaagcggcctgtgcggccagtgcgattctactcccgcaaggcagctaaacgctggctccgcaagcaccgccgacagggcttgcctggccactactacctcatcgtgaactggagcaaacgcctatgaatcctacttacgtcgtccgcctcaaggacggaaccacccgccaggtagtcgccgacagcatcgtcaccggccacgccttcgtcgaactctggttcctcggcggggcggtcgctatctacccggcctgcgaagtacaggaggtccaccgcactgacctcgtaaaggagggtggtgatgaatacccgcactgtatacgtcaagccgcacagttcgaggtgcccgccggtattgtccgcaggacgcctgaccccgggtgaactctaccacgtgatcgcacctgccgaggtcgaaggcgtcattgtgctggcaacttcaggcccgtggcacatccggtccgtggtggtgcatagcatgcacccctcggtatatcccgtagggatggctgtcactgacgattcctggcggttccgccgcctgggtgtgagcgagtacgtccaactaattcaagggtacgaacaatgatcgccatcctgttcgtactcggtctgtactgctgcctcggcctgctggcaggcgcctgctactgcatcgcagtggccccgccattcgagaacccgacggaagtgcagttccaggacgcatgcgtgatcgggtgcatctggccactcgtgatcctcgtcggcatattcctggcactccgtgcagtaggccggggcctgctgaccgggctgaagcgtcacctgaacatccaataacctaccggaggtaacatgatccgcacccatacccacaacaccgaccgcgaacagcgccgcatctacaagctcactgagctgacgtcgggtgagatgtacagtgtagtgcagcccgagtccaagcgtggcacgctggtggtcggagtagcaacctgggatagccagagccgacctgtagtgctgcccgtggtcattcacgatgtgggtgcgcatccctcgccctgtcccaccgtgctgcgcaacgacggctggcgcatggtgcttgccgccaagggcacccaggtaacactcaccgccgagtgaccaaggcgaaggctggtgcgccagccttccaccgtggccattccttgccgcgaaccaactcaaccgaggagctacaacatgaccaacgtcaacaccgccaccaccgagaccaccaccgctgctgccctgggcgccaagctcatcaagaagccggctaccgtggaagacttccgcaacaacgtggtcttccatcacaccgccctggccaagctgaccgaagtctacaacgaggcggtcgttgccctgcaaaccgccgagcgcctgtccagcctcgtcgccggtgacgtgatcaccttcgaccacggcaagggcgagaaagccgaagtgctgagcggcgaagtcatcagcgtggttgccggcgtttaccaggtgctggtccgcttcagcgacagcgcacctgccaagctgctggacgtgaaggccagcgccatccgcgccgtccagtcgtcggcagcccaggctgctaccctcgacgaagccatcgcccagggcgagtaaggcccgcacgtaataggcccggccctccgggcctattgcgagctagccataccataggaggagtcaccatgagcaagcgtaaccccgagcacatcagcggcgccgtgcgtagcgtcagcgtccagaagtcggcagccgtccaggaactggaggatcgtctggagtctgccctggccgtgtgccagcagcgggcggaagacatcgatctgctgagccgccgtctccaggccgccgagcgcgcccgccgctgggagatcgacgagattcgcaaccaccaggcgaccatccgcctgttgcagaacgacctgaacgctgcgcatgatgcccacgaggcacaagagcgccgcgctcgcaaggcaaccatcatggcctgggtatgcctgctgaccgcaggtttggccgtcaccctgaaactggcaggagtctgaccatgcagtgcaacgacctttacactaagctcgcagcgagcatgttcaacgtgccgtgctcccaggtgaccgccgagatgcgccgcgtagccaagagccgggcattcgcgtatgcttacactcccaagcgacaggcgtcgggtgggacgtacaccgcccgcgtgagcggcgtcacctgtgacggtggcaaggtggaggtacgtctggacaacgtggagcgcgccgacacctgtggctatgccaagctggaggcgctggaagcggtcagcctgtaccagggtgccgcgaagcgcgccgatgagtatgaaaagctactgctccaggcattcccggtggtggctaagcgtcgtgagcgcttgcgtatctccgggccgctgtcggcggaagacttccgggcaaacctgctcgggacgtgttccgcatatcggaatgccctcgacgccatacggggcgagattacctcgaccggcccgttgcggaaccgcatatgggcgctggtcgaacgtatgcaccgggccgagacgaagctcaggaatgctcagtcggagatcaaccgcctgcgggagcaggaactggaccgcctccgcaaggacatgtccagctactgcgccaacgacgttacctctacggtgagtgcagcatccgcgaaggataccctacgggtggcaaccttcgccgccgccctcgccggtggcgtcgtaggtagcgccctgatgttcctgctcagctagggcgaccagggcctactccggggtcaaatctgagggcgttcctagagcgccctctcgtgtgagtctggaggatcacgaacatgcaataccatttcacgcattacaacggataccgcttcggcgtcgagctggaagacgaggctgtcttcccgtgcatcgacggtaagcgggcgacctgggacaaggtggcggcgtgtgccggtagccttgtgcattacatggcgcaggacctgattgacttcggccagcgcaagttaagggagatcgaagatgagcaagacgagcctgtacccgctgagcctgcatcccggcctgattcaaatcaggacgattcacgtattcagcattcaagctccgagcaacgccgagaactggtggcaatggttcctctggcagcggaagtaccacccgctccgggagagcctgagtccagccggggaactgagtgcgagtatcgccgagtgtgtccaccgcctccgccagagtggctggcaagatagcgacatctggcgcaagaagggaggcgtgctggccctcggtgccttcgacctgtccggcctgatggtgggttcctgcctcgtagtaggcggtgagctgaaggccctgtgcgttgatgaccggcacagcaggcagggtatcggcgctgagctggtacgagctgccgagctggccggtgctgagcacctgacctgcttcgagttcctggagccgttctacgccggcttgggctggcgcaccgagcgccgtgaggcaaactggactgaaggcgagccggatgtgctgtacatgagggcacctggccatgacgcatgaggtgatggtatggcttatcgcgaacaaaccgctggtcatcggagtcgccttcagcctggtggccctgggcgtgctgctcacacagaacaacggcggcccgcctatggcgcccgcatgacctggcacctccaggacatgttcgaggcccgaggtgggctgaggcccttgtgggaggagtggtatcaatggcactgcgccgcgactcctggctaaagcaagcgcaatccctggcagtcggccaggcgggtcgattccgccacgtcctgggatgccagagcatgagccggggcgggaccaacatgacctgcaagaacctgcctgaccgctgggtggcatactgctactcctgtcaggaaggtggcgtggtcgagaaaacgcacgtgcggagggtgcaatgcgcggatcaagaacgcttcatgccctggcccgaggatgcctcggactggacgcaagccgactgctatcaatcgctatatggtttgctgctgtccaagggcatcgactacaacgtgatgacgccggggctgccgctgctctacagcgaaaggcagcatcggcttatcttccctaccgacgcgggctggattgggcgcgctactgccgaccaaaatcccaagtgggtgggctacgggtatcctgccccggactaccatggatggccccaggaatcatcaatgggcaggccatgggtgctgacggaagactacttgtcggcgctgaaggtgcggtgggcatgtcccgaagtcttcgctgtcggtctgaacggtacaaggctgcgcgacaggctggcggcgatcatgttgcagcagacctgcaagcgcgccttcatcttcttggatggcgaccgggcaggtgtccgtggtagtgcaggcgtgatgcgccggctccggtccctgcttatcgaaggccaagtcataccaacgccggacgggttcgaccccaaggacctgacccgcgagcagataaggagcctagtaattggacgtattgacgcttcacgcactgagtgaccgggaccgcttccgcacgttgcggagtgtggtgcccgaaggaatgatggggccggagacgtgcttcgtcatcgactggatcgagcagtattggaaggtctacccggtgcatcagaaggtagacccgcaggcactgcgcgaactgatcaagctgcgaggtggctaccagccagagcaactagcggtggtcctgaacctcgtcaaccaactggacaagccggtggacccggactcgctacagggcgttgtgtcccagctcaacgaactggatttctcagggcgggtggatgccctcctggcgcagtacaaccagggcgaggacatcgacctggcgtatgagctgcgccggctgagcgacgaggccctgcgccgcgagggggtcagcacgccgaccgactacgtgacggacgacgtgtttgatatcctcgcggaggagcagggtgaccacggcatcaagctgccggggctggtgctgccggcgtacatgaagggcctccacgccggggcctcggtgctggtggcggcgccgcctgatgcgggcaagacctcgttcatggcctggatcgctgtccatatcgcgccgcagctcaagcggtacttcgacccggggcggcccatcctgtggctgaacaacgagggcaagggtcggcggatcaagccgcgcctgtactcggcagccttgggcatgaccgtgggcgagattcttgccctggacccggaggaagttcgcaggatgtacgccgagaaaatcggcggcgactctgagctgatccgcatcaaggacttccacggtgggtcgctggctcaggctgaacaggtcatcgacgcgatgaagccagcggtggtgttttgggacatgatggcccacgtcaagggcggccagcgcaaggaccagaaccgtaccgacgagatggagtacaaggtggctgaggtccgcgagatggcggtacggcacgacttcatcagcttcatgacgtggcagattagcaacgacggccacgaccagttgttcccgccgcagtcctgcctcaaggattcgaagacagcggtacagggtgctgtggacgtgcaaatccacctgggccgtctcaacggcgcggatcaacaggtcatgcgtggcctgtccctgccgaagaacaagttccagatggacgggaagccttcgaacgtggaggcaatgattaacttcgacgccgcacggtgtcgtttctttgagagtgtggatcatgcaagctaagcatagccgggtgctcgaaggcaccaaagaaattccgctgggtagcatcgcactgttaccgggcaccgtcgcgggcctgctgctgtgcctgtactccgacgcaactcacgaggagggcgtcgccttggccggtgggttccctcgcgacttgctgcacggcgccactcccaaggacgtggatgttgccctgtacagcatgacctgggggcgggcagagcacctgatccagaaggcactcccggtcctgaaccccatcttcgtccgggatggtgggtggcgctcggactacgccgatggcggcgacggtggtatcttcaagggcgtgatgtccctcgtgggctgccgtgggttgaatggcatggacttggactttaactactacgacgccgacagcctcggtcgagtgatggagtcgttcgacttcaccatcaaccaggtaggcatcgcgtacaactggcccgaccccgaaggcggtccgcgcctgggtgcgtacctgcacaaggacgttacctggggcgtgaacagggaagtcggtaacggctcgcgactgccggagcgatgcgagaagatgcgggccaaggccgcgtattacggatgggagaacgtgtgatgagcaagcgcgacgtggtactggatatcgagaaaggcatctggcgcggcgtagaccagaacgacaaggccgtcgaggccatcatcaagaagcacgggtacgtgatcgtcgagcctaagatcgacgggtgccgtgccatcgtcggtgcgcatggcgtggtgtcccgaagcgggcgccgcttcccggccctggatagcttggaagaccgcatcatcgatcgactggcccgccccgggctggactccggcctggtgctggactgcgagatgtacctggccggcatgcccttcagcgaggcgactggccgcatgtcgcgcaagaccccactgaccgaggaagagctggggtgcctgcacttcgcggtgttcgacgccacccatatagacgtgctccgcaaggcgcgcacctcccacctggtatacgaagagcgccgcgccatggccagcagcctcctggcagcttgccgcctcagcgacactccgacgttcttccaggtaggctcgcaggtgtgtcggtcgatggaggaagtcttaggccggtactccctccaccgcgccatgggcttcgaagggtcgatggagaaagacccgagcatggtctaccgcaacggcaaggtcgccggctgctacaagcgcaagccggagatcaccgtagacgggcgcatcgtaggctacgtgccgggcaggaccggcaagaacgctggccgcatcgtgggctactatgtcgagttggaagacggctcgggcaccgtggccgccaccggtctgaccgaggagcacatcgagttcctgacccgtagccaatactactcgaccgtcaacgacacgatgccaaacttcggtcgcatcgtcgaggtctctgcgatggaacgctcggccaacaccctgcgccatcccagcttcagtcgcttccgcgaccttcccagcaatccaggagtcaaggtatgaagattcgaaagtcccgtaaccgcaactacccggaagatatggtgtaccacgccaccaaccgggattcactgctgtatccgaagtacgtcatgggttccgtgttcatcagccaggacggaacattccgcatctgcgtcatggcagggacctgggaccacgttgggtccgaagttctgcatcatgcacgggacatccaatcccttggcgccggtcgccgtaagttgcaccgggtcatgcgacggctgcgccgcaatctgcaacaggtaggagtcaaggtatgagaatgccaaccgaagaagaacgcacgatccgctgcctgctggcagatatccacgaacccttgaacctgctgttccccggtatccgtgtaaaggccgagacaatgcccttgggctggggagatagtatctgtgccctggtactccgggtgagctacgaacatcgcacgctgggtcgcctggagtacctgcacgaggtccccatcctgcacctgacgcagtggggccgggacggcatgctccagcacctgatgaacgagattccccgtcgggtgctggatggcatgctgcgccaggcacagaaatacagccagagcaactggtacagcaaatgacgactatccgaatcctcgacctcgaaaccgagagctacgagcacaaagggcgcaaagcgtcgccctttgacccccgcaactatatcgtcatggccggctggcgtgacgatgttgacggcaaggtcggccagaaggtggagcatcgcttccgcagccgggccgaagccgaagatccgaacaaccgctggttcaacctcgacggcgtggacgtgatcgtagcgcacaacgccatgttcgaatcgaactggttcttcacccgctaccgggacgagtacctggccttcctgcgacgtggtggccgggtctggtgtacccagcaggccgagtatctgctgagccatcagacgtggctgtacccggcactcgacgaactggccccgaagtacggcggcacccacaaggtggacggcatcaagctgctgtgggaccagggcgtgctcacctcggagatggaccaggacctgctgagcgagtacctgtccggcccgtgcggcgacatcgagaataccgccctcgtattctacggtcagttgatgaagctccaggcccgtggaatgtgggctggctacctggagcgctgcgaggccctgatcggtttctcggcgatggagtgcgccggcctgaaggtggacctcgaagtcgcccgggtgaaccacgccaagcaactggaagaggtggccgggatcgaggctgagctgaagaagctgatgcccgacttcccggaatacttcgagttcaagtataccagcctctaccatatgagcgcatggctctacggcggcgaggtgcggtacaagggccgggtgccctacgaagatggccggatggagaaagccgacttcgtgcgcttcggcacggccaagcgggggactcctatcgagagtacctcggtgcgggtcccgatccacgaagtgaccaaccagggtgagtggcactggcccaccatcaccgagctggcgaccaagcacggcccggtcatcacgttctccgccggcaagaacaagggcagcgtcaaggtgttccgtgaggatacggacatcccggcgaccaagtgggacgatgaccagcgattccgattccccgggctgatcaacctgaacaacctgccggaagtggtgcgcgagaaattcctaggcaagcgcccggagttccagtgcgccctcaccctggcggatggatcgcccgtgttcagcaccagcggcgacgccctccaggctctggagaaacagggcttcgaggcagccaagctgttgatgcgcctggccgagttgcacaaggacaactcctcgttctacatcacccacacctacaacaaggatgggacgatcaaggacacgaaggggatgcttcagtacgtggacgatgatggtatcatccaccactcgctgaatacgaccgcgacggccacgacccgactgtcgtccagccgcccgaacctccagcagctcccgtcaaaggacgaagacgacccggaagccggcagccgcgtgaaggagatgttcgtgtctcgcttcggcgcggacgggatgatcggcgagaccgactataccgccctggaggtggtgatgttggcggccctgtcgaaggaccggaacctcctggcgaagctgatggccggcacggacatgcacttgtaccgcctggcagggaagcacaacaactggaacgggttcgattacgaccagctcgtggccatcaagaaggaccccaaccatccgtggcacggtcgcatgatgcaggctcgaaagaacatcaagcccaaggcattctcggcgcagtacggtgcgagcgcggctggtatcgcattcaacaccggctgtaccgtggaagaggcccaggaattcctggacaacgaggcggccctgttccccgagtccatcgcattccggcagatcgtccgcgacagtgcagaggccaccagcctcgtgatgtacaaggccgaggaccagatgccggcgggcgccttcagcgagatggggtcggatggtaactggcgccagtaccgccgaggattctggcaagcgccgggaggcacctgctacagcttccgccaacaggaacgctgggacaaggaacagcgcaagacggtcatggacttcaaggacacgcagatcgccaactactggaaccagggcgaggctgggttcatgatgaccgtgagcgtggggcgcatcttccgttggatgctgcatcgcccgggattcatggtcaccgagttcctgatcaacaacgtacacgatgccgtgtacaccgactgccacaaggacaccgccgccgaggtcaacaagggcgtgcgcgacatcatggccgacgcggcccgctacatgagcgagcggctgggctacgacatcgccgacgttccattcccggcagtggctgagatggggccgaacatgttcaatatggaggtgatccagtgaaagaactgcatccgctgcacacgcccgagttcgtcaaaacattcctggaccagaccgggtgcctgcctggggtacgccgtacgggccgcaccaccggcattgctctacaggccatcggcatggcgctgtcccatccgagggaaaccctgacgttcgtggaccacccggacggcagctcggcagcactggtggccagcattgaaaccatactggcgaccctgggctaccggaacgtcctcgttcgacccacaacccgtgcggacgggcgcagcgtgaacatcgtcttcaagacgctgccgaacgcctgacgaccttccctactccggccttaaatcttccttcgacacaagagagaccacgtatgactcagcaactcaacgctctgcaagctgcactcgccctggccaacaaggctgccgagaccgcaaccatcgacatgtctgaaacctccaccggcggtggcggcggtcgaatcttcccggctggcaccgccatgggccgattctgcatctacatcgagctgggtgaccacgccaaggaattccagggcaagctcaagaacccggcgcctcaaatccgcctgggcttcgcactgtggggcgacgtgaacccgcaggccggtaatccgcagagccgcccggacgacctgttccacacctacgaggccgacggctcgatcaagcccggcctgttccgtaccttcgagatgaccctcggcaacaacgagaaatcgaagaccaagctcgccttcgacaagatgaactggagcgggcagcatacccacttcgctcagatgctcggccaggcgttcatcatcccgatcaagcgcaccaagatcaccaagggcaacaacgccggcaaggaacgcaacgacatcgattggggcggcatcatgaagccctacaatccggtcgatggcagcccgtacaacgtgccggaactgccgatggacctgttgcagtatttcttcttcgacgcgccgaccaaggagacctgggacgccctgcacatcgaaggcacctcggacaatggcaagtccaagaacttcctgcaagagaccattcgctcggccaccaacttccctggctcggccctgcacatcatgctgggcggcggcgacgatctgatcatcaagccgacgacccaggccgcaggcagcaacctgccggcagtgcccaacgtggccgccgatgcaggcgtagcagcagcccctgctgtcccggcagttccgcaggcagtgccgcagacggcccctagcgtgccccaggtggcgaatgtagctgcccctgtggtaggtactgccgaggcacagaacgtgctgcctgacgtaccgcaggtggctcaggtggcagctccggcggcggtcgaagtcccgtcggtcccggtagtgccggcagtaccgcaggtctaatgcgcctgccatcggaagagttcctggcaggactatccgcgcagttcgaccgcagcatggcaggcgggacgttggtgtgtgacgccgacggacccgcctacgtggctgcggccactgctaagaccttggacactgcactccggagattctggaagctcattttggagcagcagttcctagcgcactgcacggggacacgggttcacctcacggcagcaggtggggcgaaggcgtaccgggacacgtatccgaccatgaaaccctaccagggccagcgcaagggtaaggcaaagcccgcgctgctggagcctctgcgacgggccgtggcggacgtgcatgagcgcggcggcgcacccgaagggatcgatgtcatcctgcacacgttcttcgaggcggacgacggcatgatgatggacgcctacgccatgcaggacaaggccatcatccggtccgacgacaaagacctgcggatgacgatctacccgtattgggagatcgacacggcgtgtgtgagcaggatcgaaggcggcttcggctacctcaaggaggcatacacgccttccggccagttcaagctcaagggccacggacggaagttcttccttgcgcagtggctcggcggcgataccgctgacaacatccgagggatcgatcgattcaacgggaagctctgcgggatgaagacggccttcgatatcctccacccgatcacggacgaggatgaagccatcgacatgatcctggaggcgtacgccaagatcaagcaaaacccgctggcagaggccgaggtgctgtggatgcgccgaacgcctaccgacaacgcagcgcagtacctgttaagccgcgaccttcgtccggccttccgccagtggatcatcgagctggacgcctaccacgaggcgctgctccagaagcggagggagagtgactatgacgagtgagccgaaggtctaccagataccgcgcagccaacagcgcaccttcaccctgaagctgtgggccgagcagggcaagctatgcccgctctgcggtaagcccatcgatatcagcgtgaagggcgaggcggtgatggaccacgaccacgagacggggctggtgcggggcgtcctgcatcgatcctgtaacaccgcagaaggcaagatcacgaacgcggcgggttcctggggatgcaagtcgatgaagtacaccgacatcatcccctaccttcgtgccctcctgacgtacctggaggggccgaagcatccgctgatctaccccctgcacaagaccgacgaggagaaacacgaagcgaagctggccaagcgccggcaggcagccgccaaacgcaaggcggcgatggccgtcgcaaagcacaacgcgaggaacgtatgagcaaactccgcaagcaattcaccaatgagtacctgcgcaacgtctatgtcgagctgggtctcaagaagggcgccgagcatctgaccaggcattcgcgcttcggcgaagtgagccgccagtgcttccgcaactggtgcatcaagctgggcttccacgacagcaggacacgcggcacgtacgccaagaagggtgcgctgcactggctgggccgaaaggcggccgaggtagtgcgcaagttccctggcgccgtgggcaacgtggtcggccaagggccgaaggtgttgagcctggacatcgagacctcgcctatcgagggctgggtctggtcgctctggaagcagaacgtgggcctcaaccagatcaagcgggactggaccatcctgtcgttctgcgcgaagtggatgcacagcgacgaggtgatctacatggactgccagggcgaccccctggacgacatgcacctgctggtcgccctgcacaagctgttggacgaggccgacatcatcatcgtccagaacggcaagcgcttcgacgtgcccaagatcaacgcccggttcttcctgaacaagatgccgccgccacgaccgttcaaggtgatcgacaccttgatcatcgccaagcagcaattcgcgttcaccagccgcaagctggagtacatgacccacaaggcatgcaccatcaagaagcgcctccacggcaagttccccggattcgacctgtgggcagcctgcctccaggacaacccggaagcctgggaggagatgcgcctgtacaacatcgacgacgtacgatcgatggaggagctgtacatcctgatgcgcccgtggttcgtcggccatcccaacgtggccgtgtacttcaacgacgctgagccgactatccgatgcccgaagtgtggcgacacggatgtcaagcaagaaggctgggtgcatacgcagaccggcaagtacgagcactatcactgcggtggctgtggtggctggagccgagggcggtatacccgcaacacctcggaacagcgcaaggccctgctgagcaactaaggaggctatatgagcctggcgttctccgatccctacgaatctacgggcacccagcccggccagtaccgcaaaggcgcggccccggacgagcgaaaggccggcaagctcccgatgcacctggtggttgaaggcttcccgctgctaaagcgggagcttgcccgcatgatgcagtgggccgccgaggtcaagggctacaagccccacgactggaagaagatgtcggtgggcgagttcaaggccgcccaacaccggcacgaatcccaccgcctgctggacgggccgctggatgacgagtcgaacctgatgcacctcgtgcatgaggcattcaacgcaatggccgccgccgagcgtgccttgatggaccgggagaaaggcaatgagtaaaatctgttggtgtacccgaccgcacgagaccgacgaaggtgtacgtgtcatctgggccttcaacgagcggggcatcggggtaaactacgtcacggcgtacgtcacgccggcgatgatccaccacccggactggcgcgataccatcctcccggacatcctccaggagatggcggagcgcctggaccgcgaggttaagctggtggaattgcgctggttccgcgctgagattctgagctgcggggaatggcgtgactaccgagcaatgacgctggacggggcggtcagcctggccgaggccgagtggggtcccgaggatatcgggcgcgtaatcgaaagacgataggagacggaatggacctgatacagcagcagatcgcccacgaagaggcccttgtcggggcggcgcagaacgacgcccgcattgccttggaaaaggcgatagcccaagggtccatcgaccgcatcccgagggcacgcatcatgttgatgcggatgctccccatcgtgaccgaagcgatcttcgcccaccaggaagcgaaggcggcgggaccggcagcgaagctgcgacacctgctgcggatcatcgacgcccaggacctcgcggtcatggcgctacgggccgggctgtcgatgctcatcaactacccaacgatcaccgcgacgaagtattacacccatatgggcaagatgctctgccgcgagatcgaagtgcggttggccttcaaggtcaaccaaccctattacgaccggacgctggactacctcaagaccagcaggactcgcagcgtccggcacatccagaagacgatggacgcccttctggacgcggtactgcccgaggaggcacgtatcgacctgccggatggcgactacctgcgtctcggcaagttcatcggtgacccgctgatccaatgcggcctgttcgagccgaaccgcttcacaggccggggcggtacgagcgtccacctggagccgtcgccggaggccaaggagttcctgcaagacccgtcggcggcgatgacctggggaggcccaggccgtagcgtaatgctggcaccaccgagaccctggaacgactggtgcgatggcgggtactacagcgccaaggcgcagaagcatcacgtattggtgcgtcgtaccaaacaccagaccaagcgggcacgtcagatgcagctccgccacctgggccgggacaagatgcccaaggtatacgcggcggtcaacgcactgcaatcggtggcctacgagatcaaccacgacgtgtacgagatcatcgagcgcatcttcacttccggcggcggcgtgctgggtatcccgcagcgtacctacccggacaaacctgagttcccgctcggcgacgagtgggccaaggagaacgccagtgaacaagagctggaagccttcaaccgatggaagcgatccgtccaccgatggtacaccggggagcgggagcataccgccaagcttcgcgaatttgctgcactctaccgagttgttcgagagcatcatggcaaggcagtgtacttcccgatgcacgttgactcccgtggccgcatgtactattggggcacaccgaatccccaagggtccgacatcgccaaggcatgccttcagttccacgaaaagcgcgccctcggcaagcgcggcctgtactggctcaaggtccacgtcgccaactccctcggatgtgacaaggtgtacttcgacgaccgggcagcctgggtcgatgagcgatgggacgacttccagcgagcactcgacgaaggcccggagaactatccgaatctcttccccgaagacgagtcgcccctgtgcgccatcgccggtctgctggagctgcgggcggcctacgcatcaggccagccggagaattaccgaagtgggttcatcgtccatatggatgcaacctgctccggcctccagcactactcagccatcctccgagacgagatcggcggagcatacgtcaacctgttgccacctggacttgccaaagctgacatctactcccgagttctcggtctcgttgcagagtctctggcacgagacatcgagagtgctgaaggcgaggctcggggctacgctgtactgtgggataaggccggtcttgccaggagcctgacgaagaaaccctgcatgacgctggtgtacggaaccacgttcaagggtgttgtggaccactgcctggactacctggacgagtccggcctggagattcccgagggtatcccgtcataccgcctgggaagctacatggcaacgctcatactggacgcaattcgcgagacagtaccatcggcagtcttcgccatggaatggctccagcggctcgctaaggcccttcctgacgcatccaaggatttgcactggaccacgccactcggcatgcaggtcttccagtcctacccgaagaccgaggaggtccgggtgcggctgcgggccgaggctgtcgagtacgtcaccctgtacgaggccaaggacgagctggacccggtacgcaacgccaacggcatcgccccgaacttcgtccacgggctggatagcagccacctgggcctgacagccctggcatgcgcggcggagggaatcccgatccaggccatccacgacagcatgggcacctatgcggcagacgtggatcggatgcacgtccacatacgggagcagttcatcgccatgtacagtggcccctgtgtgctcgtagagctggcaaatcagcttggggtagaggctaccccgccccggaggggatcgttgaatctggaggctgtacgggactcctgggcgttcttctgctgaggtggattatgtcacccacataggagcaagtgcatccgtccaaggccctcgtagagggagcggggagagaggagaggtcagggaagacctggtagaggagaggtggagatgagaatggatgactacgaaggattctagatagaatagactaaccagcataggagatatgatagatggctactatgaagacccaccgccctacggttatgtcacccacagtggaaggatcgagaacaggcaagggtacggcccgtcctgtcacgttcacctctcagcagatcgagtggttagaacagaccttccccgaacatcagatcggtcctggaaccacgatggaagacatccagttccaggccggcaggcgagacgttgtgcgagcagtacgactgcgccgacgtgatgccatcgcagtggagctgaagtgatgagtaagtccatctggcgagtacacgcaaaggccggcactccctcggaactccagggcctgtgctggctggcaatacaggagctggaggagttcaccctcttccgctcgaaggacgacgccctgaatgcgatgctggacagtatcgagggcaacgatcgaaccgagctgttggtattccgcgatggtcagttggccggcggtgcctgcatcgtgttcgaggacgacccccacgtcggcccgtgcgtcacagcacagtggcagtacgtcctaccgcgctaccgcaatacaggcgtggtccgggagttcatccgcgaactccaccgtcaggccggctggggtcaaatccccctcgtgtgctggagccatcgtgaaagcgatagccggtacacgatccactaccggagagccaagccttatgggcaagaaagtcaagaaggtgctaggcaagaccatcatcggcaaactcgctgatggcctgctgggcaccgaccttagcggcgcacaatccgatgcccgcaagatggaagagcagaaccgcctaatgcagcagcaggcggaccagctcgcacgaaaccagcaggttgacctcaccgccgagaacgtggcgcaggttgacctaggagcgatggccgatgccactggcaccggcactcgacgacgccggaatcaggcgggcacaggcgtatcgcaaaccctcggtatcaactactgacgaggtacgccatgaaaaccaccgcagctatgctgtgggagaaacttcgggatgggagcgtggagagtcgagccatcgagttcgccaagaccacgctgccctacctgatggtcgatcccatgtccggcagtcggggagtcgtagagcatgacttccagtccgccggcgccctcctggtgaacaacctcgccgccaagctggcgagatcgctgttccccacggggattccgttcttccgatccgaactcactgatgcgatccgccgcgaggccgacagccgggacacagacattaccgaagtgaccgctgccttggctcgggtggatcgcaaagcaacacagcgcctgttccagaacgcctccctggcggtcctgacgcaggtgatcaagctactgatcgtgactggcaatgctctgctgtaccgagacagcgccgccgctacggtggtcgcatggtcgctccgctcttacgcggtgcgccgggatgcgactggccgctggatggatatcgtcctcaagcagcgctacaagtccaaggacctggatgaagagtacaagcaggacctgatgcgcgcaggccgcaacctgtccggttcgggcagcgtggacctgtacacccacgtacagcgcaagaagggcacggcgatggaatacgccgagctgtaccacgagatcgacggcgtgcgtgtgggcaaggagggccgctggcctatccacctgtgcccgtacatcgtgccgacctggaacctcgcccctggcgagcactacggtcgcggccacgtcgaggactacatcggcgacttcgccaagctgtccctgctgagtgagaaactcggcctgtacgagctggagtcgctggaggtcctgaacctcgtggacgaggccaagggtgcggtagtcgatgactaccaagacgccgagatgggcgattacgtgccaggcggtgcggaagccgtccgtgcttacgagcgtggcgactacaacaagatggctgctatccagcagagcttgcaagccgtggtcgtccgcctgaaccaggcgttcatgtacggtgccaaccagcgcgacgccgagcgcgtcactgccgaggaagtccgcatcactgcggaggaggcggagaacacgctgggcggtacttactcgctcctggccgagaaccttcagtcgccgctggcgtacgtctgcctgtccgaggtggacgatgcgctcctccagggcttgatcaccaagcagcacaagccggctatcgagacgggccttcccgccctgtcccgctccgccgctgtgcagagcatgctcaacgcttcccaggtcatcgctggcctggccccgattgctcagctcgatccccgcatctcgctaccgaagatgatggatacgatttgggcagccttcagtgtcgatacctcgcagttctacaagagcgaggcggagctacaggccgaggcagaacagcagcgccagcaggccgcacaggcccaggcagcgcaggaaaccttgctggaaggcgcttccgacatgaccaacgcactcgcaggagtctgatagatgacccaaccgaacgaacagcaactgccgccgggcctcgctaacctggttgccaacgtaccgcctgccgccgcaccgaccccgagtcatgtgcaggtgatgccgaacccggtgatccaaccgcaggccccggtccagcccggccaggtaggtgcgccgcagcaactggccatcccgacccagcagccgcaacccgttccgaccagcgccatgacgccgcactaccaaccggtagcggcacctgccgtgggtcaacccgttgttccgcaagcacccgctcagccggccccggtagctccgccggctgcgggtgcagttcttcccgagaacctggaagtcccgccgccgccggccttcactcccaacggggagatcgtgggcaccttggcagggaacctcgaaggcgacccgcagttggcgccctccatcagctatctggaggcgttctctgacaaactggataccgtccgagccttcggcaaggccgccgagaaccgcgatcctcggttcatcgacgagcactatctgaaggaagttctcggcccggcccaggcgcagcacgtcatcaacgtggccaagggcgtcctgacctatgtcgatgcgcaaaccaaggctgtcctgaaccagacctatgccgccgtcggtggcgaggccgtgctgaagcaggccgcaggcgtcttcaaccaacacgctgacccggccaccaaggccgccatcggtcggctgatggactctggcgatgcccaggccatgcagtacgcagcgaagcagatcattgccttcgcacaaggctccggtgccgttgtacaggctaccggccaacccctgggtgctgcggcacctgcactagcagccctgaccgctgagcagtaccgcgcagaagtgtcgaagctgccgctgaacgcatccgaagccgacatggctgcactgcgagagcgccgtaaggcaggcatggcgcagggtatctaacgaccctgccctactccggccttaaactcacatccaaaagagagagaatcgcatgagctttctgaacgacctgacccgtccgaactacgctggcaaggacgcggacgttgacatccacctggaagagcacctcggcatcgtcgacaagcacttcgcctacacctccaagttcgcaccgctgatgaacatccgcgacctgcgtggctcgaacgtggtccgcctggatcgcctgggtaacgtcaaggtcaagggtcgtcgcgccggtgaagagctggagcgcagccgagtcgtgaacgacaagtggaacctgaccgttgacaccctgctgtacctccgccaccagttcgaccaccaggacgagtggacccaatccttcgacatgcgcaaggaagtcgccgagctggacggccaggaactggctcgcaagttcgaccaagcctgcctgatccaggtgatcaaggctgccgcgatggacgcaccggtggacctggaagacgccttctcgccgggcgtgctggagaagctggacctgaccggcctgaccgccaagcaggctgccgagaagatcgtccgcatgcaccgccgcgtagtcgagaccttcatcgaccgcgacctgggcgatgcggtctactccgagggcctgaccccgatgtcgccacgtgtgttcagcctgctgctggaacacgacaagctgatgaacgtcgagtaccaggcaaccggcgcgaccaacgattacgtgaagtcgcgtgtggccgtcctcaacggcgtcaaggtgctggagactccgcgcttcgccaccgacgcaaacgcagcgcatccgctgggccgccacttcaacgtgagcgccgaggaggctgagcgtcagatcgccctgttcctcccgagcaagaccctgatcaccgcccaggtggcgccggttcaggccaagctgtgggaagaccacgataagttctcgtgggttctggataccttccagatgtacaacatcggtgcccgtcgcccggacacggctggtgcgatcgagctcaaaggtatcggcgccttcgacatcaccgcgtgaccaaaagagagagaatcgccggctaaggatttaaggtaaggaggtttatttatgcatccgtttgaccaagctgtggttaaggatcctaccgcaagctatgtagatgttaaagcacgtcgtacctttctgcagagcggtcagctggatgatcgtctgaaagcagcactgccgaaagaatacgactgcaccaccgaagcgaccccgaacccgcagcagggtgaaatggttatcccgcgtcgctacctgtctggtaaccacggtccggttaatccggactacgaaccagttgttaccctgtaccgcgacttcgaaaaaatctctgcgaccctgggtaacctgtacgttgcgaccggtaaaccagtgtatgcgacctgcctgctgaacatgctggacaaatgggcgaaagccgacgcgctgctcaactacgatccgaaatctcagagctggtatcaggttgaatggtctgcggcgaccgctgcattcgcgctgtctaccatgatggcggaaccgaacgttgacaccgcgcagcgtgaacgtgttgttaaatggctgaaccgcgttgcgcgtcaccagacctctttcccgggtggtgatacctcttgctgcaacaaccactcttactggcgtggtcaggaagccacgatcatcggtgttatctctaaagacgacgaactgttccgttggggtctgggtcgttacgttcaagcgatgggtctgatcaacgaagacggttcctttgttcacgaaatgacccgtcacgaacagtctctgcactaccagaattacgcgatgctgccgctgactatgattgcggaaaccgcctctcgtcagggtatcgacctctacgcctacaaagaaaacggtcgtgacatccactctgcgcgtaaattcgtttttgcggcggttaaaaacccggacctcatcaagaaatacgcgtctgaacctcaggacacccgtgcgttcaaaccgggtcgtggtgacctgaactggatcgaatatcagcgtgcgcgtttcggtttcgcggacgagctgggtttcatgaccgttccgatcttcgacccgcgtaccggtggctctggtacgctcctcgcgtataaaccacagggcgccgccgcacaagcaccggtgagtctcgagcaccaccaccaccaccactgatgccacgaaaccccgcacttcggtgtggggtttcttcaaagcctaacgacccgcgcagattccctgcgtgggtttttgcgctttaggagaaaccctatgctactactcgacgcagtgaatgtcatcctgcgcaagatcggcgagctgccgatcccgagcatggatgagacgtatcccaccatggccattgccctccctgagctggaggaccagcgcatccagttgctgacgcaaggctggtggttcaacacctggtggaagcacaagctgacacctgatcccacgggccgcatcaacctgcccaagggcaccttggcattctacccggattccccggacctccagtgggacggcctgggagtgcgcgacgccaacaccggcgacgaccgcatcggtaagtcggtcgagggccggctggtgctgtcccgcgagtgggaccgtatccccgagatcgcacagcgcgtcattgcgcaccaggccgcactcgcggtgtacacccacgagattggcccggacgagaccgcccaggtcatcgcccaggaattgcaggcgtatcagaacgaactgtcccgcatgcacacccgatcccgtccgctgaacacccaggccaagcgtagcttcagccggtggcggcgcagcttgaggacctgagcatgagctacaagcaatccgcgtatcccaatctgctgatgggtgtgagccagcaggtgcccttcgagcgcctacctggccagctcagcgagcagatcaacatggtatcagaccccgtgtcggggctgcggcggcgcagcggtatcgagctgatggcccacctgcataccgaccaaccctggccgaggccgttcctctaccacacgaaccttggtggccgcagcattgcgatgctggtggcgcagcaccgtggcgagctgtacctgttcgacgagcgggacggtcgcctgctgatgggtcagcccctggtgcatgactacctcaaggccaacgattacaggcagctacgggccgccacggtggccgatgacctattcatcgccaacctgagcgtgaagcccgaggccgaccgcaccgacatcaagggcgtggaccccaacaaggccggctggctgtacatcaaggcgggccagtattcgaaggcattctccatgaccatcaaggtcaaggacaacgccaccggcaccacctacagccacacggctacctacgtgacgccggacaacgccagcacgaaccccaaccttgcggaagcgcccttccaaacgagcgtaggctacatcgcctggcagctctacggcaagttcttcggtgcgccagagtacaccctgccgaactccacgaagaaatacccgaaggttaaccaggatgccgatgcggcaaccatagccggatacctcaaccagcgtggggtgcaggacgggtacatcgcattccggggagatgccgacatcaacgtcgaagtgtccacggacatgggcaacaactacggcatcgcgtcgggcggtatgagcctcaacgcaacggcggacctgccggccttgctgcctggtgcgggcgcacccggtgtgggtgttcagttcatggatggtgccgtcatggccaccggctcgaccaaggccccggtgtacttcgagtgggactccgctaaccgccgatgggcagagcgggccgcctacgggaccgattgggtcctgaagaagatgcccttggcgctacgctgggatgaggctaccgacacctacagcttgaacgagctggactatgatcggcgcggctccggcgacgaggacacgaaccccacgttcaacttcgtcacccgaggcatcaccggcatgacgaccttccagggtcgcctcgttctcctgtcgcaggagtacgtctgcatgtcagccagcaacaatccgcaccgctggttcaagaagtcggcagccgcgctgaacgacgacgatcctatcgagatcgccgctcagggcagcctgaccgagccgtacgagcatgcggtcaccttcaacaaggacttgatcgtcttcgccaagaagtatcaggccgtggtcccgggtggcggcatcgtgaccccgcgaacagcagtcatcagcatcaccacgcagtacgacctcgatacccgggcggcacctgctgtgactggacgcagcgtgtacttcgctgccgagcgtgccctgggtttcatgggcctgcacgagatggccccgtcgccgtccacggacagccactacgtcgccgaggacgttaccagccacatcccgagctacatgccggggccggctgagtacatccaggcggcggcctccagcggctacctggtgtttggcaccagcacggcggacgagatgatctgccaccagtacctctggcagggcaacgagaaagtccagaacgccttccaccgatggacgctgcggcatcagatcatcggcgcgtacttcaccggcgacaacctgatggtcctaatccagaagggccaggagatcgccttgggccggatgcacctgaatagcctgccagcccgcgagggtctgcaatatccgaagtacgactactggcggcgtatcgaggcgaccgtcgatggtgagctggagctgaccaagcagcactgggacctgatcaaggatgcctctgccgtataccagctccagcccgtggccggtgcctacatggaacgtacccatctcggcgtgaagcgcgagacgaatacgaaggtgttcctcgacgtgcccgaggccgtggtcgggtcggtgtacgtggtcggctgtgagttctggtccaaggtggagttcactccgccagtgctccgagaccacaatggcctgcccatgacctcgacccgcgcagtgcttcatcggtacaacgtaaacttcggctggaccggcgagttcctgtggcgcatcagcgacacagcccgacccaatcagccgtggtacgacacgacgcctctgcggttgttcagtcggcagctcaacgccggggaacctctggtggacagcgccgtggtgccgctgccggctcgggtcgatatggctacgtccaagttcgagttgagctgccatagtccgtacgacatgaacgtccgggctgtcgagtacaacttcaagtccaaccaaatctacaggagggtgtgatggctttctggctaccactattggccgctggcggcatgtccgcccttcagcagggattggccaacaaggaagagcgcaacaagatcaaggccgagaacaaggctcgactgaagacggacctcgacaacctgggcgccgccgcccgcgacatcgccaacctcggagtcatggccgctagctaccgcaagcaggccgtggcctcgcaggtggaggccaaacgccaggggatgctcgccggcggcagtgccgaggctcaggccggagcgttcggcgtcaagggcgcatccgttgatgcggtggccctggatatcgagcgggaggtcggcgaggctctgttccagattgacgacaacctggacaatcagatgtggaacctcgccgagcaggcgcactccatccaggcccaagctaaggccggcctgctgggacagaagagcaccactgcggggcaacgatccccgctggtggctggcctgatgtcggcgggttccctgtatgcaagtcaatacttcaagttcggcgccacgcctaaaggaggcaactgatggcggaatcgcaacgtgcttcccaagagcttgggatcaacgtcgggcagacgcaactccagccgggccagagtgcccggcgtggggtgcgcgactccgaagtcaactacagcgggccgagtgtaggctcacagattctcgacggcatcctcggcgccggtcagcaaatcgcaggcaagtggttcgagcacaacgtgcagcaggaagtgctgcgcggtgagcgtgcccgcatggccggcgaggccgaggaggcggtagacagcaacatcctggccaagcccttcgtgaagggcggctggcgtaagcaggactaccgtatcgctcaggcggacttcagcctgaagatgcagcagttcatcgccaacaagggccgggagatgactcccgaggagttccgcaaatacctgtcccaggaggctacgcacgtcctggactcgacaaagggcatgaaccccaacgacgccctacaggcgctggcgcagcagcagaaggccgaggagcagctcttcggcatgcaggccaaggcgtacatggactggtccatcgaccaggccgcacgaggcttccgcacccagggtaacagcatcctggccaaggctgtacaggcccaggccaccggcgacgaactgtcccgacaactcagcctggaagaggctggcctgttctataccaacatcatgacctccgaggatatcccgctggaggtgcgtgacaaggtgggcatgcagttcctggcagccagcctggacatgaaccagcggggcatctacgagagtctgcgcgatgccggcttcctggacagcatgtccttcgacgaccggcgtgcgctcaacggcctctatgaaaagtcgaaggcacagacccgggccaaggaatcgatggctaccctgcgggccgatgcggacttccagcagcgggtggctaacggggccatcacagaccttgccgaggtcgaggcgtactcccggggcatggtcgaggagggccgctggagcgacgcccaggccatctcgttcatgaccaaggccatgaccggcctgggcaacgctcagcgcatgcagggcatcatggcggccctggaggctggggacatcaacgccctgcacacgctggggacgaacgtctccgaggcactggagcagtgggacaagatgcaggcggccaacggctcaagcctgaccgatcgactcgtacagggcacgcagctcggcctgcgcctggggaccttccccaagacctacggcgagtccgtgggcagcgccgtgcggatgatccaggcggccaaggaaggcgaggcgaacccggagctggtcaatacgttgaacagcatcttcgagcaggtggcctcggcccaggagatcaacccctccgccggcaacgtgatgctatccggcatcccggaagccgagcagggcgctgtggcctgggcactcaagcagatgaagatgggcatcgccccagctcaagcactgcgcgagttcagtgccaacgccgaagtcgtgaagcagatggacgagttcgagaaaggacagaacaccaaggcattcaaggacaacctcggcaagcaggtcaacgacaagttcgtgaacaacatcttcggtcgggcctggaacatgctgaccggtgagagcgacctgagcaacaacgaggccgttctcagcatgtaccgtcgagcaaccatcgacgaggcgaactggctggccagcgaccgcaagcatgcgggtctgcttaccagtgacacgggccgcgaggccctgctggagatcgccgccgccaacgtgcgtaaccgcaccatccaggtaggcgaaggtcggaacctgaaggaaggggacctgttcagccgccgcgacagcgcgccactgatcctaccccgtggaaccaccgccgagcagctattcgggaccaacgataccgagaccatcgggaccgtcctggccgagcagcacaagccgcatgtcgaaggactcctcggttacaagtcggtagtcgccttcgagtacgaccgcaccagtggcagcctcctcgccgtcgagtacgatgagaacggtgtggccctggaccgcacgcgggtcgatccccaggcagtcggtaacgaggtgctcaagcgcaactcggacaagctgaacgcgatgcgaggtgccgagtacggtgccaacgtcaaggtcagcggcacggacattcgcatgaacggtggcaacagtgccggcatgctgaagcaggacgtgttcaactggcggaaggaactggctcagttcgaggcttaccgaggggaggcgtacaaggatgccgatggttatagtgtgggcctggggcattacctgggcagtggcaatgctggggcaggtactacagtcacgcctgagcaggccgcgcagtggttcgccgaagacaccgaccgcgcactcgaccagggtgtgaggttggccgacgagctgggcgttacgaacaatgcctctatcctgggcttggccggtatggccttccagatgggcgaggggcgtgcccggcagttccgtaacaccttccaggcgatcaaggatcgtaacaaggaagccttcgaggctggcgtacggaacagcaaatggtacacgcagacgcccaaccgggctgaggcattcatcaagcgcatggcgccccacttcgatacaccgagccaaatcggggtcgattggtacagcgccgcaacagcggagtaagacatggcacagcaattcaagggccgcatgacgcccaagtacccacttgaccaagcacagctcgacgaggcccaagtacagggccaactcgacgcagtgcctaccgtggggttcgacgccctgacgggtggcgagatcggagaacggaacgtggcagcgggccaacgagccaacgcgcgggaactggaacgcatcgtagcggaccaggaactgccggcccttgaccgtgcttccgcactctggaaccagtccaccctcgtcggacgctggggcgatgcgctccagctcgacgcggaccttgcggcgaacagcaccggcgaggtggaccccaacttcgacgccgggacctacggggtccaggcgctccaggcggcgggtatccagccgactgacaactatctccagatcatggcccgtgccggcaatgccgaggacgcggcctacctcctgtcgaggattcaacggtatgagcaggacgagcaaatcgtgcgggacaacccgtactggaacttcgcggctggcatgctggaccccgccgctctggcagttgatgcggttactttcggcgctggccgtgctctgcggctcggtcgtgctggcatggctgctgctggcggcgctgggcaagtcgggtatgttgctgggctggatgccgcaggggccgacgtggatgccggaacctacatcgtggcaggtgctcttggcgctggcgtgggtgctctgctggggtctggtgcgggacgcattgccgcagaggccccaacgcaaccgcatgtgcccgaagtatcggcgcctactgtcgggctgccagaagtagccatgaccgccgaggaggccgccgcacgcggcttcaaggccggtgacgtggtagacctgctggacgagggcaccgtgctgtcccgtgtcagctcccgtgtggagcaggccgagataccggccatcccgcgccgtgacactgccttcggcgacgagctgcacagcctgtcgggccggaagctgtccgaggtcctggaccacctcaagacccacgcagaggttcccaagccgctccagggcatcgccgccaaggtggctgataccatcaggaccctggagggcctgggccagcgaaccgcgttccgagtggtgcagggtggcgacactgccagctccgcattccttaagccgggcacggcgggcatccactccacccagggcctcgacaccttggtccaggtacgcggcagcaccgcacctggtcgagttggcaccaacccggtgaccgtgctccacgaggcggtccacgctgccaccgtaggcgtgatgaacgccgccctgcgcaaccctggcgcgatgagtccgaaggtggctcaggccatgcagaccctggagaacgtccggggtaacgtgctcaacgccctgaagcaggaccgcgccgccggtcggcaactgtccgagttcgaagagacgctgctggccggcaactccaacaccctggcaaacgtcaaggagctggtggcctggggcctgacggatacccgcttccagcggaccctgaatcgcctccgctacagcgacggcgggccgggcctgtggacccgtttcgtggagggcatccgtagcctcctgggcctccggtctgatgccgacacggccctgagtcgcgtcctggccgcctctgagacgatcatggacgccatgccggggtacactaaggctcaggctaagtgggccaacaagggcgctccggtgaccgaggaggccagcctggagaccatcgtgcggaccaccagggagcgtgcccgcgagggtgcgggcttcgtgaaccggttcttcagcgaggcggacctactggcacagcccggagagggcgcacggcgcctcctgagccgtcttatcgacgaccctgtacgtcgggatgggttcagcacgaacgacaacgcagcgagctatttgcgccgttaccggaacgagttcgagggctacgtgaagtcctacgacgagatgatggccaaggcaatggctgagcagggcgtgggcctgacggcacgtgcgctgaactcccgccgcgccatggcagtccgggaccagcttaacgagcaggtcacccgcgagctgctgcgccgggaccgggagtggaccgcctacggcagcgtccgcgtagaccccaacctgccgccgaccatcaaggccctggccgaccgctcggacgagattcacggtctgatgggtcagcgtgccagggaagccggggtccggggcttcgaggacttcgctccgcgtcccggatacttccaccgctcgtggaactggtccaagatggcgcagatggatgaggccgcccctggcctggcccggcgtgctatcagcgaggccgtgttccggggcatccctgggctggagcgtgccgacgccgacaccatcgcacaggccattgtgcagcgggcacgggaccgggctaccggtatccgctccgagttcatgggcgcgatgggcgtggcggacacggcattcatccggcaggcgctggaggaggccaacgtgtcccaggccaagttcgacagcatcatggccaagatcgagcagaagcagtccgaccagggcaccgtcaaatacggcaagggccggctgtcgctggacatgaccgccgagatcaaccacaatggaaccgtgtaccgcgtgcaggacctgatcgaccgggacctagaccgcctgatggagaactacgccggcagtatgtcgggccgctcggcactggcccgcgcaggcatgcccggcgactccgaggtggaagccttcatccgtgagtaccagcgggaggccgcgcacctgggcaccgacaaggtgcaggagctgacgggccaactgcggggcgtcttcggggacttcaccggcaacgtgccgcgagagcatcagctcggccccgtcgcacagcgggccagcgggctgaccagcgccaccatgctgggattctccggcgtgtaccagcttgctgagctggccacgatggctcaccgccagggcgtcttcaacgtaatgaaggccatgctgaactcccgcctgggtgacttcgtaggtgccatgcgtcgagacccggacctcgctgatgagatgcagaccgtcctcggcctgaacctcgccaacgacattcggatgaagccctggaagcggcagttcgacaccttcctggccagccaagacaccttcatggatcgcttcctccacgcgggtaagcaggctgtcccggtgctcaacggcatgaagttcatccacaactggcaatcccgcatgaacgccaacctcaccttgaacaaggtggcgcgggcggcgcagggggatgaagcagcccttcgcgtgcttcagcagtacgggaaggacgtggactggacgccagtcctggcgcgggttcgcggttatgtcacatacagaggaaggaacgcccaatccatgaattggggcgcctggagccaagcagacgtgaacaccgtcatgaacaccgcattgcggatcatggacgactcactgctgtacggtcgagtcggtcagaactcgggctttgcccggtcacctgtcggccaaatcctggggcagttccgcagctttgtggccttcgcgcacaacaagctcctccggggaacctatgagaactccggcgtgcttggcgtggcctcgctcctcgcattccagtatccgctcaccgcgctgatgatgggtgccaaggcagcgatcaacggcaagttcgacacctctgatgaaggcatccgcaagatggccatcgacggcatcggttacactgccggcctcggcttcaccgccgacatgtggggcgtgatcaccggacactctaggatgtccgccccggtcttcggactggcggagcactccaacgaggtgttccgtggcgtcaaggacctagtaaccggcgacgaccccgcagccgccaccggcgatatcgtcaacggcgccgcaggggcactgcctttcgtcaacgtattcccggcgaccaagttgctgctggaatccatcaaaggggaataacgtggctcggttcaagaatcccgagaccatccacgttgcagatggggtcgaggctgtcttcagtctcgacttcccattcctgcggcgtgaggacgtattcgtccaggtcgataagatactcaccaccgactatacgtgggtggacaacaccaacattcaattggccgtggtgccgaagcagggccaagaggtccgcatcttccgcgacacgcctgcccaggtcccggacactcagttcagccagggcatcccattcctgccgcgctacatcgacgcgaacaacaagcagctcctgtacgctgtgcaggagggcatcaacaccgcgaacctcgccctggatggcgtactcgacgcgatccgtatcgccgaggaagctcgccgcctggcacaggaagcactcgacgccgccaatgaggcgctgcgccgtgccctgggcttcgctgagattcgcaccgtgaccgaggactcggacatcgatccgagctggcgtggttactggaaccgctgcatcaccgctgacaaacccctgaccttgaccatgcagatggaagacccggatgcaccctggatcgagttcagcgaggtccacttcgagcaggcaggcgtgcgcgacctcaacatcgtggccggccccggcgtgaccatcaaccggttgcagaacaccaccatgcagctctacggcgagaatggcgtgtgtaccctcaagcggctgggcgctaaccactggatcgtgttcggagccatggaggacgaataatgcgcggcattatcgcgggcatcatggcctcccaaatccggcgtccaaaaccaatcctggcgacgtacccgtatcccatcctagctacagacgacgcatggtcctgccggcccaacatagtggcggcgctgacacgcgacactctgcacgaggttgtgaaccagccaggagaggacacctaccacgcgacctccagcgtggtaagcgtactgctgcggtcgctgactcagctcggctacggcggtggcgatgggttcctgaccggacctgccgtcaatgcagccttgctgcgcgatacggtgaaggaatataccgcagagccttacgcattcctgtcgcagaccgcagtggccggcgcagaactgaaggttgtggttgtatactccgagtatatcgtggagccgtacgccttcgccacctcgacagcaattaaacaggcggaactgaccaatgtttgagacacgagttaagggtcgctacaccgtgacccatctgaaagccacgggtgaagtcctggcacagtacaccttcgacaacctcatcactaacgcgggtctcgactggatttgcgccatggacacctcagacctgttctcacaggccctggccgtgagtaccagcacagcagaccccaaccccgctgcaccctccctgccggaggaagtacgacggaccacctcgtacgccccgaacggggatgttacctcgggtctggatggggagtggatttactggcacaagcggtggcgcttcccgataggcacccttaccggacaggtactggccaccgtgggcatcgtggcccaatccgaagttgggttcgagagtaacaccggcgcgaagattccggcagggactccactgtcctacacccggatcaaggatgccgccggccaacccaccaccctggtggttcaggccgacgagattctcgacgtgcagtatgagctgcgcagcaaggctgtggcgatggccgaggccaagttcgtgatctctggagtcgagcgtaccatccgccttactccgctgcccttcgcgaaccggcgtaacctctacggtgagcgctacatcttctacaacgagagtcctcggattgacggtaagaatgcgtccggctcggatgtccaggatggccagtgggtggcgctgtacccgcgatatacgcggggcacctacaaggggcagctaatgctgcgggccaccgttgataacggcaacatgccgggaggcatcaccggctgcaaggacctgaagatttacaacggtcggaactacgcactcaccatcgacccgcctgtagtcaagaacaacacgcaggaattctccatcacgatggagttctcggtagcgagggcataacccatggcactgatctacgacttcaacctggacctcgatccgaaggctaagtccaagttcgtaggtgcgcgaggccgtagggacatcagcgacgtgctagacttctgcgacgggggcgtggccatccaggacccgtcgcagggtatgatggtccgcgtgtggcgaacagagcttcgccaggacgggacctacctggggcacgaggacggctcgaacgagattcgcatcggcggaggtatcgaagaaggtatctccacgatgtccctcgacttcgacagtaacatgaactacgtgtgtgctttcgtacgagccgatcgaactggtgcaatctcctacttcaacgtgcagcagggccgccggctcctcgtggagcttgggcaggttgactatgccaaggtggccttggacgataagcgtcctggagctactgcctgggcacaggtcatcgtaccttacacccgtaacggcaacctgtacgtccgcacacagaacgagaactatacggtagagcacctggaggtggataccggcaaggtattccgaccgctggtcaaatgcggtatgggcaccaacctccgcttccaagtccaattcagagggcacatgtaatgagcaaaaagcagaccgcgagtgctgagcggctgggcctgctacacgagctggtctgcaccgctatcgagcgcaacttcaagtggtacatggacaacgacatcccgatccccgcatcggatatcgctgccgccaccaagttcctcaaggacaacgagatcacctgtgatccgtccgacaccatcaacatcgaccggctccgcgaggagatgcggcaggcgcaggccgagaaccgccgcattgccttggagggcttcatcgccggtgagaccgacgacgagatggaacgcctgtacacccactaaggaggcagcatgacgccgcaagaacgattccagatagcccacgaagtgcgggacatgtacccgcgcttccgggacttctgcctggacgccatgctgttcctcggcttcaagatgacgtggatgcagctcgacatcgccgacttcatgcaggattcgcccaacaaggcgatggtcgctgcgcagcgtggcgaggccaagtccaccatcgcctgtatctttgtggtgtggtgcatcgtccagaacccggctacccgcgccatgctggtatccggctctggtgacaaggctgaagagaacggccagttgatcacgaagctgatcatgcactgggacctgctggcgtacctgcgccccgaggcccgaatgggtgaccgtacctcggccaccagcttcgacgtgaactgggcgttgaagggcgtcgagaaatcggcctccatcaactgcatcgggatcaccgccgccctccagggttaccgtgctgacatcctaatccctgacgacatcgagaccacgaagaacggcctcaccgccaccgagcgggccaagctgacgcggcagtcgcaggagttcacctctatctgcacccacgggaagattctgtacctgggcacgccgcagagtcgcgagtcgatctacaacggcctgcccgcacggggcttcctgctgcgcatctggccgggccggttcccgaccctggaagagcaagagcgctacggcgactggctcgcaccctccatcctggcacgtatcgcccgcctggaggagaaaggccacaacccgcgcaccggcaagggcctggacggcacccgtggctggccggcggaccctcagcgctacaacgaagaagacctgatcgacaaggaactcgaccaaggccccgagggcttccagcttcagtacatgctggacaccagcctcgccgacgagcagcgtatgcagctcaagctgcgcgacctgctgttcatcgacgccacgcatgagagcgtacccgagcaagtggcctgggctgccgacgagcgcttcaagctcaagttcgacgcccaccgattcccggtcatcaagcctgagctgtacctgccggcgctgatggctggcggctgggcaccgctccagcagatgacgatgttcgtggaccctgccggcgatggtggcgacgagctgtcgtatgcagtaggcggaactctcggcccgtacatccacgtcgtgagcatcggcggctggaagggtggatttgccgaggagaacctggagaaatgtattgccctggctgcgcgttacggcgtcaaggtgatctatgtcgagaaaaacctcggcgcgggtgcagttggccagctcttccgcaaccatatgcgatccatcgacccggacaccaacaagccccgctatgaggggatcggcgtagaagaccgccagaagtccggccaaaaggaacgtcgcatcatcgacaccctgcggcccatcatgcagcggcaccgtctgatcttccacgtctcggcgatggattccgaccacgtgtcctgccagcaatacccagcggacaagcgcaacgagcgctccgtgttccaccagattcacaacatcaccaccgaccgaggctcactgccgaaggacgaccggatcgatgcccttgagggccttgtccgcgagctagcacccacgctcgtaaaggacgacgaagccgcaacccgcgctcgtgaagaggctgccaagaaggaatggctgaacaacccgatgggttacactaagtctgtccttcggtctctcggcatgggccgggagcgtcgcaagggccgcccaaaaggacgaagactatgatgctcgataccgccaccgaggcgggcaaaggcaccctcgccgtcaccggcgtggggattgccgtttactcgccctatgagatcgccagcctctgtgctgcggtactcaccgcgctctacgtgggcgctcagctcatcaccctactcccgaagatgctcgatagcatcgcggagcttcgccggaggttcaagaagtgaacaagcccctgcgcggcgcagcccttgcggctgccctcgccggccttgtcgccctggaaggcagcgagaccaccgcctaccgggacatcgccggcgtacccaccatctgctctggcaccactgccggggtcaagatgggcgacaaagccacaccggagcagtgctaccagatgacgctcaaggactaccagcgcttcgagcgcattgtcctggacgccatcaaggtgccgctgaacgtcaacgagcaaaccgccctgacgttcttctgctacaacgtgggtccagtctgtacaaccagcacagcgttcaagcgcttcaaccaaggccgcgccaccgagggctgccaagccctggctatgtggaacaaggtcacgatcaacgaccagagggtcgtatccaagggcctcgtgaatcgccgcaacgcggagatcaagcaatgcctcgaaccatcgtcgcaatactcgtccttgctgtggtagccctgggagcctcatacggcttcgtccagagctaccgagccttgggtatagcccaggaggagatcaagcgtcagacggcccgtgcggaggccctggaggtgcgttacaccaccttacagcgccacgtccaggaggtcgccgccaagaccaacacccagcgccaggaggtggaccgtgccctggaccagaaccgcccgtgggctgaccggcctgtgcctgctactgtcgttgacagcctgtgcaaccgccccggcgcccgctgtgctgtgcgaacaccctctgattgaccctaccacccaggctggcctaatccgcgctgtagcggcctatcaggacgccctggacctatgcaacgccctgaatcaaggagactgacatggcgaacacccgtgatcaatacctcgctggccgtaacaccggcctgaccttctaccaggtctgccagcccggcaccgacaaccgcatcgccctgcacgacatggacgaggccgatgtcaaggctaaggccaccgctgtgattgcagcagcctctgccctgggcggcgagggtggcgctactccaccggacccgctcaccgcctacaaggtgaagaacggtgacaccctgcccgtggacggcggtggctccgtgaaggtgaccgtagccaacggtgccatcaccaaggtcgtgtacaccgcaccggcgggctgagctacagcccgtccaacctgatccacccataacacaaggaactgaaccatggcaaccttcgccgctgcaactcagaaagacctccgcgccttcgccggcaccatcgagaacctgatccgtccgctggaggaagcggccctgggttctggctacaacgagaccaagctgcgcgctgaactggtcgcgcacctcgacgagctgatggctgctgtcgagactgccaaggcgctggtctacaagtgatcgacgagtagctcaagccgagcacctgcacagtcgggtgctccactggaactactggaatttttattgagggctggctgtgggtgggagttggtagtggtgggcgggagtagttactccgggtctaattttggtatcgtcgtgtgagaaccctcccgactctgatcagcccacccttcccccgtaggccctccgcctggtgggccactgcctcgcattgcctgggtgttgcctgggtcatccctgggagcttccagctacgctgggtggtggtgggcttccctgccctgtcgctgtcctgtcgccgcccattctacgcatcctggcgggagtgtcaacccctgggtggtcggtgccttgctcggctacgctccagcgcttccgcgtggtcggctaggcggttggctcgccagcgcttcgcccactctacacctcgctccacctcggaccacttgtccgccagcatcatgcgctgccatgccgcgtcctgctgtagccatgccctgctggctctgtcctgtctgctcagcatcctctgtctcctctgtctggctccctggggcttccctggggcgctgctgtggtcctgtcgggtgatggtg

SEQ ID NO: 47 - DNA, 44585 bp, synthetic construct
  source 1..44585: mol_type = other DNA
tctaattttggtatcgtcgtgtgagaaccctcccgactctgatcagcccacccttcccccgtaggccctccgcctggtgggccactgcctcgcattgcctgggtgttgcctgggtcatccctgggagcttccagctacgctgggtggtggtgggcttccctgccctgtcgctgtcctgtcgccgcccattctacgcatcctggcgggagtgtcaacccctgggtggtcggtgccttgctcggctacgctccagcgcttccgcgtggtcggctaggcggttggctcgccagcgcttcgcccactctacacctcgctccacctcggaccacttgtccgccagcatcatgcgctgccatgccgcgtcctgctgtagccatgccctgctggctctgtcctgtctgctcagcatcctctgtctcctctgtctggctccctggggcttccctggggcgctgctgtggtcctgtcgggtgatggtgcgggagtggctggccttgcctcttgtgcctctgtacctgtggcattgccctggctctacctggctgctccctgggtattccctggggctgcctgggtggccctggccactccctctaggccacgtactctactcgcctccacctgtcctgtctagtcctgctctgctccctggagcttccctggatgctacctgggtgctggtctatctccctggctctgcctggcgctgtgctgtgctaccgctggtcctgctgtcttgcctcgccgctccctcgcctgctcggtcgcacctgcggcgctgatggactcctgtttgtccattgtgtgtgacataaccgcagccttagtgccatgcgggttccagggcgatgggtctggctggttggctgctccctgggtgggggctgtcgctccctggtaacgcaaatcctggctagctagactaagcctcgcgcatggggtctctatacgcgtgggaaggctccagggagcgcctggggaggggttgacacgttggcggtaggtctgtagagttcgccctgtcttcacgcaataccgccttcacaggcagcctggagacagggttgacacactacccgggcatcggtagagtacgcagccagaacgacgggagattgcaaccttccaagcgcggcacaagccataggcgcaagggacacggcaagctcttagggcaggaaccgcagtgtgtaaggccggcaggcatcactggggggattgacaaggtaatagatgcggtaagatgtgcggcgtcaagtggtcccgatgtacacactgtgaagggattacggcgcggtcagacagatgaccggcaccgcttgacactgtaaagctcagtcggtacgatgggcacccatagcggacgtgatggtccggggcgatgcggataggacgccttgtttataacctgaccgcaaagctgtgactccagccgataggactgacccaccacgtaaatacagacgggttgacacgacaaggccaagtcgataacatggccgccacaaagggaagcgatagcttcctggcggtagaggttcgaagcttcaccagcggtacatggactggtgcggtaggttgaccgaagctgcaactggttaggcagggtcccagggaatacctgtcgggtgctgaagactcacccaaaagagtctgagcgggaagcctccccgtccacggttaagcaaaggcacgttagtgccggtgggaacgaatagagtgtcagtgggatcgagaactagaaacctcggttaatcgcgactgacagtatgctgggtagtatcggtgggccgattgaacaaggccaggcagatagcgcaaagggtacgggggatgagtgaagacgatcccgaagagtatgcgcaggacaagccagaaccgctgatactacagggactatgccaatgccaaggtttgtcccttgaggcccttccaccgaggggattcaagagacagacctagttgaggaatgccgatggcacacttcaaggctaaggctcccaagtcgcccttcgctacccaggtagcgtactggcgggattgggaagccaaacgtactaagctcatcgcacaggataacgtcgaggggcgcaaagagcttcgcaagatgcgtgacgtgcgctacgctaccgacccggagccagcgccaggacgctaccataaccctgaacagaaagcgttcgtgaagggtagcgaaggcaaggcgcggaacatcctgaagggatggaacgctaagaagtcgcaagggaagggtttgtaatgccacgtgtgaatgaactgacgccgcgtcaacgcaaggccgccaaggctcgccgcgacaaggcacgccggattgatctagcgcacaagatgccgaaaggcgccgactgcccgatcttccgcaaggctgaacaggcgcaagctaagcagccccgcgtcgataccctgaccactccccgcagtgccggctacctggccgccgctgcttacctgaacaaatccatctgaggtacataccatgaccaacgcaatctccaaaaccgtaatcgcattccgtggcaccgaagagatcaatcgcgctatcgacgccatccgtgtccgtggcaaggaactcgacgaagccatccaactgaccggcctgtcgatcatccatcacatcgaccagtgtggtgacgtgaccgtggtcaaggcgctgtatgaagccatgccgaagggcagccgccgcaatgcgctggtcgagtggctggtgctgcacggcaaggtacaggtgaataccgacaagaagtcgaacaaggacctgcccttcctgtacaacaagttcggcaagaccgatctcgtaggcgccaccgacaacccgtggtacagcttcaagcctgagaaagcgctggaccaggagtttaacctggccgctgccctggccacgatcaaaaagcaggtgctccaggctcagaccaagggcaaggtgatcgtcggcatggaactgctgggtgatctggaagcgctggccgccaaggctgcacccatcgccgagcagagcaagcgcgctgccgcccattgactcaagtcgaacgcctgctaagcgggcgttccgctggaatcaatgacaactggagaaacacgatgagctttaagcaacgtctgcaacgtcaaatcgccctggcccaatacagccgcccggctcagttcccgtacggcgagcaggccgtccaggcgaagggagagtgaccatggacttctggattgccctccccttcctcgaactcggcctcaacctcggcgaggatgaactgcgcatgttgtggttcagcggcctgacggtattcttcatccacctcctgaagcggtgactcaagtcatggccctggcgggcgaccctcgcctactccggggccatcgctggactcatcacaagcgagaactaaaccatgcaagctttgaatactctgttgatcgcaatccccaaggacccgtcgaacgcattcaatgcagccgacaaggtgctgtgcgcccatggcttccgtatgggtgacctgaataccgcgcacgtgctgacccctggcgggttcgtagtagtgggcgccggcgtgaccgtcaaccgctacgacgaagcgtatcgtatgagccggaacctcgattccgaaggcttcgacgttctgctggtccagggcagtccactgtccgggcacgtcacctgccaggcgtacggctggatcaatgcggaataccgcaagggctgcgcgaacgggcgcccgatcttcgacattgcaggaacctcgtaccatgtcctcgcgtgatccctaccgtatcggccaccgcgtggggctggtgaactacagcgaccgctacctaggtgccgacgcggcaggcaccaagggcgtcattgaagccataacccgaccgtcccgctgtatgacgatctatcacgtacgctgtgagcggaccctgcgcttgatcgaggccgaggcccgtaacgtgcgattcatcagacagctaccgacccgcaaatgacgtggcgcataatcgtcgtcagcccatcaagcggctgcgccttcgtgtggagtctcaagcggcctgtgcggccagtgcgattctactcccgcaaggcagctaaacgctggctccgcaagcaccgccgacagggcttgcctggccactactacctcatcgtgaactggagcaaacgcctatgaatcctacttacgtcgtccgcctcaaggacggaaccacccgccaggtagtcgccgacagcatcgtcaccggccacgccttcgtcgaactctggttcctcggcggggcggtcgctatctacccggcctgcgaagtacaggaggtccaccgcactgacctcgtaaaggagggtggtgatgaatacccgcactgtatacgtcaagccgcacagttcgaggtgcccgccggtattgtccgcaggacgcctgaccccgggtgaactctaccacgtgatcgcacctgccgaggtcgaaggcgtcattgtgctggcaacttcaggcccgtggcacatccggtccgtggtggtgcatagcatgcacccctcggtatatcccgtagggatggctgtcactgacgattcctggcggttccgccgcctgggtgtgagcgagtacgtccaactaattcaagggtacgaacaatgatcgccatcctgttcgtactcggtctgtactgctgcctcggcctgctggcaggcgcctgctactgcatcgcagtggccccgccattcgagaacccgacggaagtgcagttccaggacgcatgcgtgatcgggtgcatctggccactcgtgatcctcgtcggcatattcctggcactccgtgcagtaggccggggcctgctgaccgggctgaagcgtcacctgaacatccaataacctaccggaggtaacatgatccgcacccatacccacaacaccgaccgcgaacagcgccgcatctacaagctcactgagctgacgtcgggtgagatgtacagtgtagtgcagcccgagtccaagcgtggcacgctggtggtcggagtagcaacctgggatagccagagccgacctgtagtgctgcccgtggtcattcacgatgtgggtgcgcatccctcgccctgtcccaccgtgctgcgcaacgacggctggcgcatggtgcttgccgccaagggcacccaggtaacactcaccgccgagtgaccaaggcgaaggctggtgcgccagccttccaccgtggccattccttgccgcgaaccaactcaaccgaggagctacaacatgaccaacgtcaacaccgccaccaccgagaccaccaccgctgctgccctgggcgccaagctcatcaagaagccggctaccgtggaagacttccgcaacaacgtggtcttccatcacaccgccctggccaagctgaccgaagtctacaacgaggcggtcgttgccctgcaaaccgccgagcgcctgtccagcctcgtcgccggtgacgtgatcaccttcgaccacggcaagggcgagaaagccgaagtgctgagcggcgaagtcatcagcgtggttgccggcgtttaccaggtgctggtccgcttcagcgacagcgcacctgccaagctgctggacgtgaaggccagcgccatccgcgccgtccagtcgtcggcagcccaggctgctaccctcgacgaagccatcgcccagggcgagtaaggcccgcacgtaataggcccggccctccgggcctattgcgagctagccataccataggaggagtcaccatgagcaagcgtaaccccgagcacatcagcggcgccgtgcgtagcgtcagcgtccagaagtcggcagccgtccaggaactggaggatcgtctggagtctgccctggccgtgtgccagcagcgggcggaagacatcgatctgctgagccgccgtctccaggccgccgagcgcgcccgccgctgggagatcgacgagattcgcaaccaccaggcgaccatccgcctgttgcagaacgacctgaacgctgcgcatgatgcccacgaggcacaagagcgccgcgctcgcaaggcaaccatcatggcctgggtatgcctgctgaccgcaggtttggccgtcaccctgaaactggcaggagtctgaccatgcagtgcaacgacctttacactaagctcgcagcgagcatgttcaacgtgccgtgctcccaggtgaccgccgagatgcgccgcgtagccaagagccgggcattcgcgtatgcttacactcccaagcgacaggcgtcgggtgggacgtacaccgcccgcgtgagcggcgtcacctgtgacggtggcaaggtggaggtacgtctggacaacgtggagcgcgccgacacctgtggctatgccaagctggaggcgctggaagcggtcagcctgtaccagggtgccgcgaagcgcgccgatgagtatgaaaagctactgctccaggcattcccggtggtggctaagcgtcgtgagcgcttgcgtatctccgggccgctgtcggcggaagacttccgggcaaacctgctcgggacgtgttccgcatatcggaatgccctcgacgccatacggggcgagattacctcgaccggcccgttgcggaaccgcatatgggcgctggtcgaacgtatgcaccgggccgagacgaagctcaggaatgctcagtcggagatcaaccgcctgcgggagcaggaactggaccgcctccgcaaggacatgtccagctactgcgccaacgacgttacctctacggtgagtgcagcatccgcgaaggataccctacgggtggcaaccttcgccgccgccctcgccggtggcgtcgtaggtagcgccctgatgttcctgctcagctagggcgaccagggcctactccggggtcaaatctgagggcgttcctagagcgccctctcgtgtgagtctggaggatcacgaacatgcaataccatttcacgcattacaacggataccgcttcggcgtcgagctggaagacgaggctgtcttcccgtgcatcgacggtaagcgggcgacctgggacaaggtggcggcgtgtgccggtagccttgtgcattacatggcgcaggacctgattgacttcggccagcgcaagttaagggagatcgaagatgagcaagacgagcctgtacccgctgagcctgcatcccggcctgattcaaatcaggacgattcacgtattcagcattcaagctccgagcaacgccgagaactggtggcaatggttcctctggcagcggaagtaccacccgctccgggagagcctgagtccagccggggaactgagtgcgagtatcgccgagtgtgtccaccgcctccgccagagtggctggcaagatagcgacatctggcgcaagaagggaggcgtgctggccctcggtgccttcgacctgtccggcctgatggtgggttcctgcctcgtagtaggcggtgagctgaaggccctgtgcgttgatgaccggcacagcaggcagggtatcggcgctgagctggtacgagctgccgagctggccggtgctgagcacctgacctgcttcgagttcctggagccgttctacgccggcttgggctggcgcaccgagcgccgtgaggcaaactggactgaaggcgagccggatgtgctgtacatgagggcacctggccatgacgcatgaggtgatggtatggcttatcgcgaacaaaccgctggtcatcggagtcgccttcagcctggtggccctgggcgtgctgctcacacagaacaacggcggcccgcctatggcgcccgcatgacctggcacctccaggacatgttcgaggcccgaggtgggctgaggcccttgtgggaggagtggtatcaatggcactgcgccgcgactcctggctaaagcaagcgcaatccctggcagtcggccaggcgggtcgattccgccacgtcctgggatgccagagcatgagccggggcgggaccaacatgacctgcaagaacctgcctgaccgctgggtggcatactgctactcctgtcaggaaggtggcgtggtcgagaaaacgcacgtgcggagggtgcaatgcgcggatcaagaacgcttcatgccctggcccgaggatgcctcggactggacgcaagccgactgctatcaatcgctatatggtttgctgctgtccaagggcatcgactacaacgtgatgacgccggggctgccgctgctctacagcgaaaggcagcatcggcttatcttccctaccgacgcgggctggattgggcgcgctactgccgaccaaaatcccaagtgggtgggctacgggtatcctgccccggactaccatggatggccccaggaatcatcaatgggcaggccatgggtgctgacggaagactacttgtcggcgctgaaggtgcggtgggcatgtcccgaagtcttcgctgtcggtctgaacggtacaaggctgcgcgacaggctggcggcgatcatgttgcagcagacctgcaagcgcgccttcatcttcttggatggcgaccgggcaggtgtccgtggtagtgcaggcgtgatgcgccggctccggtccctgcttatcgaaggccaagtcataccaacgccggacgggttcgaccccaaggacctgacccgcgagcagataaggagcctagtaattggacgtattgacgcttcacgcactgagtgaccgggaccgcttccgcacgttgcggagtgtggtgcccgaaggaatgatggggccggagacgtgcttcgtcatcgactggatcgagcagtattggaaggtctacccggtgcatcagaaggtagacccgcaggcactgcgcgaactgatcaagctgcgaggtggctaccagccagagcaactagcggtggtcctgaacctcgtcaaccaactggacaagccggtggacccggactcgctacagggcgttgtgtcccagctcaacgaactggatttctcagggcgggtggatgccctcctggcgcagtacaaccagggcgaggacatcgacctggcgtatgagctgcgccggctgagcgacgaggccctgcgccgcgagggggtcagcacgccgaccgactacgtgacggacgacgtgtttgatatcctcgcggaggagcagggtgaccacggcatcaagctgccggggctggtgctgccggcgtacatgaagggcctccacgccggggcctcggtgctggtggcggcgccgcctgatgcgggcaagacctcgttcatggcctggatcgctgtccatatcgcgccgcagctcaagcggtacttcgacccggggcggcccatcctgtggctgaacaacgagggcaagggtcggcggatcaagccgcgcctgtactcggcagccttgggcatgaccgtgggcgagattcttgccctggacccggaggaagttcgcaggatgtacgccgagaaaatcggcggcgactctgagctgatccgcatcaaggacttccacggtgggtcgctggctcaggctgaacaggtcatcgacgcgatgaagccagcggtggtgttttgggacatgatggcccacgtcaagggcggccagcgcaaggaccagaaccgtaccgacgagatggagtacaaggtggctgaggtccgcgagatggcggtacggcacgacttcatcagcttcatgacgtggcagattagcaacgacggccacgaccagttgttcccgccgcagtcctgcctcaaggattcgaagacagcggtacagggtgctgtggacgtgcaaatccacctgggccgtctcaacggcgcggatcaacaggtcatgcgtggcctgtccctgccgaagaacaagttccagatggacgggaagccttcgaacgtggaggcaatgattaacttcgacgccgcacggtgtcgtttctttgagagtgtggatcatgcaagctaagcatagccgggtgctcgaaggcaccaaagaaattccgctgggtagcatcgcactgttaccgggcaccgtcgcgggcctgctgctgtgcctgtactccgacgcaactcacgaggagggcgtcgccttggccggtgggttccctcgcgacttgctgcacggcgccactcccaaggacgtggatgttgccctgtacagcatgacctgggggcgggcagagcacctgatccagaaggcactcccggtcctgaaccccatcttcgtccgggatggtgggtggcgctcggactacgccgatggcggcgacggtggtatcttcaagggcgtgatgtccctcgtgggctgccgtgggttgaatggcatggacttggactttaactactacgacgccgacagcctcggtcgagtgatggagtcgttcgacttcaccatcaaccaggtaggcatcgcgtacaactggcccgaccccgaaggcggtccgcgcctgggtgcgtacctgcacaaggacgttacctggggcgtgaacagggaagtcggtaacggctcgcgactgccggagcgatgcgagaagatgcgggccaaggccgcgtattacggatgggagaacgtgtgatgagcaagcgcgacgtggtactggatatcgagaaaggcatctggcgcggcgtagaccagaacgacaaggccgtcgaggccatcatcaagaagcacgggtacgtgatcgtcgagcctaagatcgacgggtgccgtgccatcgtcggtgcgcatggcgtggtgtcccgaagcgggcgccgcttcccggccctggatagcttggaagaccgcatcatcgatcgactggcccgccccgggctggactccggcctggtgctggactgcgagatgtacctggccggcatgcccttcagcgaggcgactggccgcatgtcgcgcaagaccccactgaccgaggaagagctggggtgcctgcacttcgcggtgttcgacgccacccatatagacgtgctccgcaaggcgcgcacctcccacctggtatacgaagagcgccgcgccatggccagcagcctcctggcagcttgccgcctcagcgacactccgacgttcttccaggtaggctcgcaggtgtgtcggtcgatggaggaagtcttaggccggtactccctccaccgcgccatgggcttcgaagggtcgatggagaaagacccgagcatggtctaccgcaacggcaaggtcgccggctgctacaagcgcaagccggagatcaccgtagacgggcgcatcgtaggctacgtgccgggcaggaccggcaagaacgctggccgcatcgtgggctactatgtcgagttggaagacggctcgggcaccgtggccgccaccggtctgaccgaggagcacatcgagttcctgacccgtagccaatactactcgaccgtcaacgacacgatgccaaacttcggtcgcatcgtcgaggtctctgcgatggaacgctcggccaacaccctgcgccatcccagcttcagtcgcttccgcgaccttcccagcaatccaggagtcaaggtatgaagattcgaaagtcccgtaaccgcaactacccggaagatatggtgtaccacgccaccaaccgggattcactgctgtatccgaagtacgtcatgggttccgtgttcatcagccaggacggaacattccgcatctgcgtcatggcagggacctgggaccacgttgggtccgaagttctgcatcatgcacgggacatccaatcccttggcgccggtcgccgtaagttgcaccgggtcatgcgacggctgcgccgcaatctgcaacaggtaggagtcaaggtatgagaatgccaaccgaagaagaacgcacgatccgctgcctgctggcagatatccacgaacccttgaacctgctgttccccggtatccgtgtaaaggccgagacaatgcccttgggctggggagatagtatctgtgccctggtactccgggtgagctacgaacatcgcacgctgggtcgcctggagtacctgcacgaggtccccatcctgcacctgacgcagtggggccgggacggcatgctccagcacctgatgaacgagattccccgtcgggtgctggatggcatgctgcgccaggcacagaaatacagccagagcaactggtacagcaaatgacgactatccgaatcctcgacctcgaaaccgagagctacgagcacaaagggcgcaaagcgtcgccctttgacccccgcaactatatcgtcatggccggctggcgtgacgatgttgacggcaaggtcggccagaaggtggagcatcgcttccgcagccgggccgaagccgaagatccgaacaaccgctggttcaacctcgacggcgtggacgtgatcgtagcgcacaacgccatgttcgaatcgaactggttcttcacccgctaccgggacgagtacctggccttcctgcgacgtggtggccgggtctggtgtacccagcaggccgagtatctgctgagccatcagacgtggctgtacccggcactcgacgaactggccccgaagtacggcggcacccacaaggtggacggcatcaagctgctgtgggaccagggcgtgctcacctcggagatggaccaggacctgctgagcgagtacctgtccggcccgtgcggcgacatcgagaataccgccctcgtattctacggtcagttgatgaagctccaggcccgtggaatgtgggctggctacctggagcgctgcgaggccctgatcggtttctcggcgatggagtgcgccggcctgaaggtggacctcgaagtcgcccgggtgaaccacgccaagcaactggaagaggtggccgggatcgaggctgagctgaagaagctgatgcccgacttcccggaatacttcgagttcaagtataccagcctctaccatatgagcgcatggctctacggcggcgaggtgcggtacaagggccgggtgccctacgaagatggccggatggagaaagccgacttcgtgcgcttcggcacggccaagcgggggactcctatcgagagtacctcggtgcgggtcccgatccacgaagtgaccaaccagggtgagtggcactggcccaccatcaccgagctggcgaccaagcacggcccggtcatcacgttctccgccggcaagaacaagggcagcgtcaaggtgttccgtgaggatacggacatcccggcgaccaagtgggacgatgaccagcgattccgattccccgggctgatcaacctgaacaacctgccggaagtggtgcgcgagaaattcctaggcaagcgcccggagttccagtgcgccctcaccctggcggatggatcgcccgtgttcagcaccagcggcgacgccctccaggctctggagaaacagggcttcgaggcagccaagctgttgatgcgcctggccgagttgcacaaggacaactcctcgttctacatcacccacacctacaacaaggatgggacgatcaaggacacgaaggggatgcttcagtacgtggacgatgatggtatcatccaccactcgctgaatacgaccgcgacggccacgacccgactgtcgtccagccgcccgaacctccagcagctcccgtcaaaggacgaagacgacccggaagccggcagccgcgtgaaggagatgttcgtgtctcgcttcggcgcggacgggatgatcggcgagaccgactataccgccctggaggtggtgatgttggcggccctgtcgaaggaccggaacctcctggcgaagctgatggccggcacggacatgcacttgtaccgcctggcagggaagcacaacaactggaacgggttcgattacgaccagctcgtggccatcaagaaggaccccaaccatccgtggcacggtcgcatgatgcaggctcgaaagaacatcaagcccaaggcattctcggcgcagtacggtgcgagcgcggctggtatcgcattcaacaccggctgtaccgtggaagaggcccaggaattcctggacaacgaggcggccctgttccccgagtccatcgcattccggcagatcgtccgcgacagtgcagaggccaccagcctcgtgatgtacaaggccgaggaccagatgccggcgggcgccttcagcgagatggggtcggatggtaactggcgccagtaccgccgaggattctggcaagcgccgggaggcacctgctacagcttccgccaacaggaacgctgggacaaggaacagcgcaagacggtcatggacttcaaggacacgcagatcgccaactactggaaccagggcgaggctgggttcatgatgaccgtgagcgtggggcgcatcttccgttggatgctgcatcgcccgggattcatggtcaccgagttcctgatcaacaacgtacacgatgccgtgtacaccgactgccacaaggacaccgccgccgaggtcaacaagggcgtgcgcgacatcatggccgacgcggcccgctacatgagcgagcggctgggctacgacatcgccgacgttccattcccggcagtggctgagatggggccgaacatgttcaatatggaggtgatccagtgaaagaactgcatccgctgcacacgcccgagttcgtcaaaacattcctggaccagaccgggtgcctgcctggggtacgccgtacgggccgcaccaccggcattgctctacaggccatcggcatggcgctgtcccatccgagggaaaccctgacgttcgtggaccacccggacggcagctcggcagcactggtggccagcattgaaaccatactggcgaccctgggctaccggaacgtcctcgttcgacccacaacccgtgcggacgggcgcagcgtgaacatcgtcttcaagacgctgccgaacgcctgacgaccttccctactccggccttaaatcttccttcgacacaagagagaccacgtatgactcagcaactcaacgctctgcaagctgcactcgccctggccaacaaggctgccgagaccgcaaccatcgacatgtctgaaacctccaccggcggtggcggcggtcgaatcttcccggctggcaccgccatgggccgattctgcatctacatcgagctgggtgaccacgccaaggaattccagggcaagctcaagaacccggcgcctcaaatccgcctgggcttcgcactgtggggcgacgtgaacccgcaggccggtaatccgcagagccgcccggacgacctgttccacacctacgaggccgacggctcgatcaagcccggcctgttccgtaccttcgagatgaccctcggcaacaacgagaaatcgaagaccaagctcgccttcgacaagatgaactggagcgggcagcatacccacttcgctcagatgctcggccaggcgttcatcatcccgatcaagcgcaccaagatcaccaagggcaacaacgccggcaaggaacgcaacgacatcgattggggcggcatcatgaagccctacaatccggtcgatggcagcccgtacaacgtgccggaactgccgatggacctgttgcagtatttcttcttcgacgcgccgaccaaggagacctgggacgccctgcacatcgaaggcacctcggacaatggcaagtccaagaacttcctgcaagagaccattcgctcggccaccaacttccctggctcggccctgcacatcatgctgggcggcggcgacgatctgatcatcaagccgacgacccaggccgcaggcagcaacctgccggcagtgcccaacgtggccgccgatgcaggcgtagcagcagcccctgctgtcccggcagttccgcaggcagtgccgcagacggcccctagcgtgccccaggtggcgaatgtagctgcccctgtggtaggtactgccgaggcacagaacgtgctgcctgacgtaccgcaggtggctcaggtggcagctccggcggcggtcgaagtcccgtcggtcccggtagtgccggcagtaccgcaggtctaatgcgcctgccatcggaagagttcctggcaggactatccgcgcagttcgaccgcagcatggcaggcgggacgttggtgtgtgacgccgacggacccgcctacgtggctgcggccactgctaagaccttggacactgcactccggagattctggaagctcattttggagcagcagttcctagcgcactgcacggggacacgggttcacctcacggcagcaggtggggcgaaggcgtaccgggacacgtatccgaccatgaaaccctaccagggccagcgcaagggtaaggcaaagcccgcgctgctggagcctctgcgacgggccgtggcggacgtgcatgagcgcggcggcgcacccgaagggatcgatgtcatcctgcacacgttcttcgaggcggacgacggcatgatgatggacgcctacgccatgcaggacaaggccatcatccggtccgacgacaaagacctgcggatgacgatctacccgtattgggagatcgacacggcgtgtgtgagcaggatcgaaggcggcttcggctacctcaaggaggcatacacgccttccggccagttcaagctcaagggccacggacggaagttcttccttgcgcagtggctcggcggcgataccgctgacaacatccgagggatcgatcgattcaacgggaagctctgcgggatgaagacggccttcgatatcctccacccgatcacggacgaggatgaagccatcgacatgatcctggaggcgtacgccaagatcaagcaaaacccgctggcagaggccgaggtgctgtggatgcgccgaacgcctaccgacaacgcagcgcagtacctgttaagccgcgaccttcgtccggccttccgccagtggatcatcgagctggacgcctaccacgaggcgctgctccagaagcggagggagagtgactatgacgagtgagccgaaggtctaccagataccgcgcagccaacagcgcaccttcaccctgaagctgtgggccgagcagggcaagctatgcccgctctgcggtaagcccatcgatatcagcgtgaagggcgaggcggtgatggaccacgaccacgagacggggctggtgcggggcgtcctgcatcgatcctgtaacaccgcagaaggcaagatcacgaacgcggcgggttcctggggatgcaagtcgatgaagtacaccgacatcatcccctaccttcgtgccctcctgacgtacctggaggggccgaagcatccgctgatctaccccctgcacaagaccgacgaggagaaacacgaagcgaagctggccaagcgccggcaggcagccgccaaacgcaaggcggcgatggccgtcgcaaagcacaacgcgaggaacgtatgagcaaactccgcaagcaattcaccaatgagtacctgcgcaacgtctatgtcgagctgggtctcaagaagggcgccgagcatctgaccaggcattcgcgcttcggcgaagtgagccgccagtgcttccgcaactggtgcatcaagctgggcttccacgacagcaggacacgcggcacgtacgccaagaagggtgcgctgcactggctgggccgaaaggcggccgaggtagtgcgcaagttccctggcgccgtgggcaacgtggtcggccaagggccgaaggtgttgagcctggacatcgagacctcgcctatcgagggctgggtctggtcgctctggaagcagaacgtgggcctcaaccagatcaagcgggactggaccatcctgtcgttctgcgcgaagtggatgcacagcgacgaggtgatctacatggactgccagggcgaccccctggacgacatgcacctgctggtcgccctgcacaagctgttggacgaggccgacatcatcatcgtccagaacggcaagcgcttcgacgtgcccaagatcaacgcccggttcttcctgaacaagatgccgccgccacgaccgttcaaggtgatcgacaccttgatcatcgccaagcagcaattcgcgttcaccagccgcaagctggagtacatgacccacaaggcatgcaccatcaagaagcgcctccacggcaagttccccggattcgacctgtgggcagcctgcctccaggacaacccggaagcctgggaggagatgcgcctgtacaacatcgacgacgtacgatcgatggaggagctgtacatcctgatgcgcccgtggttcgtcggccatcccaacgtggccgtgtacttcaacgacgctgagccgactatccgatgcccgaagtgtggcgacacggatgtcaagcaagaaggctgggtgcatacgcagaccggcaagtacgagcactatcactgcggtggctgtggtggctggagccgagggcggtatacccgcaacacctcggaacagcgcaaggccctgctgagcaactaaggaggctatatgagcctggcgttctccgatccctacgaatctacgggcacccagcccggccagtaccgcaaaggcgcggccccggacgagcgaaaggccggcaagctcccgatgcacctggtggttgaaggcttcccgctgctaaagcgggagcttgcccgcatgatgcagtgggccgccgaggtcaagggctacaagccccacgactggaagaagatgtcggtgggcgagttcaaggccgcccaacaccggcacgaatcccaccgcctgctggacgggccgctggatgacgagtcgaacctgatgcacctcgtgcatgaggcattcaacgcaatggccgccgccgagcgtgccttgatggaccgggagaaaggcaatgagtaaaatctgttggtgtacccgaccgcacgagaccgacgaaggtgtacgtgtcatctgggccttcaacgagcggggcatcggggtaaactacgtcacggcgtacgtcacgccggcgatgatccaccacccggactggcgcgataccatcctcccggacatcctccaggagatggcggagcgcctggaccgcgaggttaagctggtggaattgcgctggttccgcgctgagattctgagctgcggggaatggcgtgactaccgagcaatgacgctggacggggcggtcagcctggccgaggccgagtggggtcccgaggatatcgggcgcgtaatcgaaagacgataggagacggaatggacctgatacagcagcagatcgcccacgaagaggcccttgtcggggcggcgcagaacgacgcccgcattgccttggaaaaggcgatagcccaagggtccatcgaccgcatcccgagggcacgcatcatgttgatgcggatgctccccatcgtgaccgaagcgatcttcgcccaccaggaagcgaaggcggcgggaccggcagcgaagctgcgacacctgctgcggatcatcgacgcccaggacctcgcggtcatggcgctacgggccgggctgtcgatgctcatcaactacccaacgatcaccgcgacgaagtattacacccatatgggcaagatgctctgccgcgagatcgaagtgcggttggccttcaaggtcaaccaaccctattacgaccggacgctggactacctcaagaccagcaggactcgcagcgtccggcacatccagaagacgatggacgcccttctggacgcggtactgcccgaggaggcacgtatcgacctgccggatggcgactacctgcgtctcggcaagttcatcggtgacccgctgatccaatgcggcctgttcgagccgaaccgcttcacaggccggggcggtacgagcgtccacctggagccgtcgccggaggccaaggagttcctgcaagacccgtcggcggcgatgacctggggaggcccaggccgtagcgtaatgctggcaccaccgagaccctggaacgactggtgcgatggcgggtactacagcgccaaggcgcagaagcatcacgtattggtgcgtcgtaccaaacaccagaccaagcgggcacgtcagatgcagctccgccacctgggccgggacaagatgcccaaggtatacgcggcggtcaacgcactgcaatcggtggcctacgagatcaaccacgacgtgtacgagatcatcgagcgcatcttcacttccggcggcggcgtgctgggtatcccgcagcgtacctacccggacaaacctgagttcccgctcggcgacgagtgggccaaggagaacgccagtgaacaagagctggaagccttcaaccgatggaagcgatccgtccaccgatggtacaccggggagcgggagcataccgccaagcttcgcgaatttgctgcactctaccgagttgttcgagagcatcatggcaaggcagtgtacttcccgatgcacgttgactcccgtggccgcatgtactattggggcacaccgaatccccaagggtccgacatcgccaaggcatgccttcagttccacgaaaagcgcgccctcggcaagcgcggcctgtactggctcaaggtccacgtcgccaactccctcggatgtgacaaggtgtacttcgacgaccgggcagcctgggtcgatgagcgatgggacgacttccagcgagcactcgacgaaggcccggagaactatccgaatctcttccccgaagacgagtcgcccctgtgcgccatcgccggtctgctggagctgcgggcggcctacgcatcaggccagccggagaattaccgaagtgggttcatcgtccatatggatgcaacctgctccggcctccagcactactcagccatcctccgagacgagatcggcggagcatacgtcaacctgttgccacctggacttgccaaagctgacatctactcccgagttctcggtctcgttgcagagtctctggcacgagacatcgagagtgctgaaggcgaggctcggggctacgctgtactgtgggataaggccggtcttgccaggagcctgacgaagaaaccctgcatgacgctggtgtacggaaccacgttcaagggtgttgtggaccactgcctggactacctggacgagtccggcctggagattcccgagggtatcccgtcataccgcctgggaagctacatggcaacgctcatactggacgcaattcgcgagacagtaccatcggcagtcttcgccatggaatggctccagcggctcgctaaggcccttcctgacgcatccaaggatttgcactggaccacgccactcggcatgcaggtcttccagtcctacccgaagaccgaggaggtccgggtgcggctgcgggccgaggctgtcgagtacgtcaccctgtacgaggccaaggacgagctggacccggtacgcaacgccaacggcatcgccccgaacttcgtccacgggctggatagcagccacctgggcctgacagccctggcatgcgcggcggagggaatcccgatccaggccatccacgacagcatgggcacctatgcggcagacgtggatcggatgcacgtccacatacgggagcagttcatcgccatgtacagtggcccctgtgtgctcgtagagctggcaaatcagcttggggtagaggctaccccgccccggaggggatcgttgaatctggaggctgtacgggactcctgggcgttcttctgctgaggtggattatgtcacccacataggagcaagtgcatccgtccaaggccctcgtagagggagcggggagagaggagaggtcagggaagacctggtagaggagaggtggagatgagaatggatgactacgaaggattctagatagaatagactaaccagcataggagatatgatagatggctactatgaagacccaccgccctacggttatgtcacccacagtggaaggatcgagaacaggcaagggtacggcccgtcctgtcacgttcacctctcagcagatcgagtggttagaacagaccttccccgaacatcagatcggtcctggaaccacgatggaagacatccagttccaggccggcaggcgagacgttgtgcgagcagtacgactgcgccgacgtgatgccatcgcagtggagctgaagtgatgagtaagtccatctggcgagtacacgcaaaggccggcactccctcggaactccagggcctgtgctggctggcaatacaggagctggaggagttcaccctcttccgctcgaaggacgacgccctgaatgcgatgctggacagtatcgagggcaacgatcgaaccgagctgttggtattccgcgatggtcagttggccggcggtgcctgcatcgtgttcgaggacgacccccacgtcggcccgtgcgtcacagcacagtggcagtacgtcctaccgcgctaccgcaatacaggcgtggtccgggagttcatccgcgaactccaccgtcaggccggctggggtcaaatccccctcgtgtgctggagccatcgtgaaagcgatagccggtacacgatccactaccggagagccaagccttatgggcaagaaagtcaagaaggtgctaggcaagaccatcatcggcaaactcgctgatggcctgctgggcaccgaccttagcggcgcacaatccgatgcccgcaagatggaagagcagaaccgcctaatgcagcagcaggcggaccagctcgcacgaaaccagcaggttgacctcaccgccgagaacgtggcgcaggttgacctaggagcgatggccgatgccactggcaccggcactcgacgacgccggaatcaggcgggcacaggcgtatcgcaaaccctcggtatcaactactgacgaggtacgccatgaaaaccaccgcagctatgctgtgggagaaacttcgggatgggagcgtggagagtcgagccatcgagttcgccaagaccacgctgccctacctgatggtcgatcccatgtccggcagtcggggagtcgtagagcatgacttccagtccgccggcgccctcctggtgaacaacctcgccgccaagctggcgagatcgctgttccccacggggattccgttcttccgatccgaactcactgatgcgatccgccgcgaggccgacagccgggacacagacattaccgaagtgaccgctgccttggctcgggtggatcgcaaagcaacacagcgcctgttccagaacgcctccctggcggtcctgacgcaggtgatcaagctactgatcgtgactggcaatgctctgctgtaccgagacagcgccgccgctacggtggtcgcatggtcgctccgctcttacgcggtgcgccgggatgcgactggccgctggatggatatcgtcctcaagcagcgctacaagtccaaggacctggatgaagagtacaagcaggacctgatgcgcgcaggccgcaacctgtccggttcgggcagcgtggacctgtacacccacgtacagcgcaagaagggcacggcgatggaatacgccgagctgtaccacgagatcgacggcgtgcgtgtgggcaaggagggccgctggcctatccacctgtgcccgtacatcgtgccgacctggaacctcgcccctggcgagcactacggtcgcggccacgtcgaggactacatcggcgacttcgccaagctgtccctgctgagtgagaaactcggcctgtacgagctggagtcgctggaggtcctgaacctcgtggacgaggccaagggtgcggtagtcgatgactaccaagacgccgagatgggcgattacgtgccaggcggtgcggaagccgtccgtgcttacgagcgtggcgactacaacaagatggctgctatccagcagagcttgcaagccgtggtcgtccgcctgaaccaggcgttcatgtacggtgccaaccagcgcgacgccgagcgcgtcactgccgaggaagtccgcatcactgcggaggaggcggagaacacgctgggcggtacttactcgctcctggccgagaaccttcagtcgccgctggcgtacgtctgcctgtccgaggtggacgatgcgctcctccagggcttgatcaccaagcagcacaagccggctatcgagacgggccttcccgccctgtcccgctccgccgctgtgcagagcatgctcaacgcttcccaggtcatcgctggcctggccccgattgctcagctcgatccccgcatctcgctaccgaagatgatggatacgatttgggcagccttcagtgtcgatacctcgcagttctacaagagcgaggcggagctacaggccgaggcagaacagcagcgccagcaggccgcacaggcccaggcagcgcaggaaaccttgctggaaggcgcttccgacatgaccaacgcactcgcaggagtctgatagatgacccaaccgaacgaacagcaactgccgccgggcctcgctaacctggttgccaacgtaccgcctgccgccgcaccgaccccgagtcatgtgcaggtgatgccgaacccggtgatccaaccgcaggccccggtccagcccggccaggtaggtgcgccgcagcaactggccatcccgacccagcagccgcaacccgttccgaccagcgccatgacgccgcactaccaaccggtagcggcacctgccgtgggtcaacccgttgttccgcaagcacccgctcagccggccccggtagctccgccggctgcgggtgcagttcttcccgagaacctggaagtcccgccgccgccggccttcactcccaacggggagatcgtgggcaccttggcagggaacctcgaaggcgacccgcagttggcgccctccatcagctatctggaggcgttctctgacaaactggataccgtccgagccttcggcaaggccgccgagaaccgcgatcctcggttcatcgacgagcactatctgaaggaagttctcggcccggcccaggcgcagcacgtcatcaacgtggccaagggcgtcctgacctatgtcgatgcgcaaaccaaggctgtcctgaaccagacctatgccgccgtcggtggcgaggccgtgctgaagcaggccgcaggcgtcttcaaccaacacgctgacccggccaccaaggccgccatcggtcggctgatggactctggcgatgcccaggccatgcagtacgcagcgaagcagatcattgccttcgcacaaggctccggtgccgttgtacaggctaccggccaacccctgggtgctgcggcacctgcactagcagccctgaccgctgagcagtaccgcgcagaagtgtcgaagctgccgctgaacgcatccgaagccgacatggctgcactgcgagagcgccgtaaggcaggcatggcgcagggtatctaacgaccctgccctactccggccttaaactcacatccaaaagagagagaatcgcatgagctttctgaacgacctgacccgtccgaactacgctggcaaggacgcggacgttgacatccacctggaagagcacctcggcatcgtcgacaagcacttcgcctacacctccaagttcgcaccgctgatgaacatccgcgacctgcgtggctcgaacgtggtccgcctggatcgcctgggtaacgtcaaggtcaagggtcgtcgcgccggtgaagagctggagcgcagccgagtcgtgaacgacaagtggaacctgaccgttgacaccctgctgtacctccgccaccagttcgaccaccaggacgagtggacccaatccttcgacatgcgcaaggaagtcgccgagctggacggccaggaactggctcgcaagttcgaccaagcctgcctgatccaggtgatcaaggctgccgcgatggacgcaccggtggacctggaagacgccttctcgccgggcgtgctggagaagctggacctgaccggcctgaccgccaagcaggctgccgagaagatcgtccgcatgcaccgccgcgtagtcgagaccttcatcgaccgcgacctgggcgatgcggtctactccgagggcctgaccccgatgtcgccacgtgtgttcagcctgctgctggaacacgacaagctgatgaacgtcgagtaccaggcaaccggcgcgaccaacgattacgtgaagtcgcgtgtggccgtcctcaacggcgtcaaggtgctggagactccgcgcttcgccaccgacgcaaacgcagcgcatccgctgggccgccacttcaacgtgagcgccgaggaggctgagcgtcagatcgccctgttcctcccgagcaagaccctgatcaccgcccaggtggcgccggttcaggccaagctgtgggaagaccacgataagttctcgtgggttctggataccttccagatgtacaacatcggtgcccgtcgcccggacaccgctggtgccatcgagctgaagggtatcggcgccttcgacatcaccgcgtgaccaaaagagagagaatcgccggctaaggatttaaggtaaggaggtttatttatgagcattcaattttcgaaaattttgcttcttacggtgctcgcaacagccacgatctccaacgcccaggataaaaagtctaaaagtaagactgccaagattgattggtctcactggacagtgacggtccctgaggagaacccggacaagccaggtaagccgtattcactgggttatccggagattctcaattatgcagaggacaaaatcgcgtcaaaatacatgtacgacgatccaaaggacaaaagtgtcgtgttctacgcattcccgtccggcgtgactaccgctaacacccattacagccggtcagagttacgggaaactatggagaccgggtcaaacaaagttaactggaccttcgctaagggtggcaaaatgcgtggtacttacgctatcgacgacatcagcaaagagccggatggtaagtattcccgcgtaattatcgcccaaatccacggcgtactgaccgacgagcaacgtgatcttattgggcaaaaggacaataatgcccctccgattctcaaggtgtactgggataaaggtaaaattcgggtaaaaacgaaagttttaaaggacctgaacgccccttacaaagagatgcttctggaacacgcttggggtgatgacgaaggccggaactttaaagagaagattgacttaaatacacggttcacattggaggttaaagtgagcgatgggcggatggaagtcattcttaacgacaccgaaagtttggtctatgacgacattcacatgaaaaaatggggcattttcgaaaactactttaaagcagggaactacttccagtctaaaactccgggcacttttgcaaaagttaaaatttattcacttcaggttacccacctcgagcaccaccaccaccaccactgatgccacgaaaccccgcacttcggtgtggggtttcttcaaagcctaacgacccgcgcagattccctgcgtgggtttttgcgctttaggagaaaccctatgctactactcgacgcagtgaatgtcatcctgcgcaagatcggcgagctgccgatcccgagcatggatgagacgtatcccaccatggccattgccctccctgagctggaggaccagcgcatccagttgctgacgcaaggctggtggttcaacacctggtggaagcacaagctgacacctgatcccacgggccgcatcaacctgcccaagggcaccttggcattctacccggattccccggacctccagtgggacggcctgggagtgcgcgacgccaacaccggcgacgaccgcatcggtaagtcggtcgagggccggctggtgctgtcccgcgagtgggaccgtatccccgagatcgcacagcgcgtcattgcgcaccaggccgcactcgcggtgtacacccacgagattggcccggacgagaccgcccaggtcatcgcccaggaattgcaggcgtatcagaacgaactgtcccgcatgcacacccgatcccgtccgctgaacacccaggccaagcgtagcttcagccggtggcggcgcagcttgaggacctgagcatgagctacaagcaatccgcgtatcccaatctgctgatgggtgtgagccagcaggtgcccttcgagcgcctacctggccagctcagcgagcagatcaacatggtatcagaccccgtgtcggggctgcggcggcgcagcggtatcgagctgatggcccacctgcataccgaccaaccctggccgaggccgttcctctaccacacgaaccttggtggccgcagcattgcgatgctggtggcgcagcaccgtggcgagctgtacctgttcgacgagcgggacggtcgcctgctgatgggtcagcccctggtgcatgactacctcaaggccaacgattacaggcagctacgggccgccacggtggccgatgacctattcatcgccaacctgagcgtgaagcccgaggccgaccgcaccgacatcaagggcgtggaccccaacaaggccggctggctgtacatcaaggcgggccagtattcgaaggcattctccatgaccatcaaggtcaaggacaacgccaccggcaccacctacagccacacggctacctacgtgacgccggacaacgccagcacgaaccccaaccttgcggaagcgcccttccaaacgagcgtaggctacatcgcctggcagctctacggcaagttcttcggtgcgccagagtacaccctgccgaactccacgaagaaatacccgaaggttaaccaggatgccgatgcggcaaccatagccggatacctcaaccagcgtggggtgcaggacgggtacatcgcattccggggagatgccgacatcaacgtcgaagtgtccacggacatgggcaacaactacggcatcgcgtcgggcggtatgagcctcaacgcaacggcggacctgccggccttgctgcctggtgcgggcgcacccggtgtgggtgttcagttcatggatggtgccgtcatggccaccggctcgaccaaggccccggtgtacttcgagtgggactccgctaaccgccgatgggcagagcgggccgcctacgggaccgattgggtcctgaagaagatgcccttggcgctacgctgggatgaggctaccgacacctacagcttgaacgagctggactatgatcggcgcggctccggcgacgaggacacgaaccccacgttcaacttcgtcacccgaggcatcaccggcatgacgaccttccagggtcgcctcgttctcctgtcgcaggagtacgtctgcatgtcagccagcaacaatccgcaccgctggttcaagaagtcggcagccgcgctgaacgacgacgatcctatcgagatcgccgctcagggcagcctgaccgagccgtacgagcatgcggtcaccttcaacaaggacttgatcgtcttcgccaagaagtatcaggccgtggtcccgggtggcggcatcgtgaccccgcgaacagcagtcatcagcatcaccacgcagtacgacctcgatacccgggcggcacctgctgtgactggacgcagcgtgtacttcgctgccgagcgtgccctgggtttcatgggcctgcacgagatggccccgtcgccgtccacggacagccactacgtcgccgaggacgttaccagccacatcccgagctacatgccggggccggctgagtacatccaggcggcggcctccagcggctacctggtgtttggcaccagcacggcggacgagatgatctgccaccagtacctctggcagggcaacgagaaagtccagaacgccttccaccgatggacgctgcggcatcagatcatcggcgcgtacttcaccggcgacaacctgatggtcctaatccagaagggccaggagatcgccttgggccggatgcacctgaatagcctgccagcccgcgagggtctgcaatatccgaagtacgactactggcggcgtatcgaggcgaccgtcgatggtgagctggagctgaccaagcagcactgggacctgatcaaggatgcctctgccgtataccagctccagcccgtggccggtgcctacatggaacgtacccatctcggcgtgaagcgcgagacgaatacgaaggtgttcctcgacgtgcccgaggccgtggtcgggtcggtgtacgtggtcggctgtgagttctggtccaaggtggagttcactccgccagtgctccgagaccacaatggcctgcccatgacctcgacccgcgcagtgcttcatcggtacaacgtaaacttcggctggaccggcgagttcctgtggcgcatcagcgacacagcccgacccaatcagccgtggtacgacacgacgcctctgcggttgttcagtcggcagctcaacgccggggaacctctggtggacagcgccgtggtgccgctgccggctcgggtcgatatggctacgtccaagttcgagttgagctgccatagtccgtacgacatgaacgtccgggctgtcgagtacaacttcaagtccaaccaaatctacaggagggtgtgatggctttctggctaccactattggccgctggcggcatgtccgcccttcagcagggattggccaacaaggaagagcgcaacaagatcaaggccgagaacaaggctcgactgaagacggacctcgacaacctgggcgccgccgcccgcgacatcgccaacctcggagtcatggccgctagctaccgcaagcaggccgtggcctcgcaggtggaggccaaacgccaggggatgctcgccggcggcagtgccgaggctcaggccggagcgttcggcgtcaagggcgcatccgttgatgcggtggccctggatatcgagcgggaggtcggcgaggctctgttccagattgacgacaacctggacaatcagatgtggaacctcgccgagcaggcgcactccatccaggcccaagctaaggccggcctgctgggacagaagagcaccactgcggggcaacgatccccgctggtggctggcctgatgtcggcgggttccctgtatgcaagtcaatacttcaagttcggcgccacgcctaaaggaggcaactgatggcggaatcgcaacgtgcttcccaagagcttgggatcaacgtcgggcagacgcaactccagccgggccagagtgcccggcgtggggtgcgcgactccgaagtcaactacagcgggccgagtgtaggctcacagattctcgacggcatcctcggcgccggtcagcaaatcgcaggcaagtggttcgagcacaacgtgcagcaggaagtgctgcgcggtgagcgtgcccgcatggccggcgaggccgaggaggcggtagacagcaacatcctggccaagcccttcgtgaagggcggctggcgtaagcaggactaccgtatcgctcaggcggacttcagcctgaagatgcagcagttcatcgccaacaagggccgggagatgactcccgaggagttccgcaaatacctgtcccaggaggctacgcacgtcctggactcgacaaagggcatgaaccccaacgacgccctacaggcgctggcgcagcagcagaaggccgaggagcagctcttcggcatgcaggccaaggcgtacatggactggtccatcgaccaggccgcacgaggcttccgcacccagggtaacagcatcctggccaaggctgtacaggcccaggccaccggcgacgaactgtcccgacaactcagcctggaagaggctggcctgttctataccaacatcatgacctccgaggatatcccgctggaggtgcgtgacaaggtgggcatgcagttcctggcagccagcctggacatgaaccagcggggcatctacgagagtctgcgcgatgccggcttcctggacagcatgtccttcgacgaccggcgtgcgctcaacggcctctatgaaaagtcgaaggcacagacccgggccaaggaatcgatggctaccctgcgggccgatgcggacttccagcagcgggtggctaacggggccatcacagaccttgccgaggtcgaggcgtactcccggggcatggtcgaggagggccgctggagcgacgcccaggccatctcgttcatgaccaaggccatgaccggcctgggcaacgctcagcgcatgcagggcatcatggcggccctggaggctggggacatcaacgccctgcacacgctggggacgaacgtctccgaggcactggagcagtgggacaagatgcaggcggccaacggctcaagcctgaccgatcgactcgtacagggcacgcagctcggcctgcgcctggggaccttccccaagacctacggcgagtccgtgggcagcgccgtgcggatgatccaggcggccaaggaaggcgaggcgaacccggagctggtcaatacgttgaacagcatcttcgagcaggtggcctcggcccaggagatcaacccctccgccggcaacgtgatgctatccggcatcccggaagccgagcagggcgctgtggcctgggcactcaagcagatgaagatgggcatcgccccagctcaagcactgcgcgagttcagtgccaacgccgaagtcgtgaagcagatggacgagttcgagaaaggacagaacaccaaggcattcaaggacaacctcggcaagcaggtcaacgacaagttcgtgaacaacatcttcggtcgggcctggaacatgctgaccggtgagagcgacctgagcaacaacgaggccgttctcagcatgtaccgtcgagcaaccatcgacgaggcgaactggctggccagcgaccgcaagcatgcgggtctgcttaccagtgacacgggccgcgaggccctgctggagatcgccgccgccaacgtgcgtaaccgcaccatccaggtaggcgaaggtcggaacctgaaggaaggggacctgttcagccgccgcgacagcgcgccactgatcctaccccgtggaaccaccgccgagcagctattcgggaccaacgataccgagaccatcgggaccgtcctggccgagcagcacaagccgcatgtcgaaggactcctcggttacaagtcggtagtcgccttcgagtacgaccgcaccagtggcagcctcctcgccgtcgagtacgatgagaacggtgtggccctggaccgcacgcgggtcgatccccaggcagtcggtaacgaggtgctcaagcgcaactcggacaagctgaacgcgatgcgaggtgccgagtacggtgccaacgtcaaggtcagcggcacggacattcgcatgaacggtggcaacagtgccggcatgctgaagcaggacgtgttcaactggcggaaggaactggctcagttcgaggcttaccgaggggaggcgtacaaggatgccgatggttatagtgtgggcctggggcattacctgggcagtggcaatgctggggcaggtactacagtcacgcctgagcaggccgcgcagtggttcgccgaagacaccgaccgcgcactcgaccagggtgtgaggttggccgacgagctgggcgttacgaacaatgcctctatcctgggcttggccggtatggccttccagatgggcgaggggcgtgcccggcagttccgtaacaccttccaggcgatcaaggatcgtaacaaggaagccttcgaggctggcgtacggaacagcaaatggtacacgcagacgcccaaccgggctgaggcattcatcaagcgcatggcgccccacttcgatacaccgagccaaatcggggtcgattggtacagcgccgcaacagcggagtaagacatggcacagcaattcaagggccgcatgacgcccaagtacccacttgaccaagcacagctcgacgaggcccaagtacagggccaactcgacgcagtgcctaccgtggggttcgacgccctgacgggtggcgagatcggagaacggaacgtggcagcgggccaacgagccaacgcgcgggaactggaacgcatcgtagcggaccaggaactgccggcccttgaccgtgcttccgcactctggaaccagtccaccctcgtcggacgctggggcgatgcgctccagctcgacgcggaccttgcggcgaacagcaccggcgaggtggaccccaacttcgacgccgggacctacggggtccaggcgctccaggcggcgggtatccagccgactgacaactatctccagatcatggcccgtgccggcaatgccgaggacgcggcctacctcctgtcgaggattcaacggtatgagcaggacgagcaaatcgtgcgggacaacccgtactggaacttcgcggctggcatgctggaccccgccgctctggcagttgatgcggttactttcggcgctggccgtgctctgcggctcggtcgtgctggcatggctgctgctggcggcgctgggcaagtcgggtatgttgctgggctggatgccgcaggggccgacgtggatgccggaacctacatcgtggcaggtgctcttggcgctggcgtgggtgctctgctggggtctggtgcgggacgcattgccgcagaggccccaacgcaaccgcatgtgcccgaagtatcggcgcctactgtcgggctgccagaagtagccatgaccgccgaggaggccgccgcacgcggcttcaaggccggtgacgtggtagacctgctggacgagggcaccgtgctgtcccgtgtcagctcccgtgtggagcaggccgagataccggccatcccgcgccgtgacactgccttcggcgacgagctgcacagcctgtcgggccggaagctgtccgaggtcctggaccacctcaagacccacgcagaggttcccaagccgctccagggcatcgccgccaaggtggctgataccatcaggaccctggagggcctgggccagcgaaccgcgttccgagtggtgcagggtggcgacactgccagctccgcattccttaagccgggcacggcgggcatccactccacccagggcctcgacaccttggtccaggtacgcggcagcaccgcacctggtcgagttggcaccaacccggtgaccgtgctccacgaggcggtccacgctgccaccgtaggcgtgatgaacgccgccctgcgcaaccctggcgcgatgagtccgaaggtggctcaggccatgcagaccctggagaacgtccggggtaacgtgctcaacgccctgaagcaggaccgcgccgccggtcggcaactgtccgagttcgaagagacgctgctggccggcaactccaacaccctggcaaacgtcaaggagctggtggcctggggcctgacggatacccgcttccagcggaccctgaatcgcctccgctacagcgacggcgggccgggcctgtggacccgtttcgtggagggcatccgtagcctcctgggcctccggtctgatgccgacacggccctgagtcgcgtcctggccgcctctgagacgatcatggacgccatgccggggtacactaaggctcaggctaagtgggccaacaagggcgctccggtgaccgaggaggccagcctggagaccatcgtgcggaccaccagggagcgtgcccgcgagggtgcgggcttcgtgaaccggttcttcagcgaggcggacctactggcacagcccggagagggcgcacggcgcctcctgagccgtcttatcgacgaccctgtacgtcgggatgggttcagcacgaacgacaacgcagcgagctatttgcgccgttaccggaacgagttcgagggctacgtgaagtcctacgacgagatgatggccaaggcaatggctgagcagggcgtgggcctgacggcacgtgcgctgaactcccgccgcgccatggcagtccgggaccagcttaacgagcaggtcacccgcgagctgctgcgccgggaccgggagtggaccgcctacggcagcgtccgcgtagaccccaacctgccgccgaccatcaaggccctggccgaccgctcggacgagattcacggtctgatgggtcagcgtgccagggaagccggggtccggggcttcgaggacttcgctccgcgtcccggatacttccaccgctcgtggaactggtccaagatggcgcagatggatgaggccgcccctggcctggcccggcgtgctatcagcgaggccgtgttccggggcatccctgggctggagcgtgccgacgccgacaccatcgcacaggccattgtgcagcgggcacgggaccgggctaccggtatccgctccgagttcatgggcgcgatgggcgtggcggacacggcattcatccggcaggcgctggaggaggccaacgtgtcccaggccaagttcgacagcatcatggccaagatcgagcagaagcagtccgaccagggcaccgtcaaatacggcaagggccggctgtcgctggacatgaccgccgagatcaaccacaatggaaccgtgtaccgcgtgcaggacctgatcgaccgggacctagaccgcctgatggagaactacgccggcagtatgtcgggccgctcggcactggcccgcgcaggcatgcccggcgactccgaggtggaagccttcatccgtgagtaccagcgggaggccgcgcacctgggcaccgacaaggtgcaggagctgacgggccaactgcggggcgtcttcggggacttcaccggcaacgtgccgcgagagcatcagctcggccccgtcgcacagcgggccagcgggctgaccagcgccaccatgctgggattctccggcgtgtaccagcttgctgagctggccacgatggctcaccgccagggcgtcttcaacgtaatgaaggccatgctgaactcccgcctgggtgacttcgtaggtgccatgcgtcgagacccggacctcgctgatgagatgcagaccgtcctcggcctgaacctcgccaacgacattcggatgaagccctggaagcggcagttcgacaccttcctggccagccaagacaccttcatggatcgcttcctccacgcgggtaagcaggctgtcccggtgctcaacggcatgaagttcatccacaactggcaatcccgcatgaacgccaacctcaccttgaacaaggtggcgcgggcggcgcagggggatgaagcagcccttcgcgtgcttcagcagtacgggaaggacgtggactggacgccagtcctggcgcgggttcgcggttatgtcacatacagaggaaggaacgcccaatccatgaattggggcgcctggagccaagcagacgtgaacaccgtcatgaacaccgcattgcggatcatggacgactcactgctgtacggtcgagtcggtcagaactcgggctttgcccggtcacctgtcggccaaatcctggggcagttccgcagctttgtggccttcgcgcacaacaagctcctccggggaacctatgagaactccggcgtgcttggcgtggcctcgctcctcgcattccagtatccgctcaccgcgctgatgatgggtgccaaggcagcgatcaacggcaagttcgacacctctgatgaaggcatccgcaagatggccatcgacggcatcggttacactgccggcctcggcttcaccgccgacatgtggggcgtgatcaccggacactctaggatgtccgccccggtcttcggactggcggagcactccaacgaggtgttccgtggcgtcaaggacctagtaaccggcgacgaccccgcagccgccaccggcgatatcgtcaacggcgccgcaggggcactgcctttcgtcaacgtattcccggcgaccaagttgctgctggaatccatcaaaggggaataacgtggctcggttcaagaatcccgagaccatccacgttgcagatggggtcgaggctgtcttcagtctcgacttcccattcctgcggcgtgaggacgtattcgtccaggtcgataagatactcaccaccgactatacgtgggtggacaacaccaacattcaattggccgtggtgccgaagcagggccaagaggtccgcatcttccgcgacacgcctgcccaggtcccggacactcagttcagccagggcatcccattcctgccgcgctacatcgacgcgaacaacaagcagctcctgtacgctgtgcaggagggcatcaacaccgcgaacctcgccctggatggcgtactcgacgcgatccgtatcgccgaggaagctcgccgcctggcacaggaagcactcgacgccgccaatgaggcgctgcgccgtgccctgggcttcgctgagattcgcaccgtgaccgaggactcggacatcgatccgagctggcgtggttactggaaccgctgcatcaccgctgacaaacccctgaccttgaccatgcagatggaagacccggatgcaccctggatcgagttcagcgaggtccacttcgagcaggcaggcgtgcgcgacctcaacatcgtggccggccccggcgtgaccatcaaccggttgcagaacaccaccatgcagctctacggcgagaatggcgtgtgtaccctcaagcggctgggcgctaaccactggatcgtgttcggagccatggaggacgaataatgcgcggcattatcgcgggcatcatggcctcccaaatccggcgtccaaaaccaatcctggcgacgtacccgtatcccatcctagctacagacgacgcatggtcctgccggcccaacatagtggcggcgctgacacgcgacactctgcacgaggttgtgaaccagccaggagaggacacctaccacgcgacctccagcgtggtaagcgtactgctgcggtcgctgactcagctcggctacggcggtggcgatgggttcctgaccggacctgccgtcaatgcagccttgctgcgcgatacggtgaaggaatataccgcagagccttacgcattcctgtcgcagaccgcagtggccggcgcagaactgaaggttgtggttgtatactccgagtatatcgtggagccgtacgccttcgccacctcgacagcaattaaacaggcggaactgaccaatgtttgagacacgagttaagggtcgctacaccgtgacccatctgaaagccacgggtgaagtcctggcacagtacaccttcgacaacctcatcactaacgcgggtctcgactggatttgcgccatggacacctcagacctgttctcacaggccctggccgtgagtaccagcacagcagaccccaaccccgctgcaccctccctgccggaggaagtacgacggaccacctcgtacgccccgaacggggatgttacctcgggtctggatggggagtggatttactggcacaagcggtggcgcttcccgataggcacccttaccggacaggtactggccaccgtgggcatcgtggcccaatccgaagttgggttcgagagtaacaccggcgcgaagattccggcagggactccactgtcctacacccggatcaaggatgccgccggccaacccaccaccctggtggttcaggccgacgagattctcgacgtgcagtatgagctgcgcagcaaggctgtggcgatggccgaggccaagttcgtgatctctggagtcgagcgtaccatccgccttactccgctgcccttcgcgaaccggcgtaacctctacggtgagcgctacatcttctacaacgagagtcctcggattgacggtaagaatgcgtccggctcggatgtccaggatggccagtgggtgaagctgtacccgcgatatacgcggggcacctacaaggggcagctaatgctgcgggccaccgttgctaacggcaacatgccgggaggcatcaccggctgcaaggacctgaagatttacaacggtcggaactacgcactcaccatcgacccgcctgtagtcaagaacaacacgcaggaattctccatcacgatggagttctcggtagcgagggcataacccatggcactgatctacgacttcaacctggacctcgatccgaaggctaagtccaagttcgtaggtgcgcgaggccgtagggacatcagcgacgtgctagacttctgcgacgggggcgtggccatccaggacccgtcgcagggtatgatggtccgcgtgtggcgaacagagcttcgccaggacgggacctacctggggcacgaggacggctcgaacgagattcgcatcggcggaggtatcgaagaaggtatctccacgatgtccctcgacttcgacagtaacatgaactacgtgtgtgctttcgtacgagccgatcgaactggtgcaatctcctacttcaacgtgcagcagggccgccggctcctcgtggagcttgggcaggttgactatgccaaggtggccttggacgataagcgtcctggagctactgcctgggcacaggtcatcgtaccttacacccgtaacggcaacctgtacgtccgcacacagaacgagaactatacggtagagcacctggaggtggataccggcaaggtattccgaccgctggtcaaatgcggtatgggcaccaacctccgcttccaagtccaattcagagggcacatgtaatgagcaaaaagcagaccgcgagtgctgagcggctgggcctgctacacgagctggtctgcaccgctatcgagcgcaacttcaagtggtacatggacaacgacatcccgatccccgcatcggatatcgctgccgccaccaagttcctcaaggacaacgagatcacctgtgatccgtccgacaccatcaacatcgaccggctccgcgaggagatgcggcaggcgcaggccgagaaccgccgcattgccttggagggcttcatcgccggtgagaccgacgacgagatggaacgcctgtacacccactaaggaggcagcatgacgccgcaagaacgattccagatagcccacgaagtgcgggacatgtacccgcgcttccgggacttctgcctggacgccatgctgttcctcggcttcaagatgacgtggatgcagctcgacatcgccgacttcatgcaggattcgcccaacaaggcgatggtcgctgcgcagcgtggcgaggccaagtccaccatcgcctgtatctttgtggtgtggtgcatcgtccagaacccggctacccgcgccatgctggtatccggctctggtgacaaggctgaagagaacggccagttgatcacgaagctgatcatgcactgggacctgctggcgtacctgcgccccgaggcccgaatgggtgaccgtacctcggccaccagcttcgacgtgaactgggcgttgaagggcgtcgagaaatcggcctccatcaactgcatcgggatcaccgccgccctccagggttaccgtgctgacatcctaatccctgacgacatcgagaccacgaagaacggcctcaccgccaccgagcgggccaagctgacgcggcagtcgcaggagttcacctctatctgcacccacgggaagattctgtacctgggcacgccgcagagtcgcgagtcgatctacaacggcctgcccgcacggggcttcctgctgcgcatctggccgggccggttcccgaccctggaagagcaagagcgctacggcgactggctcgcaccctccatcctggcacgtatcgcccgcctggaggagaaaggccacaacccgcgcaccggcaagggcctggacggcacccgtggctggccggcggaccctcagcgctacaacgaagaagacctgatcgacaaggaactcgaccaaggccccgagggcttccagcttcagtacatgctggacaccagcctcgccgacgagcagcgtatgcagctcaagctgcgcgacctgctgttcatcgacgccacgcatgagagcgtacccgagcaagtggcctgggctgccgacgagcgcttcaagctcaagttcgacgcccaccgattcccggtcatcaagcctgagctgtacctgccggcgctgatggctggcggctgggcaccgctccagcagatgacgatgttcgtggaccctgccggcgatggtggcgacgagctgtcgtatgcagtaggcggaactctcggcccgtacatccacgtcgtgagcatcggcggctggaagggtggatttgccgaggagaacctggagaaatgtattgccctggctgcgcgttacggcgtcaaggtgatctatgtcgagaaaaacctcggcgcgggtgcagttggccagctcttccgcaaccatatgcgatccatcgacccggacaccaacaagccccgctatgaggggatcggcgtagaagaccgccagaagtccggccaaaaggaacgtcgcatcatcgacaccctgcggcccatcatgcagcggcaccgtctgatcttccacgtctcggcgatggattccgaccacgtgtcctgccagcaatacccagcggacaagcgcaacgagcgctccgtgttccaccagattcacaacatcaccaccgaccgaggctcactgccgaaggacgaccggatcgatgcccttgagggccttgtccgcgagctagcacccacgctcgtaaaggacgacgaagccgcaacccgcgctcgtgaagaggctgccaagaaggaatggctgaacaacccgatgggttacactaagtctgtccttcggtctctcggcatgggccgggagcgtcgcaagggccgcccaaaaggacgaagactatgatgctcgataccgccaccgaggcgggcaaaggcaccctcgccgtcaccggcgtggggattgccgtttactcgccctatgagatcgccagcctctgtgctgcggtactcaccgcgctctacgtgggcgctcagctcatcaccctactcccgaagatgctcgatagcatcgcggagcttcgccggaggttcaagaagtgaacaagcccctgcgcggcgcagcccttgcggctgccctcgccggccttgtcgccctggaaggcagcgagaccaccgcctaccgggacatcgccggcgtacccaccatctgctctggcaccactgccggggtcaagatgggcgacaaagccacaccggagcagtgctaccagatgacgctcaaggactaccagcgcttcgagcgcattgtcctggacgccatcaaggtgccgctgaacgtcaacgagcaaaccgccctgacgttcttctgctacaacgtgggtccagtctgtacaaccagcacagcgttcaagcgcttcaaccaaggccgcgccaccgagggctgccaagccctggctatgtggaacaaggtcacgatcaacgaccagagggtcgtatccaagggcctcgtgaatcgccgcaacgcggagatcaagcaatgcctcgaaccatcgtcgcaatactcgtccttgctgtggtagccctgggagcctcatacggcttcgtccagagctaccgagccttgggtatagcccaggaggagatcaagcgtcagacggcccgtgcggaggccctggaggtgcgttacaccaccttacagcgccacgtccaggaggtcgccgccaagaccaacacccagcgccaggaggtggaccgtgccctggaccagaaccgcccgtgggctgaccggcctgtgcctgctactgtcgttgacagcctgtgcaaccgccccggcgcccgctgtgctgtgcgaacaccctctgattgaccctaccacccaggctggcctaatccgcgctgtagcggcctatcaggacgccctggacctatgcaacgccctgaatcaaggagactgacatggcgaacacccgtgatcaatacctcgctggccgtaacaccggcctgaccttctaccaggtctgccagcccggcaccgacaaccgcatcgccctgcacgacatggacgaggccgatgtcaaggctaaggccaccgctgtgattgcagcagcctctgccctgggcggcgagggtggcgctactccaccggacccgctcaccgcctacaaggtgaagaacggtgacaccctgcccgtggacggcggtggctccgtgaaggtgaccgtagccaacggtgccatcaccaaggtcgtgtacaccgcaccggcgggctgagctacagcccgtccaacctgatccacccataacacaaggaactgaaccatggcaaccttcgccgctgcaactcagaaagacctccgcgccttcgccggcaccatcgagaacctgatccgtccgctggaggaagcggccctgggttctggctacaacgagaccaagctgcgcgctgaactggtcgcgcacctcgacgagctgatggctgctgtcgagactgccaaggcgctggtctacaagtgatcgacgagtagctcaagccgagcacctgcacagtcgggtgctccactggaactactggaatttttattgagggctggctgtgggtgggagttggtagtggtgggcgggagtagttactccgggtctaattttggtatcgtcgtgtgagaaccctcccgactctgatcagcccacccttcccccgtaggccctccgcctggtgggccactgcctcgcattgcctgggtgttgcctgggtcatccctgggagcttccagctacgctgggtggtggtgggcttccctgccctgtcgctgtcctgtcgccgcccattctacgcatcctggcgggagtgtcaacccctgggtggtcggtgccttgctcggctacgctccagcgcttccgcgtggtcggctaggcggttggctcgccagcgcttcgcccactctacacctcgctccacctcggaccacttgtccgccagcatcatgcgctgccatgccgcgtcctgctgtagccatgccctgctggctctgtcctgtctgctcagcatcctctgtctcctctgtctggctccctggggcttccctggggcgctgctgtggtcctgtcgggtgatggtg

SEQ ID NO: 48 - DNA, 44470 bp, synthetic construct
  source 1..44470: mol_type = other DNA
tctaattttggtatcgtcgtgtgagaaccctcccgactctgatcagcccacccttcccccgtaggccctccgcctggtgggccactgcctcgcattgcctgggtgttgcctgggtcatccctgggagcttccagctacgctgggtggtggtgggcttccctgccctgtcgctgtcctgtcgccgcccattctacgcatcctggcgggagtgtcaacccctgggtggtcggtgccttgctcggctacgctccagcgcttccgcgtggtcggctaggcggttggctcgccagcgcttcgcccactctacacctcgctccacctcggaccacttgtccgccagcatcatgcgctgccatgccgcgtcctgctgtagccatgccctgctggctctgtcctgtctgctcagcatcctctgtctcctctgtctggctccctggggcttccctggggcgctgctgtggtcctgtcgggtgatggtgcgggagtggctggccttgcctcttgtgcctctgtacctgtggcattgccctggctctacctggctgctccctgggtattccctggggctgcctgggtggccctggccactccctctaggccacgtactctactcgcctccacctgtcctgtctagtcctgctctgctccctggagcttccctggatgctacctgggtgctggtctatctccctggctctgcctggcgctgtgctgtgctaccgctggtcctgctgtcttgcctcgccgctccctcgcctgctcggtcgcacctgcggcgctgatggactcctgtttgtccattgtgtgtgacataaccgcagccttagtgccatgcgggttccagggcgatgggtctggctggttggctgctccctgggtgggggctgtcgctccctggtaacgcaaatcctggctagctagactaagcctcgcgcatggggtctctatacgcgtgggaaggctccagggagcgcctggggaggggttgacacgttggcggtaggtctgtagagttcgccctgtcttcacgcaataccgccttcacaggcagcctggagacagggttgacacactacccgggcatcggtagagtacgcagccagaacgacgggagattgcaaccttccaagcgcggcacaagccataggcgcaagggacacggcaagctcttagggcaggaaccgcagtgtgtaaggccggcaggcatcactggggggattgacaaggtaatagatgcggtaagatgtgcggcgtcaagtggtcccgatgtacacactgtgaagggattacggcgcggtcagacagatgaccggcaccgcttgacactgtaaagctcagtcggtacgatgggcacccatagcggacgtgatggtccggggcgatgcggataggacgccttgtttataacctgaccgcaaagctgtgactccagccgataggactgacccaccacgtaaatacagacgggttgacacgacaaggccaagtcgataacatggccgccacaaagggaagcgatagcttcctggcggtagaggttcgaagcttcaccagcggtacatggactggtgcggtaggttgaccgaagctgcaactggttaggcagggtcccagggaatacctgtcgggtgctgaagactcacccaaaagagtctgagcgggaagcctccccgtccacggttaagcaaaggcacgttagtgccggtgggaacgaatagagtgtcagtgggatcgagaactagaaacctcggttaatcgcgactgacagtatgctgggtagtatcggtgggccgattgaacaaggccaggcagatagcgcaaagggtacgggggatgagtgaagacgatcccgaagagtatgcgcaggacaagccagaaccgctgatactacagggactatgccaatgccaaggtttgtcccttgaggcccttccaccgaggggattcaagagacagacctagttgaggaatgccgatggcacacttcaaggctaaggctcccaagtcgcccttcgctacccaggtagcgtactggcgggattgggaagccaaacgtactaagctcatcgcacaggataacgtcgaggggcgcaaagagcttcgcaagatgcgtgacgtgcgctacgctaccgacccggagccagcgccaggacgctaccataaccctgaacagaaagcgttcgtgaagggtagcgaaggcaaggcgcggaacatcctgaagggatggaacgctaagaagtcgcaagggaagggtttgtaatgccacgtgtgaatgaactgacgccgcgtcaacgcaaggccgccaaggctcgccgcgacaaggcacgccggattgatctagcgcacaagatgccgaaaggcgccgactgcccgatcttccgcaaggctgaacaggcgcaagctaagcagccccgcgtcgataccctgaccactccccgcagtgccggctacctggccgccgctgcttacctgaacaaatccatctgaggtacataccatgaccaacgcaatctccaaaaccgtaatcgcattccgtggcaccgaagagatcaatcgcgctatcgacgccatccgtgtccgtggcaaggaactcgacgaagccatccaactgaccggcctgtcgatcatccatcacatcgaccagtgtggtgacgtgaccgtggtcaaggcgctgtatgaagccatgccgaagggcagccgccgcaatgcgctggtcgagtggctggtgctgcacggcaaggtacaggtgaataccgacaagaagtcgaacaaggacctgcccttcctgtacaacaagttcggcaagaccgatctcgtaggcgccaccgacaacccgtggtacagcttcaagcctgagaaagcgctggaccaggagtttaacctggccgctgccctggccacgatcaaaaagcaggtgctccaggctcagaccaagggcaaggtgatcgtcggcatggaactgctgggtgatctggaagcgctggccgccaaggctgcacccatcgccgagcagagcaagcgcgctgccgcccattgactcaagtcgaacgcctgctaagcgggcgttccgctggaatcaatgacaactggagaaacacgatgagctttaagcaacgtctgcaacgtcaaatcgccctggcccaatacagccgcccggctcagttcccgtacggcgagcaggccgtccaggcgaagggagagtgaccatggacttctggattgccctccccttcctcgaactcggcctcaacctcggcgaggatgaactgcgcatgttgtggttcagcggcctgacggtattcttcatccacctcctgaagcggtgactcaagtcatggccctggcgggcgaccctcgcctactccggggccatcgctggactcatcacaagcgagaactaaaccatgcaagctttgaatactctgttgatcgcaatccccaaggacccgtcgaacgcattcaatgcagccgacaaggtgctgtgcgcccatggcttccgtatgggtgacctgaataccgcgcacgtgctgacccctggcgggttcgtagtagtgggcgccggcgtgaccgtcaaccgctacgacgaagcgtatcgtatgagccggaacctcgattccgaaggcttcgacgttctgctggtccagggcagtccactgtccgggcacgtcacctgccaggcgtacggctggatcaatgcggaataccgcaagggctgcgcgaacgggcgcccgatcttcgacattgcaggaacctcgtaccatgtcctcgcgtgatccctaccgtatcggccaccgcgtggggctggtgaactacagcgaccgctacctaggtgccgacgcggcaggcaccaagggcgtcattgaagccataacccgaccgtcccgctgtatgacgatctatcacgtacgctgtgagcggaccctgcgcttgatcgaggccgaggcccgtaacgtgcgattcatcagacagctaccgacccgcaaatgacgtggcgcataatcgtcgtcagcccatcaagcggctgcgccttcgtgtggagtctcaagcggcctgtgcggccagtgcgattctactcccgcaaggcagctaaacgctggctccgcaagcaccgccgacagggcttgcctggccactactacctcatcgtgaactggagcaaacgcctatgaatcctacttacgtcgtccgcctcaaggacggaaccacccgccaggtagtcgccgacagcatcgtcaccggccacgccttcgtcgaactctggttcctcggcggggcggtcgctatctacccggcctgcgaagtacaggaggtccaccgcactgacctcgtaaaggagggtggtgatgaatacccgcactgtatacgtcaagccgcacagttcgaggtgcccgccggtattgtccgcaggacgcctgaccccgggtgaactctaccacgtgatcgcacctgccgaggtcgaaggcgtcattgtgctggcaacttcaggcccgtggcacatccggtccgtggtggtgcatagcatgcacccctcggtatatcccgtagggatggctgtcactgacgattcctggcggttccgccgcctgggtgtgagcgagtacgtccaactaattcaagggtacgaacaatgatcgccatcctgttcgtactcggtctgtactgctgcctcggcctgctggcaggcgcctgctactgcatcgcagtggccccgccattcgagaacccgacggaagtgcagttccaggacgcatgcgtgatcgggtgcatctggccactcgtgatcctcgtcggcatattcctggcactccgtgcagtaggccggggcctgctgaccgggctgaagcgtcacctgaacatccaataacctaccggaggtaacatgatccgcacccatacccacaacaccgaccgcgaacagcgccgcatctacaagctcactgagctgacgtcgggtgagatgtacagtgtagtgcagcccgagtccaagcgtggcacgctggtggtcggagtagcaacctgggatagccagagccgacctgtagtgctgcccgtggtcattcacgatgtgggtgcgcatccctcgccctgtcccaccgtgctgcgcaacgacggctggcgcatggtgcttgccgccaagggcacccaggtaacactcaccgccgagtgaccaaggcgaaggctggtgcgccagccttccaccgtggccattccttgccgcgaaccaactcaaccgaggagctacaacatgaccaacgtcaacaccgccaccaccgagaccaccaccgctgctgccctgggcgccaagctcatcaagaagccggctaccgtggaagacttccgcaacaacgtggtcttccatcacaccgccctggccaagctgaccgaagtctacaacgaggcggtcgttgccctgcaaaccgccgagcgcctgtccagcctcgtcgccggtgacgtgatcaccttcgaccacggcaagggcgagaaagccgaagtgctgagcggcgaagtcatcagcgtggttgccggcgtttaccaggtgctggtccgcttcagcgacagcgcacctgccaagctgctggacgtgaaggccagcgccatccgcgccgtccagtcgtcggcagcccaggctgctaccctcgacgaagccatcgcccagggcgagtaaggcccgcacgtaataggcccggccctccgggcctattgcgagctagccataccataggaggagtcaccatgagcaagcgtaaccccgagcacatcagcggcgccgtgcgtagcgtcagcgtccagaagtcggcagccgtccaggaactggaggatcgtctggagtctgccctggccgtgtgccagcagcgggcggaagacatcgatctgctgagccgccgtctccaggccgccgagcgcgcccgccgctgggagatcgacgagattcgcaaccaccaggcgaccatccgcctgttgcagaacgacctgaacgctgcgcatgatgcccacgaggcacaagagcgccgcgctcgcaaggcaaccatcatggcctgggtatgcctgctgaccgcaggtttggccgtcaccctgaaactggcaggagtctgaccatgcagtgcaacgacctttacactaagctcgcagcgagcatgttcaacgtgccgtgctcccaggtgaccgccgagatgcgccgcgtagccaagagccgggcattcgcgtatgcttacactcccaagcgacaggcgtcgggtgggacgtacaccgcccgcgtgagcggcgtcacctgtgacggtggcaaggtggaggtacgtctggacaacgtggagcgcgccgacacctgtggctatgccaagctggaggcgctggaagcggtcagcctgtaccagggtgccgcgaagcgcgccgatgagtatgaaaagctactgctccaggcattcccggtggtggctaagcgtcgtgagcgcttgcgtatctccgggccgctgtcggcggaagacttccgggcaaacctgctcgggacgtgttccgcatatcggaatgccctcgacgccatacggggcgagattacctcgaccggcccgttgcggaaccgcatatgggcgctggtcgaacgtatgcaccgggccgagacgaagctcaggaatgctcagtcggagatcaaccgcctgcgggagcaggaactggaccgcctccgcaaggacatgtccagctactgcgccaacgacgttacctctacggtgagtgcagcatccgcgaaggataccctacgggtggcaaccttcgccgccgccctcgccggtggcgtcgtaggtagcgccctgatgttcctgctcagctagggcgaccagggcctactccggggtcaaatctgagggcgttcctagagcgccctctcgtgtgagtctggaggatcacgaacatgcaataccatttcacgcattacaacggataccgcttcggcgtcgagctggaagacgaggctgtcttcccgtgcatcgacggtaagcgggcgacctgggacaaggtggcggcgtgtgccggtagccttgtgcattacatggcgcaggacctgattgacttcggccagcgcaagttaagggagatcgaagatgagcaagacgagcctgtacccgctgagcctgcatcccggcctgattcaaatcaggacgattcacgtattcagcattcaagctccgagcaacgccgagaactggtggcaatggttcctctggcagcggaagtaccacccgctccgggagagcctgagtccagccggggaactgagtgcgagtatcgccgagtgtgtccaccgcctccgccagagtggctggcaagatagcgacatctggcgcaagaagggaggcgtgctggccctcggtgccttcgacctgtccggcctgatggtgggttcctgcctcgtagtaggcggtgagctgaaggccctgtgcgttgatgaccggcacagcaggcagggtatcggcgctgagctggtacgagctgccgagctggccggtgctgagcacctgacctgcttcgagttcctggagccgttctacgccggcttgggctggcgcaccgagcgccgtgaggcaaactggactgaaggcgagccggatgtgctgtacatgagggcacctggccatgacgcatgaggtgatggtatggcttatcgcgaacaaaccgctggtcatcggagtcgccttcagcctggtggccctgggcgtgctgctcacacagaacaacggcggcccgcctatggcgcccgcatgacctggcacctccaggacatgttcgaggcccgaggtgggctgaggcccttgtgggaggagtggtatcaatggcactgcgccgcgactcctggctaaagcaagcgcaatccctggcagtcggccaggcgggtcgattccgccacgtcctgggatgccagagcatgagccggggcgggaccaacatgacctgcaagaacctgcctgaccgctgggtggcatactgctactcctgtcaggaaggtggcgtggtcgagaaaacgcacgtgcggagggtgcaatgcgcggatcaagaacgcttcatgccctggcccgaggatgcctcggactggacgcaagccgactgctatcaatcgctatatggtttgctgctgtccaagggcatcgactacaacgtgatgacgccggggctgccgctgctctacagcgaaaggcagcatcggcttatcttccctaccgacgcgggctggattgggcgcgctactgccgaccaaaatcccaagtgggtgggctacgggtatcctgccccggactaccatggatggccccaggaatcatcaatgggcaggccatgggtgctgacggaagactacttgtcggcgctgaaggtgcggtgggcatgtcccgaagtcttcgctgtcggtctgaacggtacaaggctgcgcgacaggctggcggcgatcatgttgcagcagacctgcaagcgcgccttcatcttcttggatggcgaccgggcaggtgtccgtggtagtgcaggcgtgatgcgccggctccggtccctgcttatcgaaggccaagtcataccaacgccggacgggttcgaccccaaggacctgacccgcgagcagataaggagcctagtaattggacgtattgacgcttcacgcactgagtgaccgggaccgcttccgcacgttgcggagtgtggtgcccgaaggaatgatggggccggagacgtgcttcgtcatcgactggatcgagcagtattggaaggtctacccggtgcatcagaaggtagacccgcaggcactgcgcgaactgatcaagctgcgaggtggctaccagccagagcaactagcggtggtcctgaacctcgtcaaccaactggacaagccggtggacccggactcgctacagggcgttgtgtcccagctcaacgaactggatttctcagggcgggtggatgccctcctggcgcagtacaaccagggcgaggacatcgacctggcgtatgagctgcgccggctgagcgacgaggccctgcgccgcgagggggtcagcacgccgaccgactacgtgacggacgacgtgtttgatatcctcgcggaggagcagggtgaccacggcatcaagctgccggggctggtgctgccggcgtacatgaagggcctccacgccggggcctcggtgctggtggcggcgccgcctgatgcgggcaagacctcgttcatggcctggatcgctgtccatatcgcgccgcagctcaagcggtacttcgacccggggcggcccatcctgtggctgaacaacgagggcaagggtcggcggatcaagccgcgcctgtactcggcagccttgggcatgaccgtgggcgagattcttgccctggacccggaggaagttcgcaggatgtacgccgagaaaatcggcggcgactctgagctgatccgcatcaaggacttccacggtgggtcgctggctcaggctgaacaggtcatcgacgcgatgaagccagcggtggtgttttgggacatgatggcccacgtcaagggcggccagcgcaaggaccagaaccgtaccgacgagatggagtacaaggtggctgaggtccgcgagatggcggtacggcacgacttcatcagcttcatgacgtggcagattagcaacgacggccacgaccagttgttcccgccgcagtcctgcctcaaggattcgaagacagcggtacagggtgctgtggacgtgcaaatccacctgggccgtctcaacggcgcggatcaacaggtcatgcgtggcctgtccctgccgaagaacaagttccagatggacgggaagccttcgaacgtggaggcaatgattaacttcgacgccgcacggtgtcgtttctttgagagtgtggatcatgcaagctaagcatagccgggtgctcgaaggcaccaaagaaattccgctgggtagcatcgcactgttaccgggcaccgtcgcgggcctgctgctgtgcctgtactccgacgcaactcacgaggagggcgtcgccttggccggtgggttccctcgcgacttgctgcacggcgccactcccaaggacgtggatgttgccctgtacagcatgacctgggggcgggcagagcacctgatccagaaggcactcccggtcctgaaccccatcttcgtccgggatggtgggtggcgctcggactacgccgatggcggcgacggtggtatcttcaagggcgtgatgtccctcgtgggctgccgtgggttgaatggcatggacttggactttaactactacgacgccgacagcctcggtcgagtgatggagtcgttcgacttcaccatcaaccaggtaggcatcgcgtacaactggcccgaccccgaaggcggtccgcgcctgggtgcgtacctgcacaaggacgttacctggggcgtgaacagggaagtcggtaacggctcgcgactgccggagcgatgcgagaagatgcgggccaaggccgcgtattacggatgggagaacgtgtgatgagcaagcgcgacgtggtactggatatcgagaaaggcatctggcgcggcgtagaccagaacgacaaggccgtcgaggccatcatcaagaagcacgggtacgtgatcgtcgagcctaagatcgacgggtgccgtgccatcgtcggtgcgcatggcgtggtgtcccgaagcgggcgccgcttcccggccctggatagcttggaagaccgcatcatcgatcgactggcccgccccgggctggactccggcctggtgctggactgcgagatgtacctggccggcatgcccttcagcgaggcgactggccgcatgtcgcgcaagaccccactgaccgaggaagagctggggtgcctgcacttcgcggtgttcgacgccacccatatagacgtgctccgcaaggcgcgcacctcccacctggtatacgaagagcgccgcgccatggccagcagcctcctggcagcttgccgcctcagcgacactccgacgttcttccaggtaggctcgcaggtgtgtcggtcgatggaggaagtcttaggccggtactccctccaccgcgccatgggcttcgaagggtcgatggagaaagacccgagcatggtctaccgcaacggcaaggtcgccggctgctacaagcgcaagccggagatcaccgtagacgggcgcatcgtaggctacgtgccgggcaggaccggcaagaacgctggccgcatcgtgggctactatgtcgagttggaagacggctcgggcaccgtggccgccaccggtctgaccgaggagcacatcgagttcctgacccgtagccaatactactcgaccgtcaacgacacgatgccaaacttcggtcgcatcgtcgaggtctctgcgatggaacgctcggccaacaccctgcgccatcccagcttcagtcgcttccgcgaccttcccagcaatccaggagtcaaggtatgaagattcgaaagtcccgtaaccgcaactacccggaagatatggtgtaccacgccaccaaccgggattcactgctgtatccgaagtacgtcatgggttccgtgttcatcagccaggacggaacattccgcatctgcgtcatggcagggacctgggaccacgttgggtccgaagttctgcatcatgcacgggacatccaatcccttggcgccggtcgccgtaagttgcaccgggtcatgcgacggctgcgccgcaatctgcaacaggtaggagtcaaggtatgagaatgccaaccgaagaagaacgcacgatccgctgcctgctggcagatatccacgaacccttgaacctgctgttccccggtatccgtgtaaaggccgagacaatgcccttgggctggggagatagtatctgtgccctggtactccgggtgagctacgaacatcgcacgctgggtcgcctggagtacctgcacgaggtccccatcctgcacctgacgcagtggggccgggacggcatgctccagcacctgatgaacgagattccccgtcgggtgctggatggcatgctgcgccaggcacagaaatacagccagagcaactggtacagcaaatgacgactatccgaatcctcgacctcgaaaccgagagctacgagcacaaagggcgcaaagcgtcgccctttgacccccgcaactatatcgtcatggccggctggcgtgacgatgttgacggcaaggtcggccagaaggtggagcatcgcttccgcagccgggccgaagccgaagatccgaacaaccgctggttcaacctcgacggcgtggacgtgatcgtagcgcacaacgccatgttcgaatcgaactggttcttcacccgctaccgggacgagtacctggccttcctgcgacgtggtggccgggtctggtgtacccagcaggccgagtatctgctgagccatcagacgtggctgtacccggcactcgacgaactggccccgaagtacggcggcacccacaaggtggacggcatcaagctgctgtgggaccagggcgtgctcacctcggagatggaccaggacctgctgagcgagtacctgtccggcccgtgcggcgacatcgagaataccgccctcgtattctacggtcagttgatgaagctccaggcccgtggaatgtgggctggctacctggagcgctgcgaggccctgatcggtttctcggcgatggagtgcgccggcctgaaggtggacctcgaagtcgcccgggtgaaccacgccaagcaactggaagaggtggccgggatcgaggctgagctgaagaagctgatgcccgacttcccggaatacttcgagttcaagtataccagcctctaccatatgagcgcatggctctacggcggcgaggtgcggtacaagggccgggtgccctacgaagatggccggatggagaaagccgacttcgtgcgcttcggcacggccaagcgggggactcctatcgagagtacctcggtgcgggtcccgatccacgaagtgaccaaccagggtgagtggcactggcccaccatcaccgagctggcgaccaagcacggcccggtcatcacgttctccgccggcaagaacaagggcagcgtcaaggtgttccgtgaggatacggacatcccggcgaccaagtgggacgatgaccagcgattccgattccccgggctgatcaacctgaacaacctgccggaagtggtgcgcgagaaattcctaggcaagcgcccggagttccagtgcgccctcaccctggcggatggatcgcccgtgttcagcaccagcggcgacgccctccaggctctggagaaacagggcttcgaggcagccaagctgttgatgcgcctggccgagttgcacaaggacaactcctcgttctacatcacccacacctacaacaaggatgggacgatcaaggacacgaaggggatgcttcagtacgtggacgatgatggtatcatccaccactcgctgaatacgaccgcgacggccacgacccgactgtcgtccagccgcccgaacctccagcagctcccgtcaaaggacgaagacgacccggaagccggcagccgcgtgaaggagatgttcgtgtctcgcttcggcgcggacgggatgatcggcgagaccgactataccgccctggaggtggtgatgttggcggccctgtcgaaggaccggaacctcctggcgaagctgatggccggcacggacatgcacttgtaccgcctggcagggaagcacaacaactggaacgggttcgattacgaccagctcgtggccatcaagaaggaccccaaccatccgtggcacggtcgcatgatgcaggctcgaaagaacatcaagcccaaggcattctcggcgcagtacggtgcgagcgcggctggtatcgcattcaacaccggctgtaccgtggaagaggcccaggaattcctggacaacgaggcggccctgttccccgagtccatcgcattccggcagatcgtccgcgacagtgcagaggccaccagcctcgtgatgtacaaggccgaggaccagatgccggcgggcgccttcagcgagatggggtcggatggtaactggcgccagtaccgccgaggattctggcaagcgccgggaggcacctgctacagcttccgccaacaggaacgctgggacaaggaacagcgcaagacggtcatggacttcaaggacacgcagatcgccaactactggaaccagggcgaggctgggttcatgatgaccgtgagcgtggggcgcatcttccgttggatgctgcatcgcccgggattcatggtcaccgagttcctgatcaacaacgtacacgatgccgtgtacaccgactgccacaaggacaccgccgccgaggtcaacaagggcgtgcgcgacatcatggccgacgcggcccgctacatgagcgagcggctgggctacgacatcgccgacgttccattcccggcagtggctgagatggggccgaacatgttcaatatggaggtgatccagtgaaagaactgcatccgctgcacacgcccgagttcgtcaaaacattcctggaccagaccgggtgcctgcctggggtacgccgtacgggccgcaccaccggcattgctctacaggccatcggcatggcgctgtcccatccgagggaaaccctgacgttcgtggaccacccggacggcagctcggcagcactggtggccagcattgaaaccatactggcgaccctgggctaccggaacgtcctcgttcgacccacaacccgtgcggacgggcgcagcgtgaacatcgtcttcaagacgctgccgaacgcctgacgaccttccctactccggccttaaatcttccttcgacacaagagagaccacgtatgactcagcaactcaacgctctgcaagctgcactcgccctggccaacaaggctgccgagaccgcaaccatcgacatgtctgaaacctccaccggcggtggcggcggtcgaatcttcccggctggcaccgccatgggccgattctgcatctacatcgagctgggtgaccacgccaaggaattccagggcaagctcaagaacccggcgcctcaaatccgcctgggcttcgcactgtggggcgacgtgaacccgcaggccggtaatccgcagagccgcccggacgacctgttccacacctacgaggccgacggctcgatcaagcccggcctgttccgtaccttcgagatgaccctcggcaacaacgagaaatcgaagaccaagctcgccttcgacaagatgaactggagcgggcagcatacccacttcgctcagatgctcggccaggcgttcatcatcccgatcaagcgcaccaagatcaccaagggcaacaacgccggcaaggaacgcaacgacatcgattggggcggcatcatgaagccctacaatccggtcgatggcagcccgtacaacgtgccggaactgccgatggacctgttgcagtatttcttcttcgacgcgccgaccaaggagacctgggacgccctgcacatcgaaggcacctcggacaatggcaagtccaagaacttcctgcaagagaccattcgctcggccaccaacttccctggctcggccctgcacatcatgctgggcggcggcgacgatctgatcatcaagccgacgacccaggccgcaggcagcaacctgccggcagtgcccaacgtggccgccgatgcaggcgtagcagcagcccctgctgtcccggcagttccgcaggcagtgccgcagacggcccctagcgtgccccaggtggcgaatgtagctgcccctgtggtaggtactgccgaggcacagaacgtgctgcctgacgtaccgcaggtggctcaggtggcagctccggcggcggtcgaagtcccgtcggtcccggtagtgccggcagtaccgcaggtctaatgcgcctgccatcggaagagttcctggcaggactatccgcgcagttcgaccgcagcatggcaggcgggacgttggtgtgtgacgccgacggacccgcctacgtggctgcggccactgctaagaccttggacactgcactccggagattctggaagctcattttggagcagcagttcctagcgcactgcacggggacacgggttcacctcacggcagcaggtggggcgaaggcgtaccgggacacgtatccgaccatgaaaccctaccagggccagcgcaagggtaaggcaaagcccgcgctgctggagcctctgcgacgggccgtggcggacgtgcatgagcgcggcggcgcacccgaagggatcgatgtcatcctgcacacgttcttcgaggcggacgacggcatgatgatggacgcctacgccatgcaggacaaggccatcatccggtccgacgacaaagacctgcggatgacgatctacccgtattgggagatcgacacggcgtgtgtgagcaggatcgaaggcggcttcggctacctcaaggaggcatacacgccttccggccagttcaagctcaagggccacggacggaagttcttccttgcgcagtggctcggcggcgataccgctgacaacatccgagggatcgatcgattcaacgggaagctctgcgggatgaagacggccttcgatatcctccacccgatcacggacgaggatgaagccatcgacatgatcctggaggcgtacgccaagatcaagcaaaacccgctggcagaggccgaggtgctgtggatgcgccgaacgcctaccgacaacgcagcgcagtacctgttaagccgcgaccttcgtccggccttccgccagtggatcatcgagctggacgcctaccacgaggcgctgctccagaagcggagggagagtgactatgacgagtgagccgaaggtctaccagataccgcgcagccaacagcgcaccttcaccctgaagctgtgggccgagcagggcaagctatgcccgctctgcggtaagcccatcgatatcagcgtgaagggcgaggcggtgatggaccacgaccacgagacggggctggtgcggggcgtcctgcatcgatcctgtaacaccgcagaaggcaagatcacgaacgcggcgggttcctggggatgcaagtcgatgaagtacaccgacatcatcccctaccttcgtgccctcctgacgtacctggaggggccgaagcatccgctgatctaccccctgcacaagaccgacgaggagaaacacgaagcgaagctggccaagcgccggcaggcagccgccaaacgcaaggcggcgatggccgtcgcaaagcacaacgcgaggaacgtatgagcaaactccgcaagcaattcaccaatgagtacctgcgcaacgtctatgtcgagctgggtctcaagaagggcgccgagcatctgaccaggcattcgcgcttcggcgaagtgagccgccagtgcttccgcaactggtgcatcaagctgggcttccacgacagcaggacacgcggcacgtacgccaagaagggtgcgctgcactggctgggccgaaaggcggccgaggtagtgcgcaagttccctggcgccgtgggcaacgtggtcggccaagggccgaaggtgttgagcctggacatcgagacctcgcctatcgagggctgggtctggtcgctctggaagcagaacgtgggcctcaaccagatcaagcgggactggaccatcctgtcgttctgcgcgaagtggatgcacagcgacgaggtgatctacatggactgccagggcgaccccctggacgacatgcacctgctggtcgccctgcacaagctgttggacgaggccgacatcatcatcgtccagaacggcaagcgcttcgacgtgcccaagatcaacgcccggttcttcctgaacaagatgccgccgccacgaccgttcaaggtgatcgacaccttgatcatcgccaagcagcaattcgcgttcaccagccgcaagctggagtacatgacccacaaggcatgcaccatcaagaagcgcctccacggcaagttccccggattcgacctgtgggcagcctgcctccaggacaacccggaagcctgggaggagatgcgcctgtacaacatcgacgacgtacgatcgatggaggagctgtacatcctgatgcgcccgtggttcgtcggccatcccaacgtggccgtgtacttcaacgacgctgagccgactatccgatgcccgaagtgtggcgacacggatgtcaagcaagaaggctgggtgcatacgcagaccggcaagtacgagcactatcactgcggtggctgtggtggctggagccgagggcggtatacccgcaacacctcggaacagcgcaaggccctgctgagcaactaaggaggctatatgagcctggcgttctccgatccctacgaatctacgggcacccagcccggccagtaccgcaaaggcgcggccccggacgagcgaaaggccggcaagctcccgatgcacctggtggttgaaggcttcccgctgctaaagcgggagcttgcccgcatgatgcagtgggccgccgaggtcaagggctacaagccccacgactggaagaagatgtcggtgggcgagttcaaggccgcccaacaccggcacgaatcccaccgcctgctggacgggccgctggatgacgagtcgaacctgatgcacctcgtgcatgaggcattcaacgcaatggccgccgccgagcgtgccttgatggaccgggagaaaggcaatgagtaaaatctgttggtgtacccgaccgcacgagaccgacgaaggtgtacgtgtcatctgggccttcaacgagcggggcatcggggtaaactacgtcacggcgtacgtcacgccggcgatgatccaccacccggactggcgcgataccatcctcccggacatcctccaggagatggcggagcgcctggaccgcgaggttaagctggtggaattgcgctggttccgcgctgagattctgagctgcggggaatggcgtgactaccgagcaatgacgctggacggggcggtcagcctggccgaggccgagtggggtcccgaggatatcgggcgcgtaatcgaaagacgataggagacggaatggacctgatacagcagcagatcgcccacgaagaggcccttgtcggggcggcgcagaacgacgcccgcattgccttggaaaaggcgatagcccaagggtccatcgaccgcatcccgagggcacgcatcatgttgatgcggatgctccccatcgtgaccgaagcgatcttcgcccaccaggaagcgaaggcggcgggaccggcagcgaagctgcgacacctgctgcggatcatcgacgcccaggacctcgcggtcatggcgctacgggccgggctgtcgatgctcatcaactacccaacgatcaccgcgacgaagtattacacccatatgggcaagatgctctgccgcgagatcgaagtgcggttggccttcaaggtcaaccaaccctattacgaccggacgctggactacctcaagaccagcaggactcgcagcgtccggcacatccagaagacgatggacgcccttctggacgcggtactgcccgaggaggcacgtatcgacctgccggatggcgactacctgcgtctcggcaagttcatcggtgacccgctgatccaatgcggcctgttcgagccgaaccgcttcacaggccggggcggtacgagcgtccacctggagccgtcgccggaggccaaggagttcctgcaagacccgtcggcggcgatgacctggggaggcccaggccgtagcgtaatgctggcaccaccgagaccctggaacgactggtgcgatggcgggtactacagcgccaaggcgcagaagcatcacgtattggtgcgtcgtaccaaacaccagaccaagcgggcacgtcagatgcagctccgccacctgggccgggacaagatgcccaaggtatacgcggcggtcaacgcactgcaatcggtggcctacgagatcaaccacgacgtgtacgagatcatcgagcgcatcttcacttccggcggcggcgtgctgggtatcccgcagcgtacctacccggacaaacctgagttcccgctcggcgacgagtgggccaaggagaacgccagtgaacaagagctggaagccttcaaccgatggaagcgatccgtccaccgatggtacaccggggagcgggagcataccgccaagcttcgcgaatttgctgcactctaccgagttgttcgagagcatcatggcaaggcagtgtacttcccgatgcacgttgactcccgtggccgcatgtactattggggcacaccgaatccccaagggtccgacatcgccaaggcatgccttcagttccacgaaaagcgcgccctcggcaagcgcggcctgtactggctcaaggtccacgtcgccaactccctcggatgtgacaaggtgtacttcgacgaccgggcagcctgggtcgatgagcgatgggacgacttccagcgagcactcgacgaaggcccggagaactatccgaatctcttccccgaagacgagtcgcccctgtgcgccatcgccggtctgctggagctgcgggcggcctacgcatcaggccagccggagaattaccgaagtgggttcatcgtccatatggatgcaacctgctccggcctccagcactactcagccatcctccgagacgagatcggcggagcatacgtcaacctgttgccacctggacttgccaaagctgacatctactcccgagttctcggtctcgttgcagagtctctggcacgagacatcgagagtgctgaaggcgaggctcggggctacgctgtactgtgggataaggccggtcttgccaggagcctgacgaagaaaccctgcatgacgctggtgtacggaaccacgttcaagggtgttgtggaccactgcctggactacctggacgagtccggcctggagattcccgagggtatcccgtcataccgcctgggaagctacatggcaacgctcatactggacgcaattcgcgagacagtaccatcggcagtcttcgccatggaatggctccagcggctcgctaaggcccttcctgacgcatccaaggatttgcactggaccacgccactcggcatgcaggtcttccagtcctacccgaagaccgaggaggtccgggtgcggctgcgggccgaggctgtcgagtacgtcaccctgtacgaggccaaggacgagctggacccggtacgcaacgccaacggcatcgccccgaacttcgtccacgggctggatagcagccacctgggcctgacagccctggcatgcgcggcggagggaatcccgatccaggccatccacgacagcatgggcacctatgcggcagacgtggatcggatgcacgtccacatacgggagcagttcatcgccatgtacagtggcccctgtgtgctcgtagagctggcaaatcagcttggggtagaggctaccccgccccggaggggatcgttgaatctggaggctgtacgggactcctgggcgttcttctgctgaggtggattatgtcacccacataggagcaagtgcatccgtccaaggccctcgtagagggagcggggagagaggagaggtcagggaagacctggtagaggagaggtggagatgagaatggatgactacgaaggattctagatagaatagactaaccagcataggagatatgatagatggctactatgaagacccaccgccctacggttatgtcacccacagtggaaggatcgagaacaggcaagggtacggcccgtcctgtcacgttcacctctcagcagatcgagtggttagaacagaccttccccgaacatcagatcggtcctggaaccacgatggaagacatccagttccaggccggcaggcgagacgttgtgcgagcagtacgactgcgccgacgtgatgccatcgcagtggagctgaagtgatgagtaagtccatctggcgagtacacgcaaaggccggcactccctcggaactccagggcctgtgctggctggcaatacaggagctggaggagttcaccctcttccgctcgaaggacgacgccctgaatgcgatgctggacagtatcgagggcaacgatcgaaccgagctgttggtattccgcgatggtcagttggccggcggtgcctgcatcgtgttcgaggacgacccccacgtcggcccgtgcgtcacagcacagtggcagtacgtcctaccgcgctaccgcaatacaggcgtggtccgggagttcatccgcgaactccaccgtcaggccggctggggtcaaatccccctcgtgtgctggagccatcgtgaaagcgatagccggtacacgatccactaccggagagccaagccttatgggcaagaaagtcaagaaggtgctaggcaagaccatcatcggcaaactcgctgatggcctgctgggcaccgaccttagcggcgcacaatccgatgcccgcaagatggaagagcagaaccgcctaatgcagcagcaggcggaccagctcgcacgaaaccagcaggttgacctcaccgccgagaacgtggcgcaggttgacctaggagcgatggccgatgccactggcaccggcactcgacgacgccggaatcaggcgggcacaggcgtatcgcaaaccctcggtatcaactactgacgaggtacgccatgaaaaccaccgcagctatgctgtgggagaaacttcgggatgggagcgtggagagtcgagccatcgagttcgccaagaccacgctgccctacctgatggtcgatcccatgtccggcagtcggggagtcgtagagcatgacttccagtccgccggcgccctcctggtgaacaacctcgccgccaagctggcgagatcgctgttccccacggggattccgttcttccgatccgaactcactgatgcgatccgccgcgaggccgacagccgggacacagacattaccgaagtgaccgctgccttggctcgggtggatcgcaaagcaacacagcgcctgttccagaacgcctccctggcggtcctgacgcaggtgatcaagctactgatcgtgactggcaatgctctgctgtaccgagacagcgccgccgctacggtggtcgcatggtcgctccgctcttacgcggtgcgccgggatgcgactggccgctggatggatatcgtcctcaagcagcgctacaagtccaaggacctggatgaagagtacaagcaggacctgatgcgcgcaggccgcaacctgtccggttcgggcagcgtggacctgtacacccacgtacagcgcaagaagggcacggcgatggaatacgccgagctgtaccacgagatcgacggcgtgcgtgtgggcaaggagggccgctggcctatccacctgtgcccgtacatcgtgccgacctggaacctcgcccctggcgagcactacggtcgcggccacgtcgaggactacatcggcgacttcgccaagctgtccctgctgagtgagaaactcggcctgtacgagctggagtcgctggaggtcctgaacctcgtggacgaggccaagggtgcggtagtcgatgactaccaagacgccgagatgggcgattacgtgccaggcggtgcggaagccgtccgtgcttacgagcgtggcgactacaacaagatggctgctatccagcagagcttgcaagccgtggtcgtccgcctgaaccaggcgttcatgtacggtgccaaccagcgcgacgccgagcgcgtcactgccgaggaagtccgcatcactgcggaggaggcggagaacacgctgggcggtacttactcgctcctggccgagaaccttcagtcgccgctggcgtacgtctgcctgtccgaggtggacgatgcgctcctccagggcttgatcaccaagcagcacaagccggctatcgagacgggccttcccgccctgtcccgctccgccgctgtgcagagcatgctcaacgcttcccaggtcatcgctggcctggccccgattgctcagctcgatccccgcatctcgctaccgaagatgatggatacgatttgggcagccttcagtgtcgatacctcgcagttctacaagagcgaggcggagctacaggccgaggcagaacagcagcgccagcaggccgcacaggcccaggcagcgcaggaaaccttgctggaaggcgcttccgacatgaccaacgcactcgcaggagtctgatagatgacccaaccgaacgaacagcaactgccgccgggcctcgctaacctggttgccaacgtaccgcctgccgccgcaccgaccccgagtcatgtgcaggtgatgccgaacccggtgatccaaccgcaggccccggtccagcccggccaggtaggtgcgccgcagcaactggccatcccgacccagcagccgcaacccgttccgaccagcgccatgacgccgcactaccaaccggtagcggcacctgccgtgggtcaacccgttgttccgcaagcacccgctcagccggccccggtagctccgccggctgcgggtgcagttcttcccgagaacctggaagtcccgccgccgccggccttcactcccaacggggagatcgtgggcaccttggcagggaacctcgaaggcgacccgcagttggcgccctccatcagctatctggaggcgttctctgacaaactggataccgtccgagccttcggcaaggccgccgagaaccgcgatcctcggttcatcgacgagcactatctgaaggaagttctcggcccggcccaggcgcagcacgtcatcaacgtggccaagggcgtcctgacctatgtcgatgcgcaaaccaaggctgtcctgaaccagacctatgccgccgtcggtggcgaggccgtgctgaagcaggccgcaggcgtcttcaaccaacacgctgacccggccaccaaggccgccatcggtcggctgatggactctggcgatgcccaggccatgcagtacgcagcgaagcagatcattgccttcgcacaaggctccggtgccgttgtacaggctaccggccaacccctgggtgctgcggcacctgcactagcagccctgaccgctgagcagtaccgcgcagaagtgtcgaagctgccgctgaacgcatccgaagccgacatggctgcactgcgagagcgccgtaaggcaggcatggcgcagggtatctaacgaccctgccctactccggccttaaactcacatccaaaagagagagaatcgcatgagctttctgaacgacctgacccgtccgaactacgctggcaaggacgcggacgttgacatccacctggaagagcacctcggcatcgtcgacaagcacttcgcctacacctccaagttcgcaccgctgatgaacatccgcgacctgcgtggctcgaacgtggtccgcctggatcgcctgggtaacgtcaaggtcaagggtcgtcgcgccggtgaagagctggagcgcagccgagtcgtgaacgacaagtggaacctgaccgttgacaccctgctgtacctccgccaccagttcgaccaccaggacgagtggacccaatccttcgacatgcgcaaggaagtcgccgagctggacggccaggaactggctcgcaagttcgaccaagcctgcctgatccaggtgatcaaggctgccgcgatggacgcaccggtggacctggaagacgccttctcgccgggcgtgctggagaagctggacctgaccggcctgaccgccaagcaggctgccgagaagatcgtccgcatgcaccgccgcgtagtcgagaccttcatcgaccgcgacctgggcgatgcggtctactccgagggcctgaccccgatgtcgccacgtgtgttcagcctgctgctggaacacgacaagctgatgaacgtcgagtaccaggcaaccggcgcgaccaacgattacgtgaagtcgcgtgtggccgtcctcaacggcgtcaaggtgctggagactccgcgcttcgccaccgacgcaaacgcagcgcatccgctgggccgccacttcaacgtgagcgccgaggaggctgagcgtcagatcgccctgttcctcccgagcaagaccctgatcaccgcccaggtggcgccggttcaggccaagctgtgggaagaccacgataagttctcgtgggttctggataccttccagatgtacaacatcggtgcccgtcgcccggacaccgctggtgccatcgagctgaagggtatcggcgccttcgacatcaccgcgtgacggctaaggatttaaggtaaggaggtttatttatgagcattcaattttcgaaaattttgcttcttacggtgctcgcaacagccacgatctccaacgcccaggataaaaagtctaaaagtaagactgccaagattgattggtctcactggacagtgacggtccctgaggagaacccggacaagccaggtaagccgtattcactgggttatccggagattctcaattatgcagaggacaaaatcgcgtcaaaatacatgtacgacgatccaaaggacaaaagtgtcgtgttctacgcattcccgtccggcgtgactaccgctaacacccattacagccggtcagagttacgggaaactatggagaccgggtcaaacaaagttaactggaccttcgctaagggtggcaaaatgcgtggtacttacgctatcgacgacatcagcaaagagccggatggtaagtattcccgcgtaattatcgcccaaatccacggcgtactgaccgacgagcaacgtgatcttattgggcaaaaggacaataatgcccctccgattctcaaggtgtactgggataaaggtaaaattcgggtaaaaacgaaagttttaaaggacctgaacgccccttacaaagagatgcttctggaacacgcttggggtgatgacgaaggccggaactttaaagagaagattgacttaaatacacggttcacattggaggttaaagtgagcgatgggcggatggaagtcattcttaacgacaccgaaagtttggtctatgacgacattcacatgaaaaaatggggcattttcgaaaactactttaaagcagggaactacttccagtctaaaactccgggcacttttgcaaaagttaaaatttattcacttcaggttacccacctcgagcaccaccaccaccaccactgaatgctactactcgacgcagtgaatgtcatcctgcgcaagatcggcgagctgccgatcccgagcatggatgagacgtatcccaccatggccattgccctccctgagctggaggaccagcgcatccagttgctgacgcaaggctggtggttcaacacctggtggaagcacaagctgacacctgatcccacgggccgcatcaacctgcccaagggcaccttggcattctacccggattccccggacctccagtgggacggcctgggagtgcgcgacgccaacaccggcgacgaccgcatcggtaagtcggtcgagggccggctggtgctgtcccgcgagtgggaccgtatccccgagatcgcacagcgcgtcattgcgcaccaggccgcactcgcggtgtacacccacgagattggcccggacgagaccgcccaggtcatcgcccaggaattgcaggcgtatcagaacgaactgtcccgcatgcacacccgatcccgtccgctgaacacccaggccaagcgtagcttcagccggtggcggcgcagcttgaggacctgagcatgagctacaagcaatccgcgtatcccaatctgctgatgggtgtgagccagcaggtgcccttcgagcgcctacctggccagctcagcgagcagatcaacatggtatcagaccccgtgtcggggctgcggcggcgcagcggtatcgagctgatggcccacctgcataccgaccaaccctggccgaggccgttcctctaccacacgaaccttggtggccgcagcattgcgatgctggtggcgcagcaccgtggcgagctgtacctgttcgacgagcgggacggtcgcctgctgatgggtcagcccctggtgcatgactacctcaaggccaacgattacaggcagctacgggccgccacggtggccgatgacctattcatcgccaacctgagcgtgaagcccgaggccgaccgcaccgacatcaagggcgtggaccccaacaaggccggctggctgtacatcaaggcgggccagtattcgaaggcattctccatgaccatcaaggtcaaggacaacgccaccggcaccacctacagccacacggctacctacgtgacgccggacaacgccagcacgaaccccaaccttgcggaagcgcccttccaaacgagcgtaggctacatcgcctggcagctctacggcaagttcttcggtgcgccagagtacaccctgccgaactccacgaagaaatacccgaaggttaaccaggatgccgatgcggcaaccatagccggatacctcaaccagcgtggggtgcaggacgggtacatcgcattccggggagatgccgacatcaacgtcgaagtgtccacggacatgggcaacaactacggcatcgcgtcgggcggtatgagcctcaacgcaacggcggacctgccggccttgctgcctggtgcgggcgcacccggtgtgggtgttcagttcatggatggtgccgtcatggccaccggctcgaccaaggccccggtgtacttcgagtgggactccgctaaccgccgatgggcagagcgggccgcctacgggaccgattgggtcctgaagaagatgcccttggcgctacgctgggatgaggctaccgacacctacagcttgaacgagctggactatgatcggcgcggctccggcgacgaggacacgaaccccacgttcaacttcgtcacccgaggcatcaccggcatgacgaccttccagggtcgcctcgttctcctgtcgcaggagtacgtctgcatgtcagccagcaacaatccgcaccgctggttcaagaagtcggcagccgcgctgaacgacgacgatcctatcgagatcgccgctcagggcagcctgaccgagccgtacgagcatgcggtcaccttcaacaaggacttgatcgtcttcgccaagaagtatcaggccgtggtcccgggtggcggcatcgtgaccccgcgaacagcagtcatcagcatcaccacgcagtacgacctcgatacccgggcggcacctgctgtgactggacgcagcgtgtacttcgctgccgagcgtgccctgggtttcatgggcctgcacgagatggccccgtcgccgtccacggacagccactacgtcgccgaggacgttaccagccacatcccgagctacatgccggggccggctgagtacatccaggcggcggcctccagcggctacctggtgtttggcaccagcacggcggacgagatgatctgccaccagtacctctggcagggcaacgagaaagtccagaacgccttccaccgatggacgctgcggcatcagatcatcggcgcgtacttcaccggcgacaacctgatggtcctaatccagaagggccaggagatcgccttgggccggatgcacctgaatagcctgccagcccgcgagggtctgcaatatccgaagtacgactactggcggcgtatcgaggcgaccgtcgatggtgagctggagctgaccaagcagcactgggacctgatcaaggatgcctctgccgtataccagctccagcccgtggccggtgcctacatggaacgtacccatctcggcgtgaagcgcgagacgaatacgaaggtgttcctcgacgtgcccgaggccgtggtcgggtcggtgtacgtggtcggctgtgagttctggtccaaggtggagttcactccgccagtgctccgagaccacaatggcctgcccatgacctcgacccgcgcagtgcttcatcggtacaacgtaaacttcggctggaccggcgagttcctgtggcgcatcagcgacacagcccgacccaatcagccgtggtacgacacgacgcctctgcggttgttcagtcggcagctcaacgccggggaacctctggtggacagcgccgtggtgccgctgccggctcgggtcgatatggctacgtccaagttcgagttgagctgccatagtccgtacgacatgaacgtccgggctgtcgagtacaacttcaagtccaaccaaatctacaggagggtgtgatggctttctggctaccactattggccgctggcggcatgtccgcccttcagcagggattggccaacaaggaagagcgcaacaagatcaaggccgagaacaaggctcgactgaagacggacctcgacaacctgggcgccgccgcccgcgacatcgccaacctcggagtcatggccgctagctaccgcaagcaggccgtggcctcgcaggtggaggccaaacgccaggggatgctcgccggcggcagtgccgaggctcaggccggagcgttcggcgtcaagggcgcatccgttgatgcggtggccctggatatcgagcgggaggtcggcgaggctctgttccagattgacgacaacctggacaatcagatgtggaacctcgccgagcaggcgcactccatccaggcccaagctaaggccggcctgctgggacagaagagcaccactgcggggcaacgatccccgctggtggctggcctgatgtcggcgggttccctgtatgcaagtcaatacttcaagttcggcgccacgcctaaaggaggcaactgatggcggaatcgcaacgtgcttcccaagagcttgggatcaacgtcgggcagacgcaactccagccgggccagagtgcccggcgtggggtgcgcgactccgaagtcaactacagcgggccgagtgtaggctcacagattctcgacggcatcctcggcgccggtcagcaaatcgcaggcaagtggttcgagcacaacgtgcagcaggaagtgctgcgcggtgagcgtgcccgcatggccggcgaggccgaggaggcggtagacagcaacatcctggccaagcccttcgtgaagggcggctggcgtaagcaggactaccgtatcgctcaggcggacttcagcctgaagatgcagcagttcatcgccaacaagggccgggagatgactcccgaggagttccgcaaatacctgtcccaggaggctacgcacgtcctggactcgacaaagggcatgaaccccaacgacgccctacaggcgctggcgcagcagcagaaggccgaggagcagctcttcggcatgcaggccaaggcgtacatggactggtccatcgaccaggccgcacgaggcttccgcacccagggtaacagcatcctggccaaggctgtacaggcccaggccaccggcgacgaactgtcccgacaactcagcctggaagaggctggcctgttctataccaacatcatgacctccgaggatatcccgctggaggtgcgtgacaaggtgggcatgcagttcctggcagccagcctggacatgaaccagcggggcatctacgagagtctgcgcgatgccggcttcctggacagcatgtccttcgacgaccggcgtgcgctcaacggcctctatgaaaagtcgaaggcacagacccgggccaaggaatcgatggctaccctgcgggccgatgcggacttccagcagcgggtggctaacggggccatcacagaccttgccgaggtcgaggcgtactcccggggcatggtcgaggagggccgctggagcgacgcccaggccatctcgttcatgaccaaggccatgaccggcctgggcaacgctcagcgcatgcagggcatcatggcggccctggaggctggggacatcaacgccctgcacacgctggggacgaacgtctccgaggcactggagcagtgggacaagatgcaggcggccaacggctcaagcctgaccgatcgactcgtacagggcacgcagctcggcctgcgcctggggaccttccccaagacctacggcgagtccgtgggcagcgccgtgcggatgatccaggcggccaaggaaggcgaggcgaacccggagctggtcaatacgttgaacagcatcttcgagcaggtggcctcggcccaggagatcaacccctccgccggcaacgtgatgctatccggcatcccggaagccgagcagggcgctgtggcctgggcactcaagcagatgaagatgggcatcgccccagctcaagcactgcgcgagttcagtgccaacgccgaagtcgtgaagcagatggacgagttcgagaaaggacagaacaccaaggcattcaaggacaacctcggcaagcaggtcaacgacaagttcgtgaacaacatcttcggtcgggcctggaacatgctgaccggtgagagcgacctgagcaacaacgaggccgttctcagcatgtaccgtcgagcaaccatcgacgaggcgaactggctggccagcgaccgcaagcatgcgggtctgcttaccagtgacacgggccgcgaggccctgctggagatcgccgccgccaacgtgcgtaaccgcaccatccaggtaggcgaaggtcggaacctgaaggaaggggacctgttcagccgccgcgacagcgcgccactgatcctaccccgtggaaccaccgccgagcagctattcgggaccaacgataccgagaccatcgggaccgtcctggccgagcagcacaagccgcatgtcgaaggactcctcggttacaagtcggtagtcgccttcgagtacgaccgcaccagtggcagcctcctcgccgtcgagtacgatgagaacggtgtggccctggaccgcacgcgggtcgatccccaggcagtcggtaacgaggtgctcaagcgcaactcggacaagctgaacgcgatgcgaggtgccgagtacggtgccaacgtcaaggtcagcggcacggacattcgcatgaacggtggcaacagtgccggcatgctgaagcaggacgtgttcaactggcggaaggaactggctcagttcgaggcttaccgaggggaggcgtacaaggatgccgatggttatagtgtgggcctggggcattacctgggcagtggcaatgctggggcaggtactacagtcacgcctgagcaggccgcgcagtggttcgccgaagacaccgaccgcgcactcgaccagggtgtgaggttggccgacgagctgggcgttacgaacaatgcctctatcctgggcttggccggtatggccttccagatgggcgaggggcgtgcccggcagttccgtaacaccttccaggcgatcaaggatcgtaacaaggaagccttcgaggctggcgtacggaacagcaaatggtacacgcagacgcccaaccgggctgaggcattcatcaagcgcatggcgccccacttcgatacaccgagccaaatcggggtcgattggtacagcgccgcaacagcggagtaagacatggcacagcaattcaagggccgcatgacgcccaagtacccacttgaccaagcacagctcgacgaggcccaagtacagggccaactcgacgcagtgcctaccgtggggttcgacgccctgacgggtggcgagatcggagaacggaacgtggcagcgggccaacgagccaacgcgcgggaactggaacgcatcgtagcggaccaggaactgccggcccttgaccgtgcttccgcactctggaaccagtccaccctcgtcggacgctggggcgatgcgctccagctcgacgcggaccttgcggcgaacagcaccggcgaggtggaccccaacttcgacgccgggacctacggggtccaggcgctccaggcggcgggtatccagccgactgacaactatctccagatcatggcccgtgccggcaatgccgaggacgcggcctacctcctgtcgaggattcaacggtatgagcaggacgagcaaatcgtgcgggacaacccgtactggaacttcgcggctggcatgctggaccccgccgctctggcagttgatgcggttactttcggcgctggccgtgctctgcggctcggtcgtgctggcatggctgctgctggcggcgctgggcaagtcgggtatgttgctgggctggatgccgcaggggccgacgtggatgccggaacctacatcgtggcaggtgctcttggcgctggcgtgggtgctctgctggggtctggtgcgggacgcattgccgcagaggccccaacgcaaccgcatgtgcccgaagtatcggcgcctactgtcgggctgccagaagtagccatgaccgccgaggaggccgccgcacgcggcttcaaggccggtgacgtggtagacctgctggacgagggcaccgtgctgtcccgtgtcagctcccgtgtggagcaggccgagataccggccatcccgcgccgtgacactgccttcggcgacgagctgcacagcctgtcgggccggaagctgtccgaggtcctggaccacctcaagacccacgcagaggttcccaagccgctccagggcatcgccgccaaggtggctgataccatcaggaccctggagggcctgggccagcgaaccgcgttccgagtggtgcagggtggcgacactgccagctccgcattccttaagccgggcacggcgggcatccactccacccagggcctcgacaccttggtccaggtacgcggcagcaccgcacctggtcgagttggcaccaacccggtgaccgtgctccacgaggcggtccacgctgccaccgtaggcgtgatgaacgccgccctgcgcaaccctggcgcgatgagtccgaaggtggctcaggccatgcagaccctggagaacgtccggggtaacgtgctcaacgccctgaagcaggaccgcgccgccggtcggcaactgtccgagttcgaagagacgctgctggccggcaactccaacaccctggcaaacgtcaaggagctggtggcctggggcctgacggatacccgcttccagcggaccctgaatcgcctccgctacagcgacggcgggccgggcctgtggacccgtttcgtggagggcatccgtagcctcctgggcctccggtctgatgccgacacggccctgagtcgcgtcctggccgcctctgagacgatcatggacgccatgccggggtacactaaggctcaggctaagtgggccaacaagggcgctccggtgaccgaggaggccagcctggagaccatcgtgcggaccaccagggagcgtgcccgcgagggtgcgggcttcgtgaaccggttcttcagcgaggcggacctactggcacagcccggagagggcgcacggcgcctcctgagccgtcttatcgacgaccctgtacgtcgggatgggttcagcacgaacgacaacgcagcgagctatttgcgccgttaccggaacgagttcgagggctacgtgaagtcctacgacgagatgatggccaaggcaatggctgagcagggcgtgggcctgacggcacgtgcgctgaactcccgccgcgccatggcagtccgggaccagcttaacgagcaggtcacccgcgagctgctgcgccgggaccgggagtggaccgcctacggcagcgtccgcgtagaccccaacctgccgccgaccatcaaggccctggccgaccgctcggacgagattcacggtctgatgggtcagcgtgccagggaagccggggtccggggcttcgaggacttcgctccgcgtcccggatacttccaccgctcgtggaactggtccaagatggcgcagatggatgaggccgcccctggcctggcccggcgtgctatcagcgaggccgtgttccggggcatccctgggctggagcgtgccgacgccgacaccatcgcacaggccattgtgcagcgggcacgggaccgggctaccggtatccgctccgagttcatgggcgcgatgggcgtggcggacacggcattcatccggcaggcgctggaggaggccaacgtgtcccaggccaagttcgacagcatcatggccaagatcgagcagaagcagtccgaccagggcaccgtcaaatacggcaagggccggctgtcgctggacatgaccgccgagatcaaccacaatggaaccgtgtaccgcgtgcaggacctgatcgaccgggacctagaccgcctgatggagaactacgccggcagtatgtcgggccgctcggcactggcccgcgcaggcatgcccggcgactccgaggtggaagccttcatccgtgagtaccagcgggaggccgcgcacctgggcaccgacaaggtgcaggagctgacgggccaactgcggggcgtcttcggggacttcaccggcaacgtgccgcgagagcatcagctcggccccgtcgcacagcgggccagcgggctgaccagcgccaccatgctgggattctccggcgtgtaccagcttgctgagctggccacgatggctcaccgccagggcgtcttcaacgtaatgaaggccatgctgaactcccgcctgggtgacttcgtaggtgccatgcgtcgagacccggacctcgctgatgagatgcagaccgtcctcggcctgaacctcgccaacgacattcggatgaagccctggaagcggcagttcgacaccttcctggccagccaagacaccttcatggatcgcttcctccacgcgggtaagcaggctgtcccggtgctcaacggcatgaagttcatccacaactggcaatcccgcatgaacgccaacctcaccttgaacaaggtggcgcgggcggcgcagggggatgaagcagcccttcgcgtgcttcagcagtacgggaaggacgtggactggacgccagtcctggcgcgggttcgcggttatgtcacatacagaggaaggaacgcccaatccatgaattggggcgcctggagccaagcagacgtgaacaccgtcatgaacaccgcattgcggatcatggacgactcactgctgtacggtcgagtcggtcagaactcgggctttgcccggtcacctgtcggccaaatcctggggcagttccgcagctttgtggccttcgcgcacaacaagctcctccggggaacctatgagaactccggcgtgcttggcgtggcctcgctcctcgcattccagtatccgctcaccgcgctgatgatgggtgccaaggcagcgatcaacggcaagttcgacacctctgatgaaggcatccgcaagatggccatcgacggcatcggttacactgccggcctcggcttcaccgccgacatgtggggcgtgatcaccggacactctaggatgtccgccccggtcttcggactggcggagcactccaacgaggtgttccgtggcgtcaaggacctagtaaccggcgacgaccccgcagccgccaccggcgatatcgtcaacggcgccgcaggggcactgcctttcgtcaacgtattcccggcgaccaagttgctgctggaatccatcaaaggggaataacgtggctcggttcaagaatcccgagaccatccacgttgcagatggggtcgaggctgtcttcagtctcgacttcccattcctgcggcgtgaggacgtattcgtccaggtcgataagatactcaccaccgactatacgtgggtggacaacaccaacattcaattggccgtggtgccgaagcagggccaagaggtccgcatcttccgcgacacgcctgcccaggtcccggacactcagttcagccagggcatcccattcctgccgcgctacatcgacgcgaacaacaagcagctcctgtacgctgtgcaggagggcatcaacaccgcgaacctcgccctggatggcgtactcgacgcgatccgtatcgccgaggaagctcgccgcctggcacaggaagcactcgacgccgccaatgaggcgctgcgccgtgccctgggcttcgctgagattcgcaccgtgaccgaggactcggacatcgatccgagctggcgtggttactggaaccgctgcatcaccgctgacaaacccctgaccttgaccatgcagatggaagacccggatgcaccctggatcgagttcagcgaggtccacttcgagcaggcaggcgtgcgcgacctcaacatcgtggccggccccggcgtgaccatcaaccggttgcagaacaccaccatgcagctctacggcgagaatggcgtgtgtaccctcaagcggctgggcgctaaccactggatcgtgttcggagccatggaggacgaataatgcgcggcattatcgcgggcatcatggcctcccaaatccggcgtccaaaaccaatcctggcgacgtacccgtatcccatcctagctacagacgacgcatggtcctgccggcccaacatagtggcggcgctgacacgcgacactctgcacgaggttgtgaaccagccaggagaggacacctaccacgcgacctccagcgtggtaagcgtactgctgcggtcgctgactcagctcggctacggcggtggcgatgggttcctgaccggacctgccgtcaatgcagccttgctgcgcgatacggtgaaggaatataccgcagagccttacgcattcctgtcgcagaccgcagtggccggcgcagaactgaaggttgtggttgtatactccgagtatatcgtggagccgtacgccttcgccacctcgacagcaattaaacaggcggaactgaccaatgtttgagacacgagttaagggtcgctacaccgtgacccatctgaaagccacgggtgaagtcctggcacagtacaccttcgacaacctcatcactaacgcgggtctcgactggatttgcgccatggacacctcagacctgttctcacaggccctggccgtgagtaccagcacagcagaccccaaccccgctgcaccctccctgccggaggaagtacgacggaccacctcgtacgccccgaacggggatgttacctcgggtctggatggggagtggatttactggcacaagcggtggcgcttcccgataggcacccttaccggacaggtactggccaccgtgggcatcgtggcccaatccgaagttgggttcgagagtaacaccggcgcgaagattccggcagggactccactgtcctacacccggatcaaggatgccgccggccaacccaccaccctggtggttcaggccgacgagattctcgacgtgcagtatgagctgcgcagcaaggctgtggcgatggccgaggccaagttcgtgatctctggagtcgagcgtaccatccgccttactccgctgcccttcgcgaaccggcgtaacctctacggtgagcgctacatcttctacaacgagagtcctcggattgacggtaagaatgcgtccggctcggatgtccaggatggccagtgggtgaagctgtacccgcgatatacgcggggcacctacaaggggcagctaatgctgcgggccaccgttgaaaacggcaacatgccgggaggcatcaccggctgcaaggacctgaagatttacaacggtcggaactacgcactcaccatcgacccgcctgtagtcaagaacaacacgcaggaattctccatcacgatggagttctcggtagcgagggcataacccatggcactgatctacgacttcaacctggacctcgatccgaaggctaagtccaagttcgtaggtgcgcgaggccgtagggacatcagcgacgtgctagacttctgcgacgggggcgtggccatccaggacccgtcgcagggtatgatggtccgcgtgtggcgaacagagcttcgccaggacgggacctacctggggcacgaggacggctcgaacgagattcgcatcggcggaggtatcgaagaaggtatctccacgatgtccctcgacttcgacagtaacatgaactacgtgtgtgctttcgtacgagccgatcgaactggtgcaatctcctacttcaacgtgcagcagggccgccggctcctcgtggagcttgggcaggttgactatgccaaggtggccttggacgataagcgtcctggagctactgcctgggcacaggtcatcgtaccttacacccgtaacggcaacctgtacgtccgcacacagaacgagaactatacggtagagcacctggaggtggataccggcaaggtattccgaccgctggtcaaatgcggtatgggcaccaacctccgcttccaagtccaattcagagggcacatgtaatgagcaaaaagcagaccgcgagtgctgagcggctgggcctgctacacgagctggtctgcaccgctatcgagcgcaacttcaagtggtacatggacaacgacatcccgatccccgcatcggatatcgctgccgccaccaagttcctcaaggacaacgagatcacctgtgatccgtccgacaccatcaacatcgaccggctccgcgaggagatgcggcaggcgcaggccgagaaccgccgcattgccttggagggcttcatcgccggtgagaccgacgacgagatggaacgcctgtacacccactaaggaggcagcatgacgccgcaagaacgattccagatagcccacgaagtgcgggacatgtacccgcgcttccgggacttctgcctggacgccatgctgttcctcggcttcaagatgacgtggatgcagctcgacatcgccgacttcatgcaggattcgcccaacaaggcgatggtcgctgcgcagcgtggcgaggccaagtccaccatcgcctgtatctttgtggtgtggtgcatcgtccagaacccggctacccgcgccatgctggtatccggctctggtgacaaggctgaagagaacggccagttgatcacgaagctgatcatgcactgggacctgctggcgtacctgcgccccgaggcccgaatgggtgaccgtacctcggccaccagcttcgacgtgaactgggcgttgaagggcgtcgagaaatcggcctccatcaactgcatcgggatcaccgccgccctccagggttaccgtgctgacatcctaatccctgacgacatcgagaccacgaagaacggcctcaccgccaccgagcgggccaagctgacgcggcagtcgcaggagttcacctctatctgcacccacgggaagattctgtacctgggcacgccgcagagtcgcgagtcgatctacaacggcctgcccgcacggggcttcctgctgcgcatctggccgggccggttcccgaccctggaagagcaagagcgctacggcgactggctcgcaccctccatcctggcacgtatcgcccgcctggaggagaaaggccacaacccgcgcaccggcaagggcctggacggcacccgtggctggccggcggaccctcagcgctacaacgaagaagacctgatcgacaaggaactcgaccaaggccccgagggcttccagcttcagtacatgctggacaccagcctcgccgacgagcagcgtatgcagctcaagctgcgcgacctgctgttcatcgacgccacgcatgagagcgtacccgagcaagtggcctgggctgccgacgagcgcttcaagctcaagttcgacgcccaccgattcccggtcatcaagcctgagctgtacctgccggcgctgatggctggcggctgggcaccgctccagcagatgacgatgttcgtggaccctgccggcgatggtggcgacgagctgtcgtatgcagtaggcggaactctcggcccgtacatccacgtcgtgagcatcggcggctggaagggtggatttgccgaggagaacctggagaaatgtattgccctggctgcgcgttacggcgtcaaggtgatctatgtcgagaaaaacctcggcgcgggtgcagttggccagctcttccgcaaccatatgcgatccatcgacccggacaccaacaagccccgctatgaggggatcggcgtagaagaccgccagaagtccggccaaaaggaacgtcgcatcatcgacaccctgcggcccatcatgcagcggcaccgtctgatcttccacgtctcggcgatggattccgaccacgtgtcctgccagcaatacccagcggacaagcgcaacgagcgctccgtgttccaccagattcacaacatcaccaccgaccgaggctcactgccgaaggacgaccggatcgatgcccttgagggccttgtccgcgagctagcacccacgctcgtaaaggacgacgaagccgcaacccgcgctcgtgaagaggctgccaagaaggaatggctgaacaacccgatgggttacactaagtctgtccttcggtctctcggcatgggccgggagcgtcgcaagggccgcccaaaaggacgaagactatgatgctcgataccgccaccgaggcgggcaaaggcaccctcgccgtcaccggcgtggggattgccgtttactcgccctatgagatcgccagcctctgtgctgcggtactcaccgcgctctacgtgggcgctcagctcatcaccctactcccgaagatgctcgatagcatcgcggagcttcgccggaggttcaagaagtgaacaagcccctgcgcggcgcagcccttgcggctgccctcgccggccttgtcgccctggaaggcagcgagaccaccgcctaccgggacatcgccggcgtacccaccatctgctctggcaccactgccggggtcaagatgggcgacaaagccacaccggagcagtgctaccagatgacgctcaaggactaccagcgcttcgagcgcattgtcctggacgccatcaaggtgccgctgaacgtcaacgagcaaaccgccctgacgttcttctgctacaacgtgggtccagtctgtacaaccagcacagcgttcaagcgcttcaaccaaggccgcgccaccgagggctgccaagccctggctatgtggaacaaggtcacgatcaacgaccagagggtcgtatccaagggcctcgtgaatcgccgcaacgcggagatcaagcaatgcctcgaaccatcgtcgcaatactcgtccttgctgtggtagccctgggagcctcatacggcttcgtccagagctaccgagccttgggtatagcccaggaggagatcaagcgtcagacggcccgtgcggaggccctggaggtgcgttacaccaccttacagcgccacgtccaggaggtcgccgccaagaccaacacccagcgccaggaggtggaccgtgccctggaccagaaccgcccgtgggctgaccggcctgtgcctgctactgtcgttgacagcctgtgcaaccgccccggcgcccgctgtgctgtgcgaacaccctctgattgaccctaccacccaggctggcctaatccgcgctgtagcggcctatcaggacgccctggacctatgcaacgccctgaatcaaggagactgacatggcgaacacccgtgatcaatacctcgctggccgtaacaccggcctgaccttctaccaggtctgccagcccggcaccgacaaccgcatcgccctgcacgacatggacgaggccgatgtcaaggctaaggccaccgctgtgattgcagcagcctctgccctgggcggcgagggtggcgctactccaccggacccgctcaccgcctacaaggtgaagaacggtgacaccctgcccgtggacggcggtggctccgtgaaggtgaccgtagccaacggtgccatcaccaaggtcgtgtacaccgcaccggcgggctgagctacagcccgtccaacctgatccacccataacacaaggaactgaaccatggcaaccttcgccgctgcaactcagaaagacctccgcgccttcgccggcaccatcgagaacctgatccgtccgctggaggaagcggccctgggttctggctacaacgagaccaagctgcgcgctgaactggtcgcgcacctcgacgagctgatggctgctgtcgagactgccaaggcgctggtctacaagtgatcgacgagtagctcaagccgagcacctgcacagtcgggtgctccactggaactactggaatttttattgagggctggctgtgggtgggagttggtagtggtgggcgggagtagttactccgggtctaattttggtatcgtcgtgtgagaaccctcccgactctgatcagcccacccttcccccgtaggccctccgcctggtgggccactgcctcgcattgcctgggtgttgcctgggtcatccctgggagcttccagctacgctgggtggtggtgggcttccctgccctgtcgctgtcctgtcgccgcccattctacgcatcctggcgggagtgtcaacccctgggtggtcggtgccttgctcggctacgctccagcgcttccgcgtggtcggctaggcggttggctcgccagcgcttcgcccactctacacctcgctccacctcggaccacttgtccgccagcatcatgcgctgccatgccgcgtcctgctgtagccatgccctgctggctctgtcctgtctgctcagcatcctctgtctcctctgtctggctccctggggcttccctggggcgctgctgtggtcctgtcgggtgatggtg

SEQ ID NO: 49 - DNA, 44686 bp, synthetic construct
  source 1..44686: mol_type = other DNA
tctaattttggtatcgtcgtgtgagaaccctcccgactctgatcagcccacccttcccccgtaggccctccgcctggtgggccactgcctcgcattgcctgggtgttgcctgggtcatccctgggagcttccagctacgctgggtggtggtgggcttccctgccctgtcgctgtcctgtcgccgcccattctacgcatcctggcgggagtgtcaacccctgggtggtcggtgccttgctcggctacgctccagcgcttccgcgtggtcggctaggcggttggctcgccagcgcttcgcccactctacacctcgctccacctcggaccacttgtccgccagcatcatgcgctgccatgccgcgtcctgctgtagccatgccctgctggctctgtcctgtctgctcagcatcctctgtctcctctgtctggctccctggggcttccctggggcgctgctgtggtcctgtcgggtgatggtgcgggagtggctggccttgcctcttgtgcctctgtacctgtggcattgccctggctctacctggctgctccctgggtattccctggggctgcctgggtggccctggccactccctctaggccacgtactctactcgcctccacctgtcctgtctagtcctgctctgctccctggagcttccctggatgctacctgggtgctggtctatctccctggctctgcctggcgctgtgctgtgctaccgctggtcctgctgtcttgcctcgccgctccctcgcctgctcggtcgcacctgcggcgctgatggactcctgtttgtccattgtgtgtgacataaccgcagccttagtgccatgcgggttccagggcgatgggtctggctggttggctgctccctgggtgggggctgtcgctccctggtaacgcaaatcctggctagctagactaagcctcgcgcatggggtctctatacgcgtgggaaggctccagggagcgcctggggaggggttgacacgttggcggtaggtctgtagagttcgccctgtcttcacgcaataccgccttcacaggcagcctggagacagggttgacacactacccgggcatcggtagagtacgcagccagaacgacgggagattgcaaccttccaagcgcggcacaagccataggcgcaagggacacggcaagctcttagggcaggaaccgcagtgtgtaaggccggcaggcatcactggggggattgacaaggtaatagatgcggtaagatgtgcggcgtcaagtggtcccgatgtacacactgtgaagggattacggcgcggtcagacagatgaccggcaccgcttgacactgtaaagctcagtcggtacgatgggcacccatagcggacgtgatggtccggggcgatgcggataggacgccttgtttataacctgaccgcaaagctgtgactccagccgataggactgacccaccacgtaaatacagacgggttgacacgacaaggccaagtcgataacatggccgccacaaagggaagcgatagcttcctggcggtagaggttcgaagcttcaccagcggtacatggactggtgcggtaggttgaccgaagctgcaactggttaggcagggtcccagggaatacctgtcgggtgctgaagactcacccaaaagagtctgagcgggaagcctccccgtccacggttaagcaaaggcacgttagtgccggtgggaacgaatagagtgtcagtgggatcgagaactagaaacctcggttaatcgcgactgacagtatgctgggtagtatcggtgggccgattgaacaaggccaggcagatagcgcaaagggtacgggggatgagtgaagacgatcccgaagagtatgcgcaggacaagccagaaccgctgatactacagggactatgccaatgccaaggtttgtcccttgaggcccttccaccgaggggattcaagagacagacctagttgaggaatgccgatggcacacttcaaggctaaggctcccaagtcgcccttcgctacccaggtagcgtactggcgggattgggaagccaaacgtactaagctcatcgcacaggataacgtcgaggggcgcaaagagcttcgcaagatgcgtgacgtgcgctacgctaccgacccggagccagcgccaggacgctaccataaccctgaacagaaagcgttcgtgaagggtagcgaaggcaaggcgcggaacatcctgaagggatggaacgctaagaagtcgcaagggaagggtttgtaatgccacgtgtgaatgaactgacgccgcgtcaacgcaaggccgccaaggctcgccgcgacaaggcacgccggattgatctagcgcacaagatgccgaaaggcgccgactgcccgatcttccgcaaggctgaacaggcgcaagctaagcagccccgcgtcgataccctgaccactccccgcagtgccggctacctggccgccgctgcttacctgaacaaatccatctgaggtacataccatgaccaacgcaatctccaaaaccgtaatcgcattccgtggcaccgaagagatcaatcgcgctatcgacgccatccgtgtccgtggcaaggaactcgacgaagccatccaactgaccggcctgtcgatcatccatcacatcgaccagtgtggtgacgtgaccgtggtcaaggcgctgtatgaagccatgccgaagggcagccgccgcaatgcgctggtcgagtggctggtgctgcacggcaaggtacaggtgaataccgacaagaagtcgaacaaggacctgcccttcctgtacaacaagttcggcaagaccgatctcgtaggcgccaccgacaacccgtggtacagcttcaagcctgagaaagcgctggaccaggagtttaacctggccgctgccctggccacgatcaaaaagcaggtgctccaggctcagaccaagggcaaggtgatcgtcggcatggaactgctgggtgatctggaagcgctggccgccaaggctgcacccatcgccgagcagagcaagcgcgctgccgcccattgactcaagtcgaacgcctgctaagcgggcgttccgctggaatcaatgacaactggagaaacacgatgagctttaagcaacgtctgcaacgtcaaatcgccctggcccaatacagccgcccggctcagttcccgtacggcgagcaggccgtccaggcgaagggagagtgaccatggacttctggattgccctccccttcctcgaactcggcctcaacctcggcgaggatgaactgcgcatgttgtggttcagcggcctgacggtattcttcatccacctcctgaagcggtgactcaagtcatggccctggcgggcgaccctcgcctactccggggccatcgctggactcatcacaagcgagaactaaaccatgcaagctttgaatactctgttgatcgcaatccccaaggacccgtcgaacgcattcaatgcagccgacaaggtgctgtgcgcccatggcttccgtatgggtgacctgaataccgcgcacgtgctgacccctggcgggttcgtagtagtgggcgccggcgtgaccgtcaaccgctacgacgaagcgtatcgtatgagccggaacctcgattccgaaggcttcgacgttctgctggtccagggcagtccactgtccgggcacgtcacctgccaggcgtacggctggatcaatgcggaataccgcaagggctgcgcgaacgggcgcccgatcttcgacattgcaggaacctcgtaccatgtcctcgcgtgatccctaccgtatcggccaccgcgtggggctggtgaactacagcgaccgctacctaggtgccgacgcggcaggcaccaagggcgtcattgaagccataacccgaccgtcccgctgtatgacgatctatcacgtacgctgtgagcggaccctgcgcttgatcgaggccgaggcccgtaacgtgcgattcatcagacagctaccgacccgcaaatgacgtggcgcataatcgtcgtcagcccatcaagcggctgcgccttcgtgtggagtctcaagcggcctgtgcggccagtgcgattctactcccgcaaggcagctaaacgctggctccgcaagcaccgccgacagggcttgcctggccactactacctcatcgtgaactggagcaaacgcctatgaatcctacttacgtcgtccgcctcaaggacggaaccacccgccaggtagtcgccgacagcatcgtcaccggccacgccttcgtcgaactctggttcctcggcggggcggtcgctatctacccggcctgcgaagtacaggaggtccaccgcactgacctcgtaaaggagggtggtgatgaatacccgcactgtatacgtcaagccgcacagttcgaggtgcccgccggtattgtccgcaggacgcctgaccccgggtgaactctaccacgtgatcgcacctgccgaggtcgaaggcgtcattgtgctggcaacttcaggcccgtggcacatccggtccgtggtggtgcatagcatgcacccctcggtatatcccgtagggatggctgtcactgacgattcctggcggttccgccgcctgggtgtgagcgagtacgtccaactaattcaagggtacgaacaatgatcgccatcctgttcgtactcggtctgtactgctgcctcggcctgctggcaggcgcctgctactgcatcgcagtggccccgccattcgagaacccgacggaagtgcagttccaggacgcatgcgtgatcgggtgcatctggccactcgtgatcctcgtcggcatattcctggcactccgtgcagtaggccggggcctgctgaccgggctgaagcgtcacctgaacatccaataacctaccggaggtaacatgatccgcacccatacccacaacaccgaccgcgaacagcgccgcatctacaagctcactgagctgacgtcgggtgagatgtacagtgtagtgcagcccgagtccaagcgtggcacgctggtggtcggagtagcaacctgggatagccagagccgacctgtagtgctgcccgtggtcattcacgatgtgggtgcgcatccctcgccctgtcccaccgtgctgcgcaacgacggctggcgcatggtgcttgccgccaagggcacccaggtaacactcaccgccgagtgaccaaggcgaaggctggtgcgccagccttccaccgtggccattccttgccgcgaaccaactcaaccgaggagctacaacatgaccaacgtcaacaccgccaccaccgagaccaccaccgctgctgccctgggcgccaagctcatcaagaagccggctaccgtggaagacttccgcaacaacgtggtcttccatcacaccgccctggccaagctgaccgaagtctacaacgaggcggtcgttgccctgcaaaccgccgagcgcctgtccagcctcgtcgccggtgacgtgatcaccttcgaccacggcaagggcgagaaagccgaagtgctgagcggcgaagtcatcagcgtggttgccggcgtttaccaggtgctggtccgcttcagcgacagcgcacctgccaagctgctggacgtgaaggccagcgccatccgcgccgtccagtcgtcggcagcccaggctgctaccctcgacgaagccatcgcccagggcgagtaaggcccgcacgtaataggcccggccctccgggcctattgcgagctagccataccataggaggagtcaccatgagcaagcgtaaccccgagcacatcagcggcgccgtgcgtagcgtcagcgtccagaagtcggcagccgtccaggaactggaggatcgtctggagtctgccctggccgtgtgccagcagcgggcggaagacatcgatctgctgagccgccgtctccaggccgccgagcgcgcccgccgctgggagatcgacgagattcgcaaccaccaggcgaccatccgcctgttgcagaacgacctgaacgctgcgcatgatgcccacgaggcacaagagcgccgcgctcgcaaggcaaccatcatggcctgggtatgcctgctgaccgcaggtttggccgtcaccctgaaactggcaggagtctgaccatgcagtgcaacgacctttacactaagctcgcagcgagcatgttcaacgtgccgtgctcccaggtgaccgccgagatgcgccgcgtagccaagagccgggcattcgcgtatgcttacactcccaagcgacaggcgtcgggtgggacgtacaccgcccgcgtgagcggcgtcacctgtgacggtggcaaggtggaggtacgtctggacaacgtggagcgcgccgacacctgtggctatgccaagctggaggcgctggaagcggtcagcctgtaccagggtgccgcgaagcgcgccgatgagtatgaaaagctactgctccaggcattcccggtggtggctaagcgtcgtgagcgcttgcgtatctccgggccgctgtcggcggaagacttccgggcaaacctgctcgggacgtgttccgcatatcggaatgccctcgacgccatacggggcgagattacctcgaccggcccgttgcggaaccgcatatgggcgctggtcgaacgtatgcaccgggccgagacgaagctcaggaatgctcagtcggagatcaaccgcctgcgggagcaggaactggaccgcctccgcaaggacatgtccagctactgcgccaacgacgttacctctacggtgagtgcagcatccgcgaaggataccctacgggtggcaaccttcgccgccgccctcgccggtggcgtcgtaggtagcgccctgatgttcctgctcagctagggcgaccagggcctactccggggtcaaatctgagggcgttcctagagcgccctctcgtgtgagtctggaggatcacgaacatgcaataccatttcacgcattacaacggataccgcttcggcgtcgagctggaagacgaggctgtcttcccgtgcatcgacggtaagcgggcgacctgggacaaggtggcggcgtgtgccggtagccttgtgcattacatggcgcaggacctgattgacttcggccagcgcaagttaagggagatcgaagatgagcaagacgagcctgtacccgctgagcctgcatcccggcctgattcaaatcaggacgattcacgtattcagcattcaagctccgagcaacgccgagaactggtggcaatggttcctctggcagcggaagtaccacccgctccgggagagcctgagtccagccggggaactgagtgcgagtatcgccgagtgtgtccaccgcctccgccagagtggctggcaagatagcgacatctggcgcaagaagggaggcgtgctggccctcggtgccttcgacctgtccggcctgatggtgggttcctgcctcgtagtaggcggtgagctgaaggccctgtgcgttgatgaccggcacagcaggcagggtatcggcgctgagctggtacgagctgccgagctggccggtgctgagcacctgacctgcttcgagttcctggagccgttctacgccggcttgggctggcgcaccgagcgccgtgaggcaaactggactgaaggcgagccggatgtgctgtacatgagggcacctggccatgacgcatgaggtgatggtatggcttatcgcgaacaaaccgctggtcatcggagtcgccttcagcctggtggccctgggcgtgctgctcacacagaacaacggcggcccgcctatggcgcccgcatgacctggcacctccaggacatgttcgaggcccgaggtgggctgaggcccttgtgggaggagtggtatcaatggcactgcgccgcgactcctggctaaagcaagcgcaatccctggcagtcggccaggcgggtcgattccgccacgtcctgggatgccagagcatgagccggggcgggaccaacatgacctgcaagaacctgcctgaccgctgggtggcatactgctactcctgtcaggaaggtggcgtggtcgagaaaacgcacgtgcggagggtgcaatgcgcggatcaagaacgcttcatgccctggcccgaggatgcctcggactggacgcaagccgactgctatcaatcgctatatggtttgctgctgtccaagggcatcgactacaacgtgatgacgccggggctgccgctgctctacagcgaaaggcagcatcggcttatcttccctaccgacgcgggctggattgggcgcgctactgccgaccaaaatcccaagtgggtgggctacgggtatcctgccccggactaccatggatggccccaggaatcatcaatgggcaggccatgggtgctgacggaagactacttgtcggcgctgaaggtgcggtgggcatgtcccgaagtcttcgctgtcggtctgaacggtacaaggctgcgcgacaggctggcggcgatcatgttgcagcagacctgcaagcgcgccttcatcttcttggatggcgaccgggcaggtgtccgtggtagtgcaggcgtgatgcgccggctccggtccctgcttatcgaaggccaagtcataccaacgccggacgggttcgaccccaaggacctgacccgcgagcagataaggagcctagtaattggacgtattgacgcttcacgcactgagtgaccgggaccgcttccgcacgttgcggagtgtggtgcccgaaggaatgatggggccggagacgtgcttcgtcatcgactggatcgagcagtattggaaggtctacccggtgcatcagaaggtagacccgcaggcactgcgcgaactgatcaagctgcgaggtggctaccagccagagcaactagcggtggtcctgaacctcgtcaaccaactggacaagccggtggacccggactcgctacagggcgttgtgtcccagctcaacgaactggatttctcagggcgggtggatgccctcctggcgcagtacaaccagggcgaggacatcgacctggcgtatgagctgcgccggctgagcgacgaggccctgcgccgcgagggggtcagcacgccgaccgactacgtgacggacgacgtgtttgatatcctcgcggaggagcagggtgaccacggcatcaagctgccggggctggtgctgccggcgtacatgaagggcctccacgccggggcctcggtgctggtggcggcgccgcctgatgcgggcaagacctcgttcatggcctggatcgctgtccatatcgcgccgcagctcaagcggtacttcgacccggggcggcccatcctgtggctgaacaacgagggcaagggtcggcggatcaagccgcgcctgtactcggcagccttgggcatgaccgtgggcgagattcttgccctggacccggaggaagttcgcaggatgtacgccgagaaaatcggcggcgactctgagctgatccgcatcaaggacttccacggtgggtcgctggctcaggctgaacaggtcatcgacgcgatgaagccagcggtggtgttttgggacatgatggcccacgtcaagggcggccagcgcaaggaccagaaccgtaccgacgagatggagtacaaggtggctgaggtccgcgagatggcggtacggcacgacttcatcagcttcatgacgtggcagattagcaacgacggccacgaccagttgttcccgccgcagtcctgcctcaaggattcgaagacagcggtacagggtgctgtggacgtgcaaatccacctgggccgtctcaacggcgcggatcaacaggtcatgcgtggcctgtccctgccgaagaacaagttccagatggacgggaagccttcgaacgtggaggcaatgattaacttcgacgccgcacggtgtcgtttctttgagagtgtggatcatgcaagctaagcatagccgggtgctcgaaggcaccaaagaaattccgctgggtagcatcgcactgttaccgggcaccgtcgcgggcctgctgctgtgcctgtactccgacgcaactcacgaggagggcgtcgccttggccggtgggttccctcgcgacttgctgcacggcgccactcccaaggacgtggatgttgccctgtacagcatgacctgggggcgggcagagcacctgatccagaaggcactcccggtcctgaaccccatcttcgtccgggatggtgggtggcgctcggactacgccgatggcggcgacggtggtatcttcaagggcgtgatgtccctcgtgggctgccgtgggttgaatggcatggacttggactttaactactacgacgccgacagcctcggtcgagtgatggagtcgttcgacttcaccatcaaccaggtaggcatcgcgtacaactggcccgaccccgaaggcggtccgcgcctgggtgcgtacctgcacaaggacgttacctggggcgtgaacagggaagtcggtaacggctcgcgactgccggagcgatgcgagaagatgcgggccaaggccgcgtattacggatgggagaacgtgtgatgagcaagcgcgacgtggtactggatatcgagaaaggcatctggcgcggcgtagaccagaacgacaaggccgtcgaggccatcatcaagaagcacgggtacgtgatcgtcgagcctaagatcgacgggtgccgtgccatcgtcggtgcgcatggcgtggtgtcccgaagcgggcgccgcttcccggccctggatagcttggaagaccgcatcatcgatcgactggcccgccccgggctggactccggcctggtgctggactgcgagatgtacctggccggcatgcccttcagcgaggcgactggccgcatgtcgcgcaagaccccactgaccgaggaagagctggggtgcctgcacttcgcggtgttcgacgccacccatatagacgtgctccgcaaggcgcgcacctcccacctggtatacgaagagcgccgcgccatggccagcagcctcctggcagcttgccgcctcagcgacactccgacgttcttccaggtaggctcgcaggtgtgtcggtcgatggaggaagtcttaggccggtactccctccaccgcgccatgggcttcgaagggtcgatggagaaagacccgagcatggtctaccgcaacggcaaggtcgccggctgctacaagcgcaagccggagatcaccgtagacgggcgcatcgtaggctacgtgccgggcaggaccggcaagaacgctggccgcatcgtgggctactatgtcgagttggaagacggctcgggcaccgtggccgccaccggtctgaccgaggagcacatcgagttcctgacccgtagccaatactactcgaccgtcaacgacacgatgccaaacttcggtcgcatcgtcgaggtctctgcgatggaacgctcggccaacaccctgcgccatcccagcttcagtcgcttccgcgaccttcccagcaatccaggagtcaaggtatgaagattcgaaagtcccgtaaccgcaactacccggaagatatggtgtaccacgccaccaaccgggattcactgctgtatccgaagtacgtcatgggttccgtgttcatcagccaggacggaacattccgcatctgcgtcatggcagggacctgggaccacgttgggtccgaagttctgcatcatgcacgggacatccaatcccttggcgccggtcgccgtaagttgcaccgggtcatgcgacggctgcgccgcaatctgcaacaggtaggagtcaaggtatgagaatgccaaccgaagaagaacgcacgatccgctgcctgctggcagatatccacgaacccttgaacctgctgttccccggtatccgtgtaaaggccgagacaatgcccttgggctggggagatagtatctgtgccctggtactccgggtgagctacgaacatcgcacgctgggtcgcctggagtacctgcacgaggtccccatcctgcacctgacgcagtggggccgggacggcatgctccagcacctgatgaacgagattccccgtcgggtgctggatggcatgctgcgccaggcacagaaatacagccagagcaactggtacagcaaatgacgactatccgaatcctcgacctcgaaaccgagagctacgagcacaaagggcgcaaagcgtcgccctttgacccccgcaactatatcgtcatggccggctggcgtgacgatgttgacggcaaggtcggccagaaggtggagcatcgcttccgcagccgggccgaagccgaagatccgaacaaccgctggttcaacctcgacggcgtggacgtgatcgtagcgcacaacgccatgttcgaatcgaactggttcttcacccgctaccgggacgagtacctggccttcctgcgacgtggtggccgggtctggtgtacccagcaggccgagtatctgctgagccatcagacgtggctgtacccggcactcgacgaactggccccgaagtacggcggcacccacaaggtggacggcatcaagctgctgtgggaccagggcgtgctcacctcggagatggaccaggacctgctgagcgagtacctgtccggcccgtgcggcgacatcgagaataccgccctcgtattctacggtcagttgatgaagctccaggcccgtggaatgtgggctggctacctggagcgctgcgaggccctgatcggtttctcggcgatggagtgcgccggcctgaaggtggacctcgaagtcgcccgggtgaaccacgccaagcaactggaagaggtggccgggatcgaggctgagctgaagaagctgatgcccgacttcccggaatacttcgagttcaagtataccagcctctaccatatgagcgcatggctctacggcggcgaggtgcggtacaagggccgggtgccctacgaagatggccggatggagaaagccgacttcgtgcgcttcggcacggccaagcgggggactcctatcgagagtacctcggtgcgggtcccgatccacgaagtgaccaaccagggtgagtggcactggcccaccatcaccgagctggcgaccaagcacggcccggtcatcacgttctccgccggcaagaacaagggcagcgtcaaggtgttccgtgaggatacggacatcccggcgaccaagtgggacgatgaccagcgattccgattccccgggctgatcaacctgaacaacctgccggaagtggtgcgcgagaaattcctaggcaagcgcccggagttccagtgcgccctcaccctggcggatggatcgcccgtgttcagcaccagcggcgacgccctccaggctctggagaaacagggcttcgaggcagccaagctgttgatgcgcctggccgagttgcacaaggacaactcctcgttctacatcacccacacctacaacaaggatgggacgatcaaggacacgaaggggatgcttcagtacgtggacgatgatggtatcatccaccactcgctgaatacgaccgcgacggccacgacccgactgtcgtccagccgcccgaacctccagcagctcccgtcaaaggacgaagacgacccggaagccggcagccgcgtgaaggagatgttcgtgtctcgcttcggcgcggacgggatgatcggcgagaccgactataccgccctggaggtggtgatgttggcggccctgtcgaaggaccggaacctcctggcgaagctgatggccggcacggacatgcacttgtaccgcctggcagggaagcacaacaactggaacgggttcgattacgaccagctcgtggccatcaagaaggaccccaaccatccgtggcacggtcgcatgatgcaggctcgaaagaacatcaagcccaaggcattctcggcgcagtacggtgcgagcgcggctggtatcgcattcaacaccggctgtaccgtggaagaggcccaggaattcctggacaacgaggcggccctgttccccgagtccatcgcattccggcagatcgtccgcgacagtgcagaggccaccagcctcgtgatgtacaaggccgaggaccagatgccggcgggcgccttcagcgagatggggtcggatggtaactggcgccagtaccgccgaggattctggcaagcgccgggaggcacctgctacagcttccgccaacaggaacgctgggacaaggaacagcgcaagacggtcatggacttcaaggacacgcagatcgccaactactggaaccagggcgaggctgggttcatgatgaccgtgagcgtggggcgcatcttccgttggatgctgcatcgcccgggattcatggtcaccgagttcctgatcaacaacgtacacgatgccgtgtacaccgactgccacaaggacaccgccgccgaggtcaacaagggcgtgcgcgacatcatggccgacgcggcccgctacatgagcgagcggctgggctacgacatcgccgacgttccattcccggcagtggctgagatggggccgaacatgttcaatatggaggtgatccagtgaaagaactgcatccgctgcacacgcccgagttcgtcaaaacattcctggaccagaccgggtgcctgcctggggtacgccgtacgggccgcaccaccggcattgctctacaggccatcggcatggcgctgtcccatccgagggaaaccctgacgttcgtggaccacccggacggcagctcggcagcactggtggccagcattgaaaccatactggcgaccctgggctaccggaacgtcctcgttcgacccacaacccgtgcggacgggcgcagcgtgaacatcgtcttcaagacgctgccgaacgcctgacgaccttccctactccggccttaaatcttccttcgacacaagagagaccacgtatgactcagcaactcaacgctctgcaagctgcactcgccctggccaacaaggctgccgagaccgcaaccatcgacatgtctgaaacctccaccggcggtggcggcggtcgaatcttcccggctggcaccgccatgggccgattctgcatctacatcgagctgggtgaccacgccaaggaattccagggcaagctcaagaacccggcgcctcaaatccgcctgggcttcgcactgtggggcgacgtgaacccgcaggccggtaatccgcagagccgcccggacgacctgttccacacctacgaggccgacggctcgatcaagcccggcctgttccgtaccttcgagatgaccctcggcaacaacgagaaatcgaagaccaagctcgccttcgacaagatgaactggagcgggcagcatacccacttcgctcagatgctcggccaggcgttcatcatcccgatcaagcgcaccaagatcaccaagggcaacaacgccggcaaggaacgcaacgacatcgattggggcggcatcatgaagccctacaatccggtcgatggcagcccgtacaacgtgccggaactgccgatggacctgttgcagtatttcttcttcgacgcgccgaccaaggagacctgggacgccctgcacatcgaaggcacctcggacaatggcaagtccaagaacttcctgcaagagaccattcgctcggccaccaacttccctggctcggccctgcacatcatgctgggcggcggcgacgatctgatcatcaagccgacgacccaggccgcaggcagcaacctgccggcagtgcccaacgtggccgccgatgcaggcgtagcagcagcccctgctgtcccggcagttccgcaggcagtgccgcagacggcccctagcgtgccccaggtggcgaatgtagctgcccctgtggtaggtactgccgaggcacagaacgtgctgcctgacgtaccgcaggtggctcaggtggcagctccggcggcggtcgaagtcccgtcggtcccggtagtgccggcagtaccgcaggtctaatgcgcctgccatcggaagagttcctggcaggactatccgcgcagttcgaccgcagcatggcaggcgggacgttggtgtgtgacgccgacggacccgcctacgtggctgcggccactgctaagaccttggacactgcactccggagattctggaagctcattttggagcagcagttcctagcgcactgcacggggacacgggttcacctcacggcagcaggtggggcgaaggcgtaccgggacacgtatccgaccatgaaaccctaccagggccagcgcaagggtaaggcaaagcccgcgctgctggagcctctgcgacgggccgtggcggacgtgcatgagcgcggcggcgcacccgaagggatcgatgtcatcctgcacacgttcttcgaggcggacgacggcatgatgatggacgcctacgccatgcaggacaaggccatcatccggtccgacgacaaagacctgcggatgacgatctacccgtattgggagatcgacacggcgtgtgtgagcaggatcgaaggcggcttcggctacctcaaggaggcatacacgccttccggccagttcaagctcaagggccacggacggaagttcttccttgcgcagtggctcggcggcgataccgctgacaacatccgagggatcgatcgattcaacgggaagctctgcgggatgaagacggccttcgatatcctccacccgatcacggacgaggatgaagccatcgacatgatcctggaggcgtacgccaagatcaagcaaaacccgctggcagaggccgaggtgctgtggatgcgccgaacgcctaccgacaacgcagcgcagtacctgttaagccgcgaccttcgtccggccttccgccagtggatcatcgagctggacgcctaccacgaggcgctgctccagaagcggagggagagtgactatgacgagtgagccgaaggtctaccagataccgcgcagccaacagcgcaccttcaccctgaagctgtgggccgagcagggcaagctatgcccgctctgcggtaagcccatcgatatcagcgtgaagggcgaggcggtgatggaccacgaccacgagacggggctggtgcggggcgtcctgcatcgatcctgtaacaccgcagaaggcaagatcacgaacgcggcgggttcctggggatgcaagtcgatgaagtacaccgacatcatcccctaccttcgtgccctcctgacgtacctggaggggccgaagcatccgctgatctaccccctgcacaagaccgacgaggagaaacacgaagcgaagctggccaagcgccggcaggcagccgccaaacgcaaggcggcgatggccgtcgcaaagcacaacgcgaggaacgtatgagcaaactccgcaagcaattcaccaatgagtacctgcgcaacgtctatgtcgagctgggtctcaagaagggcgccgagcatctgaccaggcattcgcgcttcggcgaagtgagccgccagtgcttccgcaactggtgcatcaagctgggcttccacgacagcaggacacgcggcacgtacgccaagaagggtgcgctgcactggctgggccgaaaggcggccgaggtagtgcgcaagttccctggcgccgtgggcaacgtggtcggccaagggccgaaggtgttgagcctggacatcgagacctcgcctatcgagggctgggtctggtcgctctggaagcagaacgtgggcctcaaccagatcaagcgggactggaccatcctgtcgttctgcgcgaagtggatgcacagcgacgaggtgatctacatggactgccagggcgaccccctggacgacatgcacctgctggtcgccctgcacaagctgttggacgaggccgacatcatcatcgtccagaacggcaagcgcttcgacgtgcccaagatcaacgcccggttcttcctgaacaagatgccgccgccacgaccgttcaaggtgatcgacaccttgatcatcgccaagcagcaattcgcgttcaccagccgcaagctggagtacatgacccacaaggcatgcaccatcaagaagcgcctccacggcaagttccccggattcgacctgtgggcagcctgcctccaggacaacccggaagcctgggaggagatgcgcctgtacaacatcgacgacgtacgatcgatggaggagctgtacatcctgatgcgcccgtggttcgtcggccatcccaacgtggccgtgtacttcaacgacgctgagccgactatccgatgcccgaagtgtggcgacacggatgtcaagcaagaaggctgggtgcatacgcagaccggcaagtacgagcactatcactgcggtggctgtggtggctggagccgagggcggtatacccgcaacacctcggaacagcgcaaggccctgctgagcaactaaggaggctatatgagcctggcgttctccgatccctacgaatctacgggcacccagcccggccagtaccgcaaaggcgcggccccggacgagcgaaaggccggcaagctcccgatgcacctggtggttgaaggcttcccgctgctaaagcgggagcttgcccgcatgatgcagtgggccgccgaggtcaagggctacaagccccacgactggaagaagatgtcggtgggcgagttcaaggccgcccaacaccggcacgaatcccaccgcctgctggacgggccgctggatgacgagtcgaacctgatgcacctcgtgcatgaggcattcaacgcaatggccgccgccgagcgtgccttgatggaccgggagaaaggcaatgagtaaaatctgttggtgtacccgaccgcacgagaccgacgaaggtgtacgtgtcatctgggccttcaacgagcggggcatcggggtaaactacgtcacggcgtacgtcacgccggcgatgatccaccacccggactggcgcgataccatcctcccggacatcctccaggagatggcggagcgcctggaccgcgaggttaagctggtggaattgcgctggttccgcgctgagattctgagctgcggggaatggcgtgactaccgagcaatgacgctggacggggcggtcagcctggccgaggccgagtggggtcccgaggatatcgggcgcgtaatcgaaagacgataggagacggaatggacctgatacagcagcagatcgcccacgaagaggcccttgtcggggcggcgcagaacgacgcccgcattgccttggaaaaggcgatagcccaagggtccatcgaccgcatcccgagggcacgcatcatgttgatgcggatgctccccatcgtgaccgaagcgatcttcgcccaccaggaagcgaaggcggcgggaccggcagcgaagctgcgacacctgctgcggatcatcgacgcccaggacctcgcggtcatggcgctacgggccgggctgtcgatgctcatcaactacccaacgatcaccgcgacgaagtattacacccatatgggcaagatgctctgccgcgagatcgaagtgcggttggccttcaaggtcaaccaaccctattacgaccggacgctggactacctcaagaccagcaggactcgcagcgtccggcacatccagaagacgatggacgcccttctggacgcggtactgcccgaggaggcacgtatcgacctgccggatggcgactacctgcgtctcggcaagttcatcggtgacccgctgatccaatgcggcctgttcgagccgaaccgcttcacaggccggggcggtacgagcgtccacctggagccgtcgccggaggccaaggagttcctgcaagacccgtcggcggcgatgacctggggaggcccaggccgtagcgtaatgctggcaccaccgagaccctggaacgactggtgcgatggcgggtactacagcgccaaggcgcagaagcatcacgtattggtgcgtcgtaccaaacaccagaccaagcgggcacgtcagatgcagctccgccacctgggccgggacaagatgcccaaggtatacgcggcggtcaacgcactgcaatcggtggcctacgagatcaaccacgacgtgtacgagatcatcgagcgcatcttcacttccggcggcggcgtgctgggtatcccgcagcgtacctacccggacaaacctgagttcccgctcggcgacgagtgggccaaggagaacgccagtgaacaagagctggaagccttcaaccgatggaagcgatccgtccaccgatggtacaccggggagcgggagcataccgccaagcttcgcgaatttgctgcactctaccgagttgttcgagagcatcatggcaaggcagtgtacttcccgatgcacgttgactcccgtggccgcatgtactattggggcacaccgaatccccaagggtccgacatcgccaaggcatgccttcagttccacgaaaagcgcgccctcggcaagcgcggcctgtactggctcaaggtccacgtcgccaactccctcggatgtgacaaggtgtacttcgacgaccgggcagcctgggtcgatgagcgatgggacgacttccagcgagcactcgacgaaggcccggagaactatccgaatctcttccccgaagacgagtcgcccctgtgcgccatcgccggtctgctggagctgcgggcggcctacgcatcaggccagccggagaattaccgaagtgggttcatcgtccatatggatgcaacctgctccggcctccagcactactcagccatcctccgagacgagatcggcggagcatacgtcaacctgttgccacctggacttgccaaagctgacatctactcccgagttctcggtctcgttgcagagtctctggcacgagacatcgagagtgctgaaggcgaggctcggggctacgctgtactgtgggataaggccggtcttgccaggagcctgacgaagaaaccctgcatgacgctggtgtacggaaccacgttcaagggtgttgtggaccactgcctggactacctggacgagtccggcctggagattcccgagggtatcccgtcataccgcctgggaagctacatggcaacgctcatactggacgcaattcgcgagacagtaccatcggcagtcttcgccatggaatggctccagcggctcgctaaggcccttcctgacgcatccaaggatttgcactggaccacgccactcggcatgcaggtcttccagtcctacccgaagaccgaggaggtccgggtgcggctgcgggccgaggctgtcgagtacgtcaccctgtacgaggccaaggacgagctggacccggtacgcaacgccaacggcatcgccccgaacttcgtccacgggctggatagcagccacctgggcctgacagccctggcatgcgcggcggagggaatcccgatccaggccatccacgacagcatgggcacctatgcggcagacgtggatcggatgcacgtccacatacgggagcagttcatcgccatgtacagtggcccctgtgtgctcgtagagctggcaaatcagcttggggtagaggctaccccgccccggaggggatcgttgaatctggaggctgtacgggactcctgggcgttcttctgctgaggtggattatgtcacccacataggagcaagtgcatccgtccaaggccctcgtagagggagcggggagagaggagaggtcagggaagacctggtagaggagaggtggagatgagaatggatgactacgaaggattctagatagaatagactaaccagcataggagatatgatagatggctactatgaagacccaccgccctacggttatgtcacccacagtggaaggatcgagaacaggcaagggtacggcccgtcctgtcacgttcacctctcagcagatcgagtggttagaacagaccttccccgaacatcagatcggtcctggaaccacgatggaagacatccagttccaggccggcaggcgagacgttgtgcgagcagtacgactgcgccgacgtgatgccatcgcagtggagctgaagtgatgagtaagtccatctggcgagtacacgcaaaggccggcactccctcggaactccagggcctgtgctggctggcaatacaggagctggaggagttcaccctcttccgctcgaaggacgacgccctgaatgcgatgctggacagtatcgagggcaacgatcgaaccgagctgttggtattccgcgatggtcagttggccggcggtgcctgcatcgtgttcgaggacgacccccacgtcggcccgtgcgtcacagcacagtggcagtacgtcctaccgcgctaccgcaatacaggcgtggtccgggagttcatccgcgaactccaccgtcaggccggctggggtcaaatccccctcgtgtgctggagccatcgtgaaagcgatagccggtacacgatccactaccggagagccaagccttatgggcaagaaagtcaagaaggtgctaggcaagaccatcatcggcaaactcgctgatggcctgctgggcaccgaccttagcggcgcacaatccgatgcccgcaagatggaagagcagaaccgcctaatgcagcagcaggcggaccagctcgcacgaaaccagcaggttgacctcaccgccgagaacgtggcgcaggttgacctaggagcgatggccgatgccactggcaccggcactcgacgacgccggaatcaggcgggcacaggcgtatcgcaaaccctcggtatcaactactgacgaggtacgccatgaaaaccaccgcagctatgctgtgggagaaacttcgggatgggagcgtggagagtcgagccatcgagttcgccaagaccacgctgccctacctgatggtcgatcccatgtccggcagtcggggagtcgtagagcatgacttccagtccgccggcgccctcctggtgaacaacctcgccgccaagctggcgagatcgctgttccccacggggattccgttcttccgatccgaactcactgatgcgatccgccgcgaggccgacagccgggacacagacattaccgaagtgaccgctgccttggctcgggtggatcgcaaagcaacacagcgcctgttccagaacgcctccctggcggtcctgacgcaggtgatcaagctactgatcgtgactggcaatgctctgctgtaccgagacagcgccgccgctacggtggtcgcatggtcgctccgctcttacgcggtgcgccgggatgcgactggccgctggatggatatcgtcctcaagcagcgctacaagtccaaggacctggatgaagagtacaagcaggacctgatgcgcgcaggccgcaacctgtccggttcgggcagcgtggacctgtacacccacgtacagcgcaagaagggcacggcgatggaatacgccgagctgtaccacgagatcgacggcgtgcgtgtgggcaaggagggccgctggcctatccacctgtgcccgtacatcgtgccgacctggaacctcgcccctggcgagcactacggtcgcggccacgtcgaggactacatcggcgacttcgccaagctgtccctgctgagtgagaaactcggcctgtacgagctggagtcgctggaggtcctgaacctcgtggacgaggccaagggtgcggtagtcgatgactaccaagacgccgagatgggcgattacgtgccaggcggtgcggaagccgtccgtgcttacgagcgtggcgactacaacaagatggctgctatccagcagagcttgcaagccgtggtcgtccgcctgaaccaggcgttcatgtacggtgccaaccagcgcgacgccgagcgcgtcactgccgaggaagtccgcatcactgcggaggaggcggagaacacgctgggcggtacttactcgctcctggccgagaaccttcagtcgccgctggcgtacgtctgcctgtccgaggtggacgatgcgctcctccagggcttgatcaccaagcagcacaagccggctatcgagacgggccttcccgccctgtcccgctccgccgctgtgcagagcatgctcaacgcttcccaggtcatcgctggcctggccccgattgctcagctcgatccccgcatctcgctaccgaagatgatggatacgatttgggcagccttcagtgtcgatacctcgcagttctacaagagcgaggcggagctacaggccgaggcagaacagcagcgccagcaggccgcacaggcccaggcagcgcaggaaaccttgctggaaggcgcttccgacatgaccaacgcactcgcaggagtctgatagatgacccaaccgaacgaacagcaactgccgccgggcctcgctaacctggttgccaacgtaccgcctgccgccgcaccgaccccgagtcatgtgcaggtgatgccgaacccggtgatccaaccgcaggccccggtccagcccggccaggtaggtgcgccgcagcaactggccatcccgacccagcagccgcaacccgttccgaccagcgccatgacgccgcactaccaaccggtagcggcacctgccgtgggtcaacccgttgttccgcaagcacccgctcagccggccccggtagctccgccggctgcgggtgcagttcttcccgagaacctggaagtcccgccgccgccggccttcactcccaacggggagatcgtgggcaccttggcagggaacctcgaaggcgacccgcagttggcgccctccatcagctatctggaggcgttctctgacaaactggataccgtccgagccttcggcaaggccgccgagaaccgcgatcctcggttcatcgacgagcactatctgaaggaagttctcggcccggcccaggcgcagcacgtcatcaacgtggccaagggcgtcctgacctatgtcgatgcgcaaaccaaggctgtcctgaaccagacctatgccgccgtcggtggcgaggccgtgctgaagcaggccgcaggcgtcttcaaccaacacgctgacccggccaccaaggccgccatcggtcggctgatggactctggcgatgcccaggccatgcagtacgcagcgaagcagatcattgccttcgcacaaggctccggtgccgttgtacaggctaccggccaacccctgggtgctgcggcacctgcactagcagccctgaccgctgagcagtaccgcgcagaagtgtcgaagctgccgctgaacgcatccgaagccgacatggctgcactgcgagagcgccgtaaggcaggcatggcgcagggtatctaacgaccctgccctactccggccttaaactcacatccaaaagagagagaatcgcatgagctttctgaacgacctgacccgtccgaactacgctggcaaggacgcggacgttgacatccacctggaagagcacctcggcatcgtcgacaagcacttcgcctacacctccaagttcgcaccgctgatgaacatccgcgacctgcgtggctcgaacgtggtccgcctggatcgcctgggtaacgtcaaggtcaagggtcgtcgcgccggtgaagagctggagcgcagccgagtcgtgaacgacaagtggaacctgaccgttgacaccctgctgtacctccgccaccagttcgaccaccaggacgagtggacccaatccttcgacatgcgcaaggaagtcgccgagctggacggccaggaactggctcgcaagttcgaccaagcctgcctgatccaggtgatcaaggctgccgcgatggacgcaccggtggacctggaagacgccttctcgccgggcgtgctggagaagctggacctgaccggcctgaccgccaagcaggctgccgagaagatcgtccgcatgcaccgccgcgtagtcgagaccttcatcgaccgcgacctgggcgatgcggtctactccgagggcctgaccccgatgtcgccacgtgtgttcagcctgctgctggaacacgacaagctgatgaacgtcgagtaccaggcaaccggcgcgaccaacgattacgtgaagtcgcgtgtggccgtcctcaacggcgtcaaggtgctggagactccgcgcttcgccaccgacgcaaacgcagcgcatccgctgggccgccacttcaacgtgagcgccgaggaggctgagcgtcagatcgccctgttcctcccgagcaagaccctgatcaccgcccaggtggcgccggttcaggccaagctgtgggaagaccacgataagttctcgtgggttctggataccttccagatgtacaacatcggtgcccgtcgcccggacaccgctggtgccatcgagctgaagggtatcggcgccttcgacatcaccgcgtgacggctaaggatttaaggtaaggaggtttatttatgcatccgtttgaccaagctgtggttaaggatcctaccgcaagctatgtagatgttaaagcacgtcgtacctttctgcagagcggtcagctggatgatcgtctgaaagcagcactgccgaaagaatacgactgcaccaccgaagcgaccccgaacccgcagcagggtgaaatggttatcccgcgtcgctacctgtctggtaaccacggtccggttaatccggactacgaaccagttgttaccctgtaccgcgacttcgaaaaaatctctgcgaccctgggtaacctgtacgttgcgaccggtaaaccagtgtatgcgacctgcctgctgaacatgctggacaaatgggcgaaagccgacgcgctgctcaactacgatccgaaatctcagagctggtatcaggttgaatggtctgcggcgaccgctgcattcgcgctgtctaccatgatggcggaaccgaacgttgacaccgcgcagcgtgaacgtgttgttaaatggctgaaccgcgttgcgcgtcaccagacctctttcccgggtggtgatacctcttgctgcaacaaccactcttactggcgtggtcaggaagccacgatcatcggtgttatctctaaagacgacgaactgttccgttggggtctgggtcgttacgttcaagcgatgggtctgatcaacgaagacggttcctttgttcacgaaatgacccgtcacgaacagtctctgcactaccagaattacgcgatgctgccgctgactatgattgcggaaaccgcctctcgtcagggtatcgacctctacgcctacaaagaaaacggtcgtgacatccactctgcgcgtaaattcgtttttgcggcggttaaaaacccggacctcatcaagaaatacgcgtctgaacctcaggacacccgtgcgttcaaaccgggtcgtggtgacctgaactggatcgaatatcagcgtgcgcgtttcggtttcgcggacgagctgggtttcatgaccgttccgatcttcgacccgcgtaccggtggctctggtacgctcctcgcgtataaaccacagggcgccgccgcacaagcaccggtgagtctcgagcaccaccaccaccaccactgaatgctactactcgacgcagtgaatgtcatcctgcgcaagatcggcgagctgccgatcccgagcatggatgagacgtatcccaccatggccattgccctccctgagctggaggaccagcgcatccagttgctgacgcaaggctggtggttcaacacctggtggaagcacaagctgacacctgatcccacgggccgcatcaacctgcccaagggcaccttggcattctacccggattccccggacctccagtgggacggcctgggagtgcgcgacgccaacaccggcgacgaccgcatcggtaagtcggtcgagggccggctggtgctgtcccgcgagtgggaccgtatccccgagatcgcacagcgcgtcattgcgcaccaggccgcactcgcggtgtacacccacgagattggcccggacgagaccgcccaggtcatcgcccaggaattgcaggcgtatcagaacgaactgtcccgcatgcacacccgatcccgtccgctgaacacccaggccaagcgtagcttcagccggtggcggcgcagcttgaggacctgagcatgagctacaagcaatccgcgtatcccaatctgctgatgggtgtgagccagcaggtgcccttcgagcgcctacctggccagctcagcgagcagatcaacatggtatcagaccccgtgtcggggctgcggcggcgcagcggtatcgagctgatggcccacctgcataccgaccaaccctggccgaggccgttcctctaccacacgaaccttggtggccgcagcattgcgatgctggtggcgcagcaccgtggcgagctgtacctgttcgacgagcgggacggtcgcctgctgatgggtcagcccctggtgcatgactacctcaaggccaacgattacaggcagctacgggccgccacggtggccgatgacctattcatcgccaacctgagcgtgaagcccgaggccgaccgcaccgacatcaagggcgtggaccccaacaaggccggctggctgtacatcaaggcgggccagtattcgaaggcattctccatgaccatcaaggtcaaggacaacgccaccggcaccacctacagccacacggctacctacgtgacgccggacaacgccagcacgaaccccaaccttgcggaagcgcccttccaaacgagcgtaggctacatcgcctggcagctctacggcaagttcttcggtgcgccagagtacaccctgccgaactccacgaagaaatacccgaaggttaaccaggatgccgatgcggcaaccatagccggatacctcaaccagcgtggggtgcaggacgggtacatcgcattccggggagatgccgacatcaacgtcgaagtgtccacggacatgggcaacaactacggcatcgcgtcgggcggtatgagcctcaacgcaacggcggacctgccggccttgctgcctggtgcgggcgcacccggtgtgggtgttcagttcatggatggtgccgtcatggccaccggctcgaccaaggccccggtgtacttcgagtgggactccgctaaccgccgatgggcagagcgggccgcctacgggaccgattgggtcctgaagaagatgcccttggcgctacgctgggatgaggctaccgacacctacagcttgaacgagctggactatgatcggcgcggctccggcgacgaggacacgaaccccacgttcaacttcgtcacccgaggcatcaccggcatgacgaccttccagggtcgcctcgttctcctgtcgcaggagtacgtctgcatgtcagccagcaacaatccgcaccgctggttcaagaagtcggcagccgcgctgaacgacgacgatcctatcgagatcgccgctcagggcagcctgaccgagccgtacgagcatgcggtcaccttcaacaaggacttgatcgtcttcgccaagaagtatcaggccgtggtcccgggtggcggcatcgtgaccccgcgaacagcagtcatcagcatcaccacgcagtacgacctcgatacccgggcggcacctgctgtgactggacgcagcgtgtacttcgctgccgagcgtgccctgggtttcatgggcctgcacgagatggccccgtcgccgtccacggacagccactacgtcgccgaggacgttaccagccacatcccgagctacatgccggggccggctgagtacatccaggcggcggcctccagcggctacctggtgtttggcaccagcacggcggacgagatgatctgccaccagtacctctggcagggcaacgagaaagtccagaacgccttccaccgatggacgctgcggcatcagatcatcggcgcgtacttcaccggcgacaacctgatggtcctaatccagaagggccaggagatcgccttgggccggatgcacctgaatagcctgccagcccgcgagggtctgcaatatccgaagtacgactactggcggcgtatcgaggcgaccgtcgatggtgagctggagctgaccaagcagcactgggacctgatcaaggatgcctctgccgtataccagctccagcccgtggccggtgcctacatggaacgtacccatctcggcgtgaagcgcgagacgaatacgaaggtgttcctcgacgtgcccgaggccgtggtcgggtcggtgtacgtggtcggctgtgagttctggtccaaggtggagttcactccgccagtgctccgagaccacaatggcctgcccatgacctcgacccgcgcagtgcttcatcggtacaacgtaaacttcggctggaccggcgagttcctgtggcgcatcagcgacacagcccgacccaatcagccgtggtacgacacgacgcctctgcggttgttcagtcggcagctcaacgccggggaacctctggtggacagcgccgtggtgccgctgccggctcgggtcgatatggctacgtccaagttcgagttgagctgccatagtccgtacgacatgaacgtccgggctgtcgagtacaacttcaagtccaaccaaatctacaggagggtgtgatggctttctggctaccactattggccgctggcggcatgtccgcccttcagcagggattggccaacaaggaagagcgcaacaagatcaaggccgagaacaaggctcgactgaagacggacctcgacaacctgggcgccgccgcccgcgacatcgccaacctcggagtcatggccgctagctaccgcaagcaggccgtggcctcgcaggtggaggccaaacgccaggggatgctcgccggcggcagtgccgaggctcaggccggagcgttcggcgtcaagggcgcatccgttgatgcggtggccctggatatcgagcgggaggtcggcgaggctctgttccagattgacgacaacctggacaatcagatgtggaacctcgccgagcaggcgcactccatccaggcccaagctaaggccggcctgctgggacagaagagcaccactgcggggcaacgatccccgctggtggctggcctgatgtcggcgggttccctgtatgcaagtcaatacttcaagttcggcgccacgcctaaaggaggcaactgatggcggaatcgcaacgtgcttcccaagagcttgggatcaacgtcgggcagacgcaactccagccgggccagagtgcccggcgtggggtgcgcgactccgaagtcaactacagcgggccgagtgtaggctcacagattctcgacggcatcctcggcgccggtcagcaaatcgcaggcaagtggttcgagcacaacgtgcagcaggaagtgctgcgcggtgagcgtgcccgcatggccggcgaggccgaggaggcggtagacagcaacatcctggccaagcccttcgtgaagggcggctggcgtaagcaggactaccgtatcgctcaggcggacttcagcctgaagatgcagcagttcatcgccaacaagggccgggagatgactcccgaggagttccgcaaatacctgtcccaggaggctacgcacgtcctggactcgacaaagggcatgaaccccaacgacgccctacaggcgctggcgcagcagcagaaggccgaggagcagctcttcggcatgcaggccaaggcgtacatggactggtccatcgaccaggccgcacgaggcttccgcacccagggtaacagcatcctggccaaggctgtacaggcccaggccaccggcgacgaactgtcccgacaactcagcctggaagaggctggcctgttctataccaacatcatgacctccgaggatatcccgctggaggtgcgtgacaaggtgggcatgcagttcctggcagccagcctggacatgaaccagcggggcatctacgagagtctgcgcgatgccggcttcctggacagcatgtccttcgacgaccggcgtgcgctcaacggcctctatgaaaagtcgaaggcacagacccgggccaaggaatcgatggctaccctgcgggccgatgcggacttccagcagcgggtggctaacggggccatcacagaccttgccgaggtcgaggcgtactcccggggcatggtcgaggagggccgctggagcgacgcccaggccatctcgttcatgaccaaggccatgaccggcctgggcaacgctcagcgcatgcagggcatcatggcggccctggaggctggggacatcaacgccctgcacacgctggggacgaacgtctccgaggcactggagcagtgggacaagatgcaggcggccaacggctcaagcctgaccgatcgactcgtacagggcacgcagctcggcctgcgcctggggaccttccccaagacctacggcgagtccgtgggcagcgccgtgcggatgatccaggcggccaaggaaggcgaggcgaacccggagctggtcaatacgttgaacagcatcttcgagcaggtggcctcggcccaggagatcaacccctccgccggcaacgtgatgctatccggcatcccggaagccgagcagggcgctgtggcctgggcactcaagcagatgaagatgggcatcgccccagctcaagcactgcgcgagttcagtgccaacgccgaagtcgtgaagcagatggacgagttcgagaaaggacagaacaccaaggcattcaaggacaacctcggcaagcaggtcaacgacaagttcgtgaacaacatcttcggtcgggcctggaacatgctgaccggtgagagcgacctgagcaacaacgaggccgttctcagcatgtaccgtcgagcaaccatcgacgaggcgaactggctggccagcgaccgcaagcatgcgggtctgcttaccagtgacacgggccgcgaggccctgctggagatcgccgccgccaacgtgcgtaaccgcaccatccaggtaggcgaaggtcggaacctgaaggaaggggacctgttcagccgccgcgacagcgcgccactgatcctaccccgtggaaccaccgccgagcagctattcgggaccaacgataccgagaccatcgggaccgtcctggccgagcagcacaagccgcatgtcgaaggactcctcggttacaagtcggtagtcgccttcgagtacgaccgcaccagtggcagcctcctcgccgtcgagtacgatgagaacggtgtggccctggaccgcacgcgggtcgatccccaggcagtcggtaacgaggtgctcaagcgcaactcggacaagctgaacgcgatgcgaggtgccgagtacggtgccaacgtcaaggtcagcggcacggacattcgcatgaacggtggcaacagtgccggcatgctgaagcaggacgtgttcaactggcggaaggaactggctcagttcgaggcttaccgaggggaggcgtacaaggatgccgatggttatagtgtgggcctggggcattacctgggcagtggcaatgctggggcaggtactacagtcacgcctgagcaggccgcgcagtggttcgccgaagacaccgaccgcgcactcgaccagggtgtgaggttggccgacgagctgggcgttacgaacaatgcctctatcctgggcttggccggtatggccttccagatgggcgaggggcgtgcccggcagttccgtaacaccttccaggcgatcaaggatcgtaacaaggaagccttcgaggctggcgtacggaacagcaaatggtacacgcagacgcccaaccgggctgaggcattcatcaagcgcatggcgccccacttcgatacaccgagccaaatcggggtcgattggtacagcgccgcaacagcggagtaagacatggcacagcaattcaagggccgcatgacgcccaagtacccacttgaccaagcacagctcgacgaggcccaagtacagggccaactcgacgcagtgcctaccgtggggttcgacgccctgacgggtggcgagatcggagaacggaacgtggcagcgggccaacgagccaacgcgcgggaactggaacgcatcgtagcggaccaggaactgccggcccttgaccgtgcttccgcactctggaaccagtccaccctcgtcggacgctggggcgatgcgctccagctcgacgcggaccttgcggcgaacagcaccggcgaggtggaccccaacttcgacgccgggacctacggggtccaggcgctccaggcggcgggtatccagccgactgacaactatctccagatcatggcccgtgccggcaatgccgaggacgcggcctacctcctgtcgaggattcaacggtatgagcaggacgagcaaatcgtgcgggacaacccgtactggaacttcgcggctggcatgctggaccccgccgctctggcagttgatgcggttactttcggcgctggccgtgctctgcggctcggtcgtgctggcatggctgctgctggcggcgctgggcaagtcgggtatgttgctgggctggatgccgcaggggccgacgtggatgccggaacctacatcgtggcaggtgctcttggcgctggcgtgggtgctctgctggggtctggtgcgggacgcattgccgcagaggccccaacgcaaccgcatgtgcccgaagtatcggcgcctactgtcgggctgccagaagtagccatgaccgccgaggaggccgccgcacgcggcttcaaggccggtgacgtggtagacctgctggacgagggcaccgtgctgtcccgtgtcagctcccgtgtggagcaggccgagataccggccatcccgcgccgtgacactgccttcggcgacgagctgcacagcctgtcgggccggaagctgtccgaggtcctggaccacctcaagacccacgcagaggttcccaagccgctccagggcatcgccgccaaggtggctgataccatcaggaccctggagggcctgggccagcgaaccgcgttccgagtggtgcagggtggcgacactgccagctccgcattccttaagccgggcacggcgggcatccactccacccagggcctcgacaccttggtccaggtacgcggcagcaccgcacctggtcgagttggcaccaacccggtgaccgtgctccacgaggcggtccacgctgccaccgtaggcgtgatgaacgccgccctgcgcaaccctggcgcgatgagtccgaaggtggctcaggccatgcagaccctggagaacgtccggggtaacgtgctcaacgccctgaagcaggaccgcgccgccggtcggcaactgtccgagttcgaagagacgctgctggccggcaactccaacaccctggcaaacgtcaaggagctggtggcctggggcctgacggatacccgcttccagcggaccctgaatcgcctccgctacagcgacggcgggccgggcctgtggacccgtttcgtggagggcatccgtagcctcctgggcctccggtctgatgccgacacggccctgagtcgcgtcctggccgcctctgagacgatcatggacgccatgccggggtacactaaggctcaggctaagtgggccaacaagggcgctccggtgaccgaggaggccagcctggagaccatcgtgcggaccaccagggagcgtgcccgcgagggtgcgggcttcgtgaaccggttcttcagcgaggcggacctactggcacagcccggagagggcgcacggcgcctcctgagccgtcttatcgacgaccctgtacgtcgggatgggttcagcacgaacgacaacgcagcgagctatttgcgccgttaccggaacgagttcgagggctacgtgaagtcctacgacgagatgatggccaaggcaatggctgagcagggcgtgggcctgacggcacgtgcgctgaactcccgccgcgccatggcagtccgggaccagcttaacgagcaggtcacccgcgagctgctgcgccgggaccgggagtggaccgcctacggcagcgtccgcgtagaccccaacctgccgccgaccatcaaggccctggccgaccgctcggacgagattcacggtctgatgggtcagcgtgccagggaagccggggtccggggcttcgaggacttcgctccgcgtcccggatacttccaccgctcgtggaactggtccaagatggcgcagatggatgaggccgcccctggcctggcccggcgtgctatcagcgaggccgtgttccggggcatccctgggctggagcgtgccgacgccgacaccatcgcacaggccattgtgcagcgggcacgggaccgggctaccggtatccgctccgagttcatgggcgcgatgggcgtggcggacacggcattcatccggcaggcgctggaggaggccaacgtgtcccaggccaagttcgacagcatcatggccaagatcgagcagaagcagtccgaccagggcaccgtcaaatacggcaagggccggctgtcgctggacatgaccgccgagatcaaccacaatggaaccgtgtaccgcgtgcaggacctgatcgaccgggacctagaccgcctgatggagaactacgccggcagtatgtcgggccgctcggcactggcccgcgcaggcatgcccggcgactccgaggtggaagccttcatccgtgagtaccagcgggaggccgcgcacctgggcaccgacaaggtgcaggagctgacgggccaactgcggggcgtcttcggggacttcaccggcaacgtgccgcgagagcatcagctcggccccgtcgcacagcgggccagcgggctgaccagcgccaccatgctgggattctccggcgtgtaccagcttgctgagctggccacgatggctcaccgccagggcgtcttcaacgtaatgaaggccatgctgaactcccgcctgggtgacttcgtaggtgccatgcgtcgagacccggacctcgctgatgagatgcagaccgtcctcggcctgaacctcgccaacgacattcggatgaagccctggaagcggcagttcgacaccttcctggccagccaagacaccttcatggatcgcttcctccacgcgggtaagcaggctgtcccggtgctcaacggcatgaagttcatccacaactggcaatcccgcatgaacgccaacctcaccttgaacaaggtggcgcgggcggcgcagggggatgaagcagcccttcgcgtgcttcagcagtacgggaaggacgtggactggacgccagtcctggcgcgggttcgcggttatgtcacatacagaggaaggaacgcccaatccatgaattggggcgcctggagccaagcagacgtgaacaccgtcatgaacaccgcattgcggatcatggacgactcactgctgtacggtcgagtcggtcagaactcgggctttgcccggtcacctgtcggccaaatcctggggcagttccgcagctttgtggccttcgcgcacaacaagctcctccggggaacctatgagaactccggcgtgcttggcgtggcctcgctcctcgcattccagtatccgctcaccgcgctgatgatgggtgccaaggcagcgatcaacggcaagttcgacacctctgatgaaggcatccgcaagatggccatcgacggcatcggttacactgccggcctcggcttcaccgccgacatgtggggcgtgatcaccggacactctaggatgtccgccccggtcttcggactggcggagcactccaacgaggtgttccgtggcgtcaaggacctagtaaccggcgacgaccccgcagccgccaccggcgatatcgtcaacggcgccgcaggggcactgcctttcgtcaacgtattcccggcgaccaagttgctgctggaatccatcaaaggggaataacgtggctcggttcaagaatcccgagaccatccacgttgcagatggggtcgaggctgtcttcagtctcgacttcccattcctgcggcgtgaggacgtattcgtccaggtcgataagatactcaccaccgactatacgtgggtggacaacaccaacattcaattggccgtggtgccgaagcagggccaagaggtccgcatcttccgcgacacgcctgcccaggtcccggacactcagttcagccagggcatcccattcctgccgcgctacatcgacgcgaacaacaagcagctcctgtacgctgtgcaggagggcatcaacaccgcgaacctcgccctggatggcgtactcgacgcgatccgtatcgccgaggaagctcgccgcctggcacaggaagcactcgacgccgccaatgaggcgctgcgccgtgccctgggcttcgctgagattcgcaccgtgaccgaggactcggacatcgatccgagctggcgtggttactggaaccgctgcatcaccgctgacaaacccctgaccttgaccatgcagatggaagacccggatgcaccctggatcgagttcagcgaggtccacttcgagcaggcaggcgtgcgcgacctcaacatcgtggccggccccggcgtgaccatcaaccggttgcagaacaccaccatgcagctctacggcgagaatggcgtgtgtaccctcaagcggctgggcgctaaccactggatcgtgttcggagccatggaggacgaataatgcgcggcattatcgcgggcatcatggcctcccaaatccggcgtccaaaaccaatcctggcgacgtacccgtatcccatcctagctacagacgacgcatggtcctgccggcccaacatagtggcggcgctgacacgcgacactctgcacgaggttgtgaaccagccaggagaggacacctaccacgcgacctccagcgtggtaagcgtactgctgcggtcgctgactcagctcggctacggcggtggcgatgggttcctgaccggacctgccgtcaatgcagccttgctgcgcgatacggtgaaggaatataccgcagagccttacgcattcctgtcgcagaccgcagtggccggcgcagaactgaaggttgtggttgtatactccgagtatatcgtggagccgtacgccttcgccacctcgacagcaattaaacaggcggaactgaccaatgtttgagacacgagttaagggtcgctacaccgtgacccatctgaaagccacgggtgaagtcctggcacagtacaccttcgacaacctcatcactaacgcgggtctcgactggatttgcgccatggacacctcagacctgttctcacaggccctggccgtgagtaccagcacagcagaccccaaccccgctgcaccctccctgccggaggaagtacgacggaccacctcgtacgccccgaacggggatgttacctcgggtctggatggggagtggatttactggcacaagcggtggcgcttcccgataggcacccttaccggacaggtactggccaccgtgggcatcgtggcccaatccgaagttgggttcgagagtaacaccggcgcgaagattccggcagggactccactgtcctacacccggatcaaggatgccgccggccaacccaccaccctggtggttcaggccgacgagattctcgacgtgcagtatgagctgcgcagcaaggctgtggcgatggccgaggccaagttcgtgatctctggagtcgagcgtaccatccgccttactccgctgcccttcgcgaaccggcgtaacctctacggtgagcgctgcatcttctacaacgagagtcctcggattgacggtaagaatgcgtccggctcggatgtccaggatggccagtgggtgaagctgtacccgcgatatacgcggggcacctacaaggggcagctaatgctgcgggccaccgttgataacggcaacatgccgggaggcatcaccggctgcaaggacctgaagatttacaacggtcggaactacgcactcaccatcgacccgcctgtagtcaagaacaacacgcaggaattctccatcacgatggagttctcggtagcgagggcataacccatggcactgatctacgacttcaacctggacctcgatccgaaggctaagtccaagttcgtaggtgcgcgaggccgtagggacatcagcgacgtgctagacttctgcgacgggggcgtggccatccaggacccgtcgcagggtatgatggtccgcgtgtggcgaacagagcttcgccaggacgggacctacctggggcacgaggacggctcgaacgagattcgcatcggcggaggtatcgaagaaggtatctccacgatgtccctcgacttcgacagtaacatgaactacgtgtgtgctttcgtacgagccgatcgaactggtgcaatctcctacttcaacgtgcagcagggccgccggctcctcgtggagcttgggcaggttgactatgccaaggtggccttggacgataagcgtcctggagctactgcctgggcacaggtcatcgtaccttacacccgtaacggcaacctgtacgtccgcacacagaacgagaactatacggtagagcacctggaggtggataccggcaaggtattccgaccgctggtcaaatgcggtatgggcaccaacctccgcttccaagtccaattcagagggcacatgtaatgagcaaaaagcagaccgcgagtgctgagcggctgggcctgctacacgagctggtctgcaccgctatcgagcgcaacttcaagtggtacatggacaacgacatcccgatccccgcatcggatatcgctgccgccaccaagttcctcaaggacaacgagatcacctgtgatccgtccgacaccatcaacatcgaccggctccgcgaggagatgcggcaggcgcaggccgagaaccgccgcattgccttggagggcttcatcgccggtgagaccgacgacgagatggaacgcctgtacacccactaaggaggcagcatgacgccgcaagaacgattccagatagcccacgaagtgcgggacatgtacccgcgcttccgggacttctgcctggacgccatgctgttcctcggcttcaagatgacgtggatgcagctcgacatcgccgacttcatgcaggattcgcccaacaaggcgatggtcgctgcgcagcgtggcgaggccaagtccaccatcgcctgtatctttgtggtgtggtgcatcgtccagaacccggctacccgcgccatgctggtatccggctctggtgacaaggctgaagagaacggccagttgatcacgaagctgatcatgcactgggacctgctggcgtacctgcgccccgaggcccgaatgggtgaccgtacctcggccaccagcttcgacgtgaactgggcgttgaagggcgtcgagaaatcggcctccatcaactgcatcgggatcaccgccgccctccagggttaccgtgctgacatcctaatccctgacgacatcgagaccacgaagaacggcctcaccgccaccgagcgggccaagctgacgcggcagtcgcaggagttcacctctatctgcacccacgggaagattctgtacctgggcacgccgcagagtcgcgagtcgatctacaacggcctgcccgcacggggcttcctgctgcgcatctggccgggccggttcccgaccctggaagagcaagagcgctacggcgactggctcgcaccctccatcctggcacgtatcgcccgcctggaggagaaaggccacaacccgcgcaccggcaagggcctggacggcacccgtggctggccggcggaccctcagcgctacaacgaagaagacctgatcgacaaggaactcgaccaaggccccgagggcttccagcttcagtacatgctggacaccagcctcgccgacgagcagcgtatgcagctcaagctgcgcgacctgctgttcatcgacgccacgcatgagagcgtacccgagcaagtggcctgggctgccgacgagcgcttcaagctcaagttcgacgcccaccgattcccggtcatcaagcctgagctgtacctgccggcgctgatggctggcggctgggcaccgctccagcagatgacgatgttcgtggaccctgccggcgatggtggcgacgagctgtcgtatgcagtaggcggaactctcggcccgtacatccacgtcgtgagcatcggcggctggaagggtggatttgccgaggagaacctggagaaatgtattgccctggctgcgcgttacggcgtcaaggtgatctatgtcgagaaaaacctcggcgcgggtgcagttggccagctcttccgcaaccatatgcgatccatcgacccggacaccaacaagccccgctatgaggggatcggcgtagaagaccgccagaagtccggccaaaaggaacgtcgcatcatcgacaccctgcggcccatcatgcagcggcaccgtctgatcttccacgtctcggcgatggattccgaccacgtgtcctgccagcaatacccagcggacaagcgcaacgagcgctccgtgttccaccagattcacaacatcaccaccgaccgaggctcactgccgaaggacgaccggatcgatgcccttgagggccttgtccgcgagctagcacccacgctcgtaaaggacgacgaagccgcaacccgcgctcgtgaagaggctgccaagaaggaatggctgaacaacccgatgggttacactaagtctgtccttcggtctctcggcatgggccgggagcgtcgcaagggccgcccaaaaggacgaagactatgatgctcgataccgccaccgaggcgggcaaaggcaccctcgccgtcaccggcgtggggattgccgtttactcgccctatgagatcgccagcctctgtgctgcggtactcaccgcgctctacgtgggcgctcagctcatcaccctactcccgaagatgctcgatagcatcgcggagcttcgccggaggttcaagaagtgaacaagcccctgcgcggcgcagcccttgcggctgccctcgccggccttgtcgccctggaaggcagcgagaccaccgcctaccgggacatcgccggcgtacccaccatctgctctggcaccactgccggggtcaagatgggcgacaaagccacaccggagcagtgctaccagatgacgctcaaggactaccagcgcttcgagcgcattgtcctggacgccatcaaggtgccgctgaacgtcaacgagcaaaccgccctgacgttcttctgctacaacgtgggtccagtctgtacaaccagcacagcgttcaagcgcttcaaccaaggccgcgccaccgagggctgccaagccctggctatgtggaacaaggtcacgatcaacgaccagagggtcgtatccaagggcctcgtgaatcgccgcaacgcggagatcaagcaatgcctcgaaccatcgtcgcaatactcgtccttgctgtggtagccctgggagcctcatacggcttcgtccagagctaccgagccttgggtatagcccaggaggagatcaagcgtcagacggcccgtgcggaggccctggaggtgcgttacaccaccttacagcgccacgtccaggaggtcgccgccaagaccaacacccagcgccaggaggtggaccgtgccctggaccagaaccgcccgtgggctgaccggcctgtgcctgctactgtcgttgacagcctgtgcaaccgccccggcgcccgctgtgctgtgcgaacaccctctgattgaccctaccacccaggctggcctaatccgcgctgtagcggcctatcaggacgccctggacctatgcaacgccctgaatcaaggagactgacatggcgaacacccgtgatcaatacctcgctggccgtaacaccggcctgaccttctaccaggtctgccagcccggcaccgacaaccgcatcgccctgcacgacatggacgaggccgatgtcaaggctaaggccaccgctgtgattgcagcagcctctgccctgggcggcgagggtggcgctactccaccggacccgctcaccgcctacaaggtgaagaacggtgacaccctgcccgtggacggcggtggctccgtgaaggtgaccgtagccaacggtgccatcaccaaggtcgtgtacaccgcaccggcgggctgagctacagcccgtccaacctgatccacccataacacaaggaactgaaccatggcaaccttcgccgctgcaactcagaaagacctccgcgccttcgccggcaccatcgagaacctgatccgtccgctggaggaagcggccctgggttctggctacaacgagaccaagctgcgcgctgaactggtcgcgcacctcgacgagctgatggctgctgtcgagactgccaaggcgctggtctacaagtgatcgacgagtagctcaagccgagcacctgcacagtcgggtgctccactggaactactggaatttttattgagggctggctgtgggtgggagttggtagtggtgggcgggagtagttactccgggtctaattttggtatcgtcgtgtgagaaccctcccgactctgatcagcccacccttcccccgtaggccctccgcctggtgggccactgcctcgcattgcctgggtgttgcctgggtcatccctgggagcttccagctacgctgggtggtggtgggcttccctgccctgtcgctgtcctgtcgccgcccattctacgcatcctggcgggagtgtcaacccctgggtggtcggtgccttgctcggctacgctccagcgcttccgcgtggtcggctaggcggttggctcgccagcgcttcgcccactctacacctcgctccacctcggaccacttgtccgccagcatcatgcgctgccatgccgcgtcctgctgtagccatgccctgctggctctgtcctgtctgctcagcatcctctgtctcctctgtctggctccctggggcttccctggggcgctgctgtggtcctgtcgggtgatggtg

SEQ ID NO: 50 - DNA, 67429 bp, synthetic construct
  source 1..67429: mol_type = other DNA
agtaatttggtaatttggtatactttagtatttgaaagccttgcggcactaagcctgtacacttcccgtcaagtttccgattccgctcaactcgcggcagggtcgccggaaacttccagacttacaatccatgggtcgcggcaacaccacggcggactaagcggcaagcgccaaaactcgacgaacggaaccggaaatttgggagcgcgacagaatcgctcagctggacatatttctaacattcgatttaacactcctcccaaacactcaccaccatcctcacccaccaaccgccgactcgatcctcacccaccagcaaacctcccatataacatcctataacaccacctaacactcattcaccatcaaacccacccagacctacaggccacccacaagcagcccatagacgcgatccctggccccatagtacaatcgcgccatactcagtgtcgcggcagagcaccaggggccatccgccaaccaagccaccacgacgactccagaatcgaactcagggacgcagcaccaaatgaccaaattctacagccccgacgatctagtcacgccacaggaattcgcagacccgcatttcgcggcgatcaaccaaaagcgattcgacctgtacatcgacctgcgcgtccaaggttacagctcctggcgggtcttccgggccatctggggcgaggagcatatggacggtcccgcgcaggcccgcatcttcgcgatggagtccaacccgtactatcgcaagcagttcaaggccaagttgaacgcgaccaaaacgtccgatttgtggaatccaaagacggcgctccatgaactcctccagatggttcgcgacccaaccgtcaaggattccagccgtctgtcggccatcaaggagttgaacgttctggctgaaatcacgttcgtggacgagtcgggcaagacccggatcggtcgcggtttggccgacttctacgcatcagaagccgaggctcagaccgcgaccgtcgctgctgcggccgaagccaatggctatgtgccggaaggtgaagagggagatttcccgtctccgtctccggaaccgaccgaggaagaccgcgccaaccccatttagacataaaataacggctaaggatttaaggtaaggaggtttatttatgcatccgtttgaccaagctgtggttaaggatcctaccgcaagctatgtagatgttaaagcacgtcgtacctttctgcagagcggtcagctggatgatcgtctgaaagcagcactgccgaaagaatacgactgcaccaccgaagcgaccccgaacccgcagcagggtgaaatggttatcccgcgtcgctacctgtctggtaaccacggtccggttaatccggactacgaaccagttgttaccctgtaccgcgacttcgaaaaaatctctgcgaccctgggtaacctgtacgttgcgaccggtaaaccagtgtatgcgacctgcctgctgaacatgctggacaaatgggcgaaagccgacgcgctgctcaactacgatccgaaatctcagagctggtatcaggttgaatggtctgcggcgaccgctgcattcgcgctgtctaccatgatggcggaaccgaacgttgacaccgcgcagcgtgaacgtgttgttaaatggctgaaccgcgttgcgcgtcaccagacctctttcccgggtggtgatacctcttgctgcaacaaccactcttactggcgtggtcaggaagccacgatcatcggtgttatctctaaagacgacgaactgttccgttggggtctgggtcgttacgttcaagcgatgggtctgatcaacgaagacggttcctttgttcacgaaatgacccgtcacgaacagtctctgcactaccagaattacgcgatgctgccgctgactatgattgcggaaaccgcctctcgtcagggtatcgacctctacgcctacaaagaaaacggtcgtgacatccactctgcgcgtaaattcgtttttgcggcggttaaaaacccggacctcatcaagaaatacgcgtctgaacctcaggacacccgtgcgttcaaaccgggtcgtggtgacctgaactggatcgaatatcagcgtgcgcgtttcggtttcgcggacgagctgggtttcatgaccgttccgatcttcgacccgcgtaccggtggctctggtacgctcctcgcgtataaaccacagggcgccgccgcacaagcaccggtgagtctcgagcaccaccaccaccaccactgaagaagcgacaaagccccggactctagttcagaatccggggctttcttttgggtttcttattctccagcttcgatgatttcgaagttgtatttgacgccttcgtgctcgaaagtcaatttgccggacgctttcagctgcatgcggaagcggatatgtttcgaagaaggcaggccgaactcgatgaatgctgcgttggtggaccggaactcgccgcgcttgcctttgacagtcacagccacgccatggcgctgagtgcgtttcttggaaacttccgggtctttccaggagttggcgatggctgccgacaggtctttggactctttggctttctccggagcgttcttggcctcttcgcgcatcttccggatttcttccagcgcttcctcttcggtgatctcttcttcaggcttcagattctcttcctcggccttctcttcttccttcttcttcttggaagtgcgggttttgtagactttggccggggcttcctcttcctgaaaggcttcttcctcggccggcagagcattcaggatggcgaggcagcgacgctcagcagtcttgcggtcagagaaacgcttgacggtcgcatcggcgttgtgagcgttgtagaaggcgaccagttctttcatttctgcgttctggatgtcgccgaaggttttgatggagttggtcattttgcgatcctctgttttggaagatttcgtttgggcttcagtttgtcgccccgttgaaagagattatgcctaggtcgatgctgcgtgtctacatttattttagcagaatgatggtgaacccgacgaacggttgtcgggtgtgaaaacaccgcaggacgaggctgcggtgttttctggacgatggtgcgacggtcagaaagtcgggatcggctcgacgggcagatcgccgggcttgtcgttgtccgacgcgggcgacggactggacgggatggccccggaccgaagccccagcggttcaggccgcctgcttacctgcggagctggaggcgcaggcggagcttttggtgcttgtggaactttcggaactggaggtgctggcggagacatcggcccttctggaagatctggaagatctggaaggctcgtcgccgcgtgatcgacgccaacgaatggctctggaaggtcgatgaggctcggcaccggatcgaagcctgtgaatggagtggtcacgcagcgcatgttcggatgggtcggcagattgttcaggacgatggagtccgcccagacatacgggtttttgtggttgccgggtccgtggctgatgatctcggcaggaatatggccgttcatggtaagccattccgccatcccttgccgagtcagcgggcttaccacgatctgaccagtggactctttggcgatggcgaacagatcaccgaattcgaatccgatgattgtgtagttggacctggactcgccgacgaaagccagggtttcgatgttgtggtggatatcttgttcttcccagatgtaaagcatgatgcgctcctcaataaggctgcttgctgtattcgaccagagacataccggccggaactttgaagcggacgtattcgatcatcatcgccgtgcgacgccgattcgtgcccgactcgtcattgacgaatagttcgcactggtgcggaatgactcgcgtcaccaggcactcacctttcgagctgtagaacttgctgtaggctgcgacgcctcgcgtcatgttcagacggatcgtttcgcagagtcgctgcgcggccgacgcgctggacagatcggtcggactgaccgtcacccagtaatggccactttgttctttatcggacataagctgccctccaatgagaaagcctctgcgactcggcagaggcttgttgttgttagtcgcgcttcaacagaacgactttgtcatatgcgcgatatttaccgcgccagtcttcccagtagtcgccggccgggcaggtaagctccaggttgatttcgtcgcgccagcattcgacagaaaggacaattgccttgttcctggctgcggaatccgccctgagcttaatcagaatttcgtcgccagttttcaactcatcaactcttacaacttttgccatggtgttctcctattgggcagcgccgcgagggcggatcgggtcgatgtcatgtaagcagatggtaggatagtccctggccaacttgagcttgaagtccacccagtcagcgccgatgagtgccgagacttcgatgcttactttgctgtgcggcgcagctccagatcgcaggactatggcccgacgccgaacgggatcgttgacgtcaacatgagtgagtatttcgtcgccgacgagcaactcacaggccatcaatattttggccatcatacactcctatgagaaggcgcggccaggacgatcccagccgcgccgatggattaacgtttgtgaaggatggacactgcgtccacgtcgaggatgctaatggtacggcgacggcgcggattgctgcgttcatggatgcgaatcaggttcgcagctggagcttcgtccaccacccatacgtcttccggtttctgcgtccggagcaggaccgtcacttcagtattctgggcgaggccgttgcagatgaaagtgaacttggacgagggagttctgtacatttcgagattcctttttggacttctggtccggcttctcagccggtgaagagattatgccctgattctcaccgccgagtaaagcatttgtgtaccaattctcccgtcaggtggaaccaaagtgcggtatcgcttatggctacgctaccgcgccatggcccttcttgctcgcacactgcgaaccacaggctgatttccatccttgccaggactcggccgaaagattcgaacctgcgccgactggacaggatgtcgacattcactcgtcgattgacctcataccggcgaccgttgatgacgaagaccagccgcagggtttgtccgtccagacattcccagtatctggtttcataccgaagccagtagcgctttccagccgggcctaccatggtcatttaatcgatgctcctggccgcgccacgcggtccggtcggcgggacgggatcgaaccgacccaggatgtagtcgggccggcgcgcttcctgaggacacacggcgagaaggcgccatcctgcgtccagggcagactggagttcgtccgtgcagcagtcttccttgagcagcagacggttgacgttctggagattcggaccaggtatggccgatcctgtgagtgagttccaaccctcgattccactcaccatctccggttggttgatgtagcttacggacataccggccaaccggctcgcggccagctccagacgctccagcatgggtcgcagagcagcttccgggtcaatgtcgtcccagagaaggaccaggctgatgatggtatacggatagtccttgtccagatcccaggctgaagcggtcaggcggcccaggccgatttcattacacataacgggaacgtcgttgctccaggtggacggctcccagttccgctcaccaggattcccgattgttacgccttccaggttccccagtagaacatggagcttgctgacatattccgcctccaaggctttccgctcttcgtcggtctggttgtggcgatagaaggatggagggctgactttggcatggtagagtttcataactgttcctcggttttggaagatttgaaagttagagaatggtgtcgcagtatttctcgaaaggactctggcgcttcttctcgcagatcgcgcaggtgatttccaggtcgggcagctcgctgtaagtcttgccgagatacagccagcgcttgcacagactgcgaccgtccgccatgaagaaatggactttgcgagcgttgccgggttgcgcccagccgcttggtgccggcttcctgctcataccatcaccatgtcgatttcgctggcgaagaagttaacgccgactccatctgcgtagccggtgtaacgcagccgaatagtaccatcgatgtgggcttcttcgacgccgatgacttccaggatggtttcgtcgcagtgcagcttgacgaacatcttgatgccggagccaatcgccgcgaaggcgatctgcttgtacaggtcttgcttgatcatgctttgcgctcctgtttgcggatgtattctgccctggcttcggcttcgaacttcgcccaaagcgcgttgtcgactggaccccagggaccggtctgagtcccgtccaccggcgcgaacttgccaccggcgcgacgatacttggacagcgttctcaggctgatgattttctcttcttgggaatcgaattggacgatcacttgacatacttcccgaagtagcaggtgtggaggatttccaggcccttggagatggccttcagcttgattccgaaattcttgatcgcccagtccagatcgtggtgatagaactcgatgatgttgacgatttgaccggcgctgtagtggatgacgcgaaccttgccgttccagcggaaatcttcgcggctgtttacggcctcgactgcgatggtgtcgtttctgccgatggtccattttgagctagtcatgtcgcaatcctctttttggagtgtttcgcgtttcgatgaggtaactatacctcagcaacttcattgagtaaagcacttttgaacagattgtctaaaatttctggaagacaaatcaatcggccgcgtcatcgatagcgaacgccgatcgcgccaggtcgatgatctctggccatgtcaaagtaaaggttttgccgtcatcacgaatgataattggagtctgcagcggctcgcccaccagcattgtgtaggtatgtttctcgccggatgcggagccgatgcgggtgcttaaggtgagcggggattctttgtgtacggtgccgatcatcgtttcgttcctcggtgatacccggagaatcgggcgcgttggattaggctttgccgcgacggattgttacgccgcattcagtagtcacttccttagcggcaggatcgcgaacaagataagcacaggcggctttgacattcaaagctcgggttgcgccgagtttgcaggaaagatcattcccctcttcgtcccacagatgggcaatgcgagagatacagcccttttctacttcagcttctacagttacggactggtcaatgttaaataccggcatcgctttctctccgagattgttccgtttcaatgaggtgactatacctcagcaacttcattgagtaaagcattttcttcagattatctgaaaccttttgaagtcaggaactgccgccagagccagtcgatgtgttcgttgcagtaacgctcgccatcggacgacatagccagagcaccatccttgatgccgaaccgggtgacggcgagccattcgaactcgaactggagcgttcctgggcgagggatatggggacatggcgtatttctgcacggtcagtgatcctcagaaggtttagcgtttgcgatagccgctactttctgcataccgaggcgatagaaatcggcttctttcctggcttttgtaagctgctccatggcgtcgcacgccgtcttgtgctgggcattggcgttcttgatgctgccttccaggctcttgtccagctcttcccggagcgccttctgcgatgctagctctgcctccaaatcctggattctgagctggagctggcgatttgtctcgccaacctggttttcgcgggcgatggagttctgaaggcattcgtcaaggcgagtattttcgcgcaccagctgatgcttttcgactttcgcctttctgcacgtctctcgcatttctgaaagctcaatcgcatgcagatcgtcatccgggtctttacgctcttccttcgactccatccgcaggtagtactggccggctgcgaaggcgagcactgcctggtcggcatacgctgcggcatcggtcatgtatctggatttgtagcgaggcagaaacttgcactcctctggatcccagaggagactatcggcaataggccagaatttgcggaagccatcaggatcgacttctacattgaccatttgcagctggccggcctccacttcgacttccagaggaacctgaatggcgccggtgatgtactggaagtacactatgctagacataacacaatcctcataagaagtcgcggccgggaccatcccagccgcatcgtaatcactcttcgccttcgtccgcgctcagccactcttcgaaggcgaaatttaccttagactcgacccaatcttgaagctcatcggcgaactcgtcactgtcgatgtccatcggaatgcccagagtctcttcgttccacagttcggcattcagttcgaactggatagccggttcgccatccacattcagcaggatgcggtctgcgacttcatattcgtcgacatcgaagaggaaaccgccgctgatgatgtgctggatgaaagcttcgtcgaagttgctgatgccgatattgatctgcttagtcattttttctggccccttatttggcgagtttgtactgagctttgagggtggtcagcttagctttcagggcgatcatagcctggccgcgcaggccttccatttctgcctcgctgatggcgatcttggcggagcggatttgatcgttgatctgggatttggtcatttctgcgttcctctgttttggagtgtttcgcgttcgatgaagagattatgacgctattcagaatggaagtaaagcagaattgtgaaatatttctcaaagtggacgaacggtatgccccgtcaggaatatttcctcccatggaaggcatttccgcatccgaatgttgattaggtatcccaaagcgcgcagtggcgaatgtgagtccgcacgtacatagggttgtattgtgcgaagtgctcgacggtcgcatccaaggctctgctattgccgcacccttccgctttgcgagccaggaagaatgcttctatttgctggtttgcgttcatcgtcttaccctccaggtgtttgttcgtttcgatgaagagattatgccgttggtcagaatggaagtaaagtgtattaacaataaaattatgttcaccgacgaacggttgtgctcgaccgtccgttgcggcgtcgatatactcgacctattgctgacaccggattgattagaatgtacaaactcaaccctgcactgcgagcggtctggcgaactcgcgcccgttacaaagtcatttatggcggccgggcgtcttcgaagtcacacgacgcaggcggtatcgccgttttcctcgcggccaactacaagctaaagttcctctgtgctcgccagtttcagaaccgcatcagcgaatcggtctacacgttgatcaaggacaagatcgaaaactcagagtataatggcgaattcatcttcaccaagaactctatcaagcacaagagtaccgggtcagagttcctattctatgggatcgcccgtaacctgtcggaaatcaagtccaccgaaggcatcgacattctctggcttgaggaagctcactatctgacccaggagcaatgggaagtcatcgagccgaccatccggaaagagaactcagaaatctggatcatcttcaacccgaacgaagtgaccgacttcgtgtatcagaacttcgtggtcaagccaccgaaagattcctgcgtcaagatgatcaactggaatgaaaatccgttcctcagtgagacgatgctcaaagtcattcacgaagcatatgagcgcgaccgggagcaggccgagcacatttatggcgggattccgaagactggtggcgacaaatccgtcatcaatctcaagttcattcttgcggccatcgacgcccacaagaaactcggctgggagccggccggatcgaagcgcatcggcttcgacgttgcggacgacggcgaggatgcgaacgcaactacgctcatgcacggcaacgtcattatggaagtggacgaatgggacggcctggaagatgaactgctcaagtcgtccagccgcgtttacaacctggcgaagatgaaaggcgcctcggtcacttatgactccatcggtgtcggcgctcacgtcggatcgaagttcgccgagttgaacgatgccagtcccgacttcaaactgatctatgatccattcaacgcgggcggcgctgtcgataagcctgatgatatctacatgaagctgccgcacacgacgatcaagaacaaagaccacttcagcaacatcaaggcgcagaagtgggaagaagtcgcgacccgattccggaagacttatgaagcggttgagcatggaaaggtttatcccttcgacgaattgatttcgatcaactctgaaacgattcacccggacaaactaaatcaactgtgtatcgaactttcgtcgccgcgcaaagacctggacatgaacggccggttcaaagtcgagtccaagaaggatatgcgcgagaaacgcaagatcaagtcgccgaacatcgctgactcggtgattatgtcggccattctgccgatccggaagcccaaaggtttcttcgacttctaaacacagaaaagcccggatcgctccgggcttcgggtcttactcggtgtggttcctggcgctgagtgtcgacgcaacggcctcgccgactcccagggcttcctggccggccgcgagcgcttcggcttccgactcgacgatgaagtcatcaccttggccgtcgcctggcggaacctcgaccagcacggcttcttcgccttcgaaccgcaggtcataagtcttttcgacggacagtccgtaacgggcattgagcgcatcccagagctgagcttcatagttgcgcaggtcttgcagagatttctggtggctgagcatcgccatatcgacggcccgttgcagggtttcgtccaggacgttgaatcgcatgcgaagagaacgaatccgctcgaccacttccgcatccactacatgtctttcgatcatcgcttttcacctttgctgaatgttacgttgtagccattgtcggccaggtaggtcagggcgccttcgaaggaagttccgacaagatgctttagctgcatttcgcgttgcgcggcgatccagaatgccgttccggagaactctgcgcggccttccgacaataccttgccatcaggcccgtcgatccgaacgtgaacggaagatagcttcagtaccatcaatgaatccctccactggcttgcgacggcatgctttcagcgcgagcggcttcacagtccgggcagggacaggcttggcggacgcgctccaactcgtcggcatccatgacatagagcttcccatcggaagtgtcgtgcgccatggcgatgttcgggaagtcggcagcgctcaggccggcgacagcgcggatttcgtcccagagcgccacatgctcggcattcaggcgagctgcgagcgcttcgtgctctttcgctacacgagccatgaactcgtccatccggaatgcgaattccgcatcgatggatcgggccgaggccatggagttgaggcgaatcggttctttcttcatggtaattctcttttggctgggggtttgtggtctacccaggcctattcaaagcctgggtagcatgatgctgaagatgaacaagaaggctgcaaacgccaatagcgttcctgtgagtattttggttcggctctgcagctcagcgtactccttggttgacagcccttgctgcgccgcctcggccgcgaaacgagctttcgcctcgataacttccgggcgcagcgacaggacatattctaaggcctcttcccgcgctttttcggcctcgaccgacctagggtcgcgggccgagacttcgctgtgccctggcctcgcgggatgggcctgcagcgatggaggaagttcagcagccacgactccatagtcggcgcaggcccaagcgatcccgatgaggatcgcgaggatggattggacgattcgcagcatcactttgtcgctagggaagttcataatcaatcctccaccgaccgaacgatttccatattgcgcccggcattggcccctgcattgaaggcgcgccgaccgtcgctatcgtccagacgcatgagcttcgtaacattggacttcttgtagccaggatcgccgaaatgttcgtgaaccgcagcttccttcaccaccaccagagacgttccggcagaagataccagctccatacgcttcctggtgatggactgaaggcgatagctgatttcctgggtcgcggcgagcttgaattgcgcggcaaccttgacgttgaaccgttcgaatccttgagctttctgatactcccggcacagacgatcaacggcctcgaccagggaattgaacatgttcaccgccagctccacgtccgacttgtagcctttaaagcgaacggcatggccccagcgtttggtggtgctgccgtcgcgggcgctcctggacgccttggccgatgctcggtgattgttgacgccaccggcgaaatccatgatgcagtcgttgtacgtcgcaacggccaccgagaagaatttcatccaattcgggattgcggaatagtaacgagtagcgatttgctcgtcgaactcttcgcgaatctcgccggccgcttcgaagtcgtgaagatcatatttgtccttcagcttcttcacgcgctcggcagcgatggccgcttcgtgcggactggaagagtcggccgccatggcggtcagcttgcggatgcggtctttcgctttctcgatggcttccggggtgaattcgttctggtcggtcatgttacgttccttttgtctgaagggtttcgctttcgatggagctattctgccttcatccagaatggaagtaaagcattttcttccattatttcggaagagcctggaaataattccaagcccagtcgcctgcggccaggacgaagatgatgaccgcgaagaacgcgattgcagcgaccagttgcgcgcccggcttcagcttgggatggctgagcttgggctctacgggagcgcccggagtgctggcgctggaaccggcgtctcctgggccgtagccgattccacgttcacgcgcctggagcgacaccagggatttcagatactcggtctgcttttgcgactcttcgtagatgccggcgacggcgaaccagagcgcgaacactacggccgtgcatatgacccaggcgccggtcagcaggagggccagcggaccgatgaggaagacggaagcggccaggacgatggcgccgccccagatgatgaagccggccagaccattggtgatgtcgatacagaactttttcatttttcagattccttcggttacgggatggaggggatttggaactctgcgccgccgagaacatcaatgacgacttcccagagcgtcggaacagaccactggtaacggtcgaagtcggtttcaggatcgacgcccagcgtcacataggaagtggcaggccatttatgaacactgcctttccgcatgagagtcgccacgcggccgtcaccgagcggattcgtcctgtgcggaacgtacgcagacatcgaatattgctgcccggcgtcgacaacaaatctttgcctctggcgcagacatacagagcccacaggattccagccgcgaccgccgcaagcctggcgagccgaagaatgctcataaccttcgtgagtcatttcgccgaggcaagccgagcgatcctcgtaatagttgatgttctccatcgatccaaccagcaccagagactcgaaatcgaatcgatgatcgtggatggccgagtgattgaagcaaagccgacgcggcagctccgggtgccaaacatggaggcgaccggccggaagttggacctgaatgaaccccaggccgtgcagagtgatcttgtccttcatcgggtcatggacggtgctcatggataatcctcagtagcagaaatgtattgtgagagttacgattgacaagccggtcgcccatagaagggcgaaccaggccatggctttgatggtcgtgtagatcatccgaagaattttccggcacagatcgggccaatgcccatttcgatggatgcgtggttggtcaactcgcgaccgcagcaggagcactgaccagtcttccgaccgtaggcgactgccgattccatcggcttttcgaacatcttcagaacgtcgtcgtgctcagtatcggtgcagtcgcgactcttgatgaatttgccattggtgatccggccgaggtagatgtcgcccaggacgtacaggctaccggcgttccggctgtgagcgctagcctctttcacaacaacgatgagcggctcctcgccttcgccagctaggcggattttcgggcgcttgataccagactctttcgccttctcaaacgctttctcgatgccggaaatgtccagagtcggcgcagcagcttcctgcgcggccactttctcgcgatacttggcgaggttttcgatggcgcgcttcgcagcagcgatctgattttctgtcaaggagccgtatttatacaacgactcctgaaggctctgagcgaagctgaaggaatttccagtccaccactcgatgatgtccgggtgcgcggcttcgaaggccttaattttgaggtcgcgctcttgcgcagcgctacagattttctcgatgcgcttttctaccgccttagcacggctcttggcgcgctgctccgggctggttttatactctttgtatccgacgccgccgcaggcaaagcaggcgcgaccataagacgaagggccacggtacaggccggtgcctgcgcatttggtgcacttgtcgcgatacagcttcacttccttccgggagttcgggcgggcacccatggacacgtcttccagggtcttcggcgcttcgttgttgatctctacggtagcgaagtcatcacccaggtcttcgaagccggtgaacagattctctgctgcgttcatgtcgattctcctgtttggaaagttcgtttcgatgagttgactatacgccagaaatggaaaaacggtagagatttctcactaccgttcgtcgggtcgaagacaatcaataaatgtcgctattgatcttgaacccatgctcagcgccgtcgttgtagtcgtactcagcatagctgtcgcagtagtcgttcaaatgctgaatgatgcctagaacgtcgttcgcggccttgtgccgtttcgcggcgatggtcttggcgatgctgtcgccgacttccagggtttcggccgtccggcgatggatcagcagacggctccaaagatagagccggacgcgacgaatgatgtctcgatggcgctccagtcgtccgtgcaactcttcaatttcttgctcgcgagatttcactactcgtcgaagctgctgaacttccagttccaaatcggccttagtagccatgttcacctcaaaaaggaaaatcgtctgggactccaggaagttcgacgattattgttgagcctgatcgatccagaatgcatccgaccgagccagccctgtggggatagggtctacacgaactataacaggtaacttccatgactattcgccaggtcgatcctccacaccatctacagactggtgggcgcttcgacttcagttttcgttcgtccaagacggcgcgtctgtcgcatgaaaggcagcgcgccttaaccgacgtaaccatgggtatagtcgatcattcggatgagaccatcatcctctgattccctcgacttcagaccgcccaaagagtccaactggccgttgcatttcgcatcgatatccatcgaagacaggaatcctgccgatactgcggtgatatcaactttgtcgccggccttcttgaagtcttcgcactcagcatcgagggccacaattgcactcgcggccatgttcacatgactgatgaggtcggggaagatcacaggaacttcacgcgacatgccacggaccgtcagcttcaggactacatacttcatactcactatcccttttgtatgtgaggaaagaacttgctgttttccggatggtgaaaacgctcggtcgcaggcggtctttcttccggacattgaatcgtcgaaggcgggaaaaccgcgccggcgataatcgccgcgaggagtgcagcggatgtcgacatccagagggcggtttccaggctcacccgaacttccggacggcgcggcttcattcgctccaccctcttcctggctcataggatggcagaccgccgccgcgaatccaattgtcccacatacggttcagaccagtcggtggctggggcggcggactgtagaatccgggagtctcagtgctgctcaggaaataaggcgtgcaaacggcctggacgaccaattggtgccgctcccacatcttatcaatcgctcttagcatgacgtcttcgcactgagccttactgtcgaaccgtctgctagtatggtccggcatctggacgcagccgtctccagtgcaaaggaaagcagtagcaatccatacggtgatactcgccatttcgtcaccctctttagttgatgagcagagtctattccatctgctcgccaggagtaaagcgcttttcgtcgggataaatgccgatgatgtctgcgtcaagcatccaaatctccacggacggatcgtcgctgctgatttgatataggttgtacagctcccgtccgccgacagcacgctcgcctcgtggctcaaccgccagaaccttgccgtgtccttctccgtgctcgtccaggtatatgacgtgatcaccgacttcatagctttctttcgtgacgaggcgtgaacgcgagctgttctgcgattccaccatccaggaatccagcacgccgcctttcatgtcgcgaaacaatcttgccgatttgtcgcaatcgaatacgcccagaacttcgccgtctttcaacacgatatgtacgattggcaaaagagtattcatgtttaatctccattggttgataattagagtctaatctgccgaaaagttcccgtaaagaattattttctcataactgattagttgcaactgttaatctgatgtatatgtttgaatctcttttgaacgtttgatgtttcccctataataagcgcacacagtcaacaaccacgtggaactacaatgtttaaactttcctggatattcgggcgcaaaaaggataatgctgcctgttcggaatcggcgccggagaaagtcgcacaaatccctcaacacgatccgctcgaccccatgatcaagctgggaaggattcgcggctggaacgtcgagccggagaaaaccccggtcattcgtagtgtgaaagatttcctggagccgggcctatctgtagcgatggatagtgcgtatggtgatggaccaactccggccgcgaaggctgctgcgggcggccagaatccctatgtcgtcccgactatgttgcaggactggtacaattcccaagggtttatcggataccaagcttgcgcaatcatttcccagcactggttggtggacaaagcttgttccatgtctggggaagacgcagcacggaacggatgggaactcaaatcggacggcaggaagctatccgatgaacaaagcgcgctgatcgcccggcgcgacatggagtttcgcgtcaaagacaaccttgtcgaactcaacagattcaagaacgttttcggcgttcgtatcgcgctgttcgtcgtggagtctgacgatccggactactacgaaaagccgttcaatccggatggaatcacgcccggctcctacaagggaatctcccagatcgatccatactgggcaatgccgcagctcactgctggctcgacggcagatccgtcttccgaacatttctatgagccggatttctggattatcagcggcaaaaaatatcaccgcagccacctagtggtggttcgtggaccgcagccgccagatatcctgaagcctacatacatcttcggcggtatcccgctcacccagagaatctatgagcgcgtgtatgcagcggaacggacggcgaacgaagccccgctgcttgccatgtcgaagcgaaccagcaccatccacgttgacgtggagaaggccatcgcgaacgaagaggccttcaacgctcgcctggcgttctggatcgccaaccgtgataaccacggcgtgaaagttctgggaattgacgaaggcatggagcagttcgacacgaacctggccgacttcgacagcatcatcatgaaccaatatcagctggtcgcggccatcgccaagactccagccacgaagctcctcggcacttctccaaaaggattcaatgccactggtgagcacgaaacgatttcttatcacgaagaactggagtccattcaagagcacatattcgacccacttcttgaacgccactatttgcttctggcgaagtcggaagaaatcgatgtgcagctggaaatcgtctggaatcctgtagactccacgtccagccagcaacaagccgaattgaacaacaagaaagccgctaccgacgaaatctacatcaactctggcgttgtgtctccggatgaagttcgcgagcgtctgcgcgacgatccgcgttccggctacaaccgactcaccgacgatcaggcagaaaccgaaccgggcatgtctccggaaaacctggccgaattcgagaaggccggtgcacagtcgacaaaggcgaaaggcgaagccgagcgagccgaagcccaggcgggcgccgtagagggcgcaggcggcccggttcccgccgctccacgcgggactaagcctctcgcgaaagcggccgaggaaggggccagcgaggccgctgaaccgccgtcgaggccggaccccaaggccgagctgcggaacttgttggtcgatcttttgtcgaagctccaagacctggacgacattaaggcgccggacggcgtagacatagagcacaatgatgcgcctggcttaaagcgcacatccaaacctggcgtgtctggtatggagccttcggtgttttcgtccaaccgcatcgtcgggcctcgtgatcattcggaactccagagaatcaaggtgaatggaataaccaccttgatcgaaaatccgcgcggaagcattcgacaaggcaaggatgggagttggcgagttcagatgaaacaccactacgggttcatcaagggaacgaaaggcgctgatggggatgaagtcgattgcttcgtcggtccgaatctgggatccaaacgggtcttcgtcgtcaaccaagtgaacaagggaggtcagtttgacgagcacaagtgtatgctcggcttcaacaacatcaacgatgcgaagtctggatatctgtcctgcttccgtccgggctgggatggtctcggctccatccatgaagttgacctgcccgctttccgtcgctggctggcgaacggcgacaccaccaaaccgttcgggggcgagtgatggcattcaaggcctccaaaaagcgcgagcgccgggcacctcttccagtcggaagagggaagcccataattccatcggcaggaatcgaggcctggtatcgaaagcagatgaaggatatgtccaagctcatgatctccgactatcgaaacgagattgagaaggcgctgtcccagcctgcggccgaacgtttcttcgccagagacgaatccgttaacgtcctgttcaagatgacccttcgaagcctacagcagcgatggagccgcatttttgaaggtttcgcggccaagatcgccccggagttcgtcaaccggaccgaagaagccgctaccgccgcgacccttcacagcttgtcggtggccggcgtcgatcagccacgagctgcgtataatgagagcgtcaggaacaccctggaggccgcaaccacttacaatcatactctcatcaccaagatccaagaggacgtccacgagaagatttacacatcagtaatgctgtctctgacttccccgaatccggaagagcaaggaacttccggcataactaacgcacttcgcaaagtcgggaagttttctgaagatcgaatcgaactcatcgcaagagatcaaacaagcaagctttacagttctctgagcgatgagagaatggcggaaaatggagtcgaggagttcgagtggctacactcttctgccggcaagactcctcgccacacccacctggagaaagatgggaagaggttcaagctgaatgaccccagactttgggagggtccgaaagcagaccaggggccgccaggatgggcgattaactgtagatgcagaaagataccagtcatttgacatcgataggagcgctatatgccgttagttcatggcacttccaatgaggctcgttctgaaaacatcaagcgggaaatcgaagccggtaaagacccaaagcaggctgcggccatcgcttattccatccagcgcagtgagaaagggaagacggcgaaagattgttcgcctgagctcgtcgccgatcttcgcgccctggtgggcgctctgtcgaggctcgtgaaatgaaccgcaagacgtgccggcgccgactcgtggtcgatgtaatcagggccaatattcacggcggattcttcagcctgaagtttgccgccatcgatttggcaatcatcggcgtcgccatcttgatggcttttggccgataatgctgagaaaaatctggattctgactaaaaattctagtccggatagccgcaagttaccgtttacggaaaatagcagtaatttggaaatcctactgccgcgaggctttaacagagccagttcctaatttccgatttagccgcatgcttcaaaagtatatagcctgggaaattagaagtaacgttccaatagaattcatctataagtaacgttataatataacgtcaatctatatgctctagacgtattgaaattcaatttttaatcggtaaattggtaatttgaattagtttaggagttgaaagcctcgcggcagtaggcttagacaaatcacgtcaagtttccgagaccaaattaccggattttcgcggctgaggaaactggtaattagatcacaatacaaattataatgtaagttaacagtcacggctacatctaattattgttccgcttatttacccttagatgtactgcgtatataatacagccatagtccacgactcttcgaattaacgatggcaaagtcgaaaagaaaaattgacgaaaatggatatatgaccatagagggctgcccgatcagctcttatggcgttttccaatattctgctggtcaactcggtcttccgggcgatccgacgcggattgtcaacgtatatcgcccggagtctgccgtcagcgatccggagtacatcgaatctctgaagaatctcccgttgatcgacgagcatgagatgctgtcgggattcgacgatgatgacgatagcgtggcccccgaagacaaaggggtggagggcatcatcacatccaacgcttactacgaagccccatgggcacgcggcgatatccgcatctattcccgcaacatgcagaatcagctggaaaggggcaaagaagacctgtccctaggctatagttgccgctacactgagcaacccggcatctggaacgggacgccttatgaagtcgtccaggacaagatgcgcggcaaccacatcgccctggtaaaagagggtcgtgtgccgggggccagagtattggatggtctgtgttttgaccatctcagttttgatttcagaccatccgatgagggtaatgaaatgagtctcaagaaagccaagcggaagccccctgtccagcgcgtagggcaagctgctgactcggcggtcgaagagttgcgcgccctgtggccgaagctatctgcgtctgtccagaagttcctgggcgaagaagagcaggagccggagcatcaggaaggcgcagctccggccgaaccgaccgacagcgagcacctgaccgagcatccgactctggaaggtgctcagaaggatgacgaagagcaggaagaggagccttccgttgtcgatccggccgtggccgccgtcgagccggagcatcaagaaggtgccgcatccgaaatgtccggtgaaggcgaagtcgccgaactgatctctcaggtcaaagccattctggctcgactggagggcacggtagccgaaggggcagacgaagagcatggcgaaggtcaagatgtcgtcgagggcttggaggagcagagcagcctcagcggctcgcaaaccgccagcgacgatggtggtgagagcaaggataacagcgaggaacttcctgaaatggcacagaagaacgcgcaagatgctgcaattcgcggtctctatcgcgacattgctgctaaagatcgcctctacaagcgtcttagctccgtggttggtgcgttcgatcaccgagctatggactcggctgaagtcgctgtttacggcgtgaaaaagctgaatatcagctgcgcgaagggccaggaagctctggcgctcgacatgtacctgaaaggcgtcgaagcctcgcggggcgcggccagccgtcaatcgaaagcccaggattcggccggttctgctccgcagtgcgccgagctggacagctacctgaagggggagtaactcatgttccagaaacaagtttaccgccagtacactcctggttttccgggcgatctgatcgaggacggcccgaagcgggcgcggccgggtcgaatcatgtctctgtctgccgtaaatccggctgccaccgccaccggccccaaccgcatcagtcgcgctttcggttacgccggtgacgtcagctccctcggcgaaggtcagccgaagactatcgcggctcgcgcttctgaagtcgtgatcggcggcgccaacttctttggtgtcctcggtcatccgaagcactatgcgctgttcggttcggccggagactccctggctcccagctatgatctgcccgatggcgccgaaggcgagttcttcgacatggccaccggcctggtcgtcgaaattttcaacggcgccgcaaccgccctggacctggactatggtgacctggtcgcctatgtaccaaacaacctgcctaccgccgacaacgcgcttggcctgccggccggcgccctggttggcttcaaggctggctccatgccgaccggcttggtccagattcccaacgcacgcatcgttaacgccatcagtctgccggcccagtcggcggggaatctggttgctggcgttaccatcgtccagctcacgcagtaaggaggcgtcatgagccagatcagcaagacccattcgcgcctcgcaggccgcaatgcgaaacctttcgacctgaaaaacatcaccaatgacgccgtggcgtctctgcgccgcatcggcctggtattcgatcacgccgtcgtccaggaccagatcaaggccttggcgaaggccggcgcgttccgctccggctcggccatggacagcaacttcaccgccccggtgaccacgccgtccatcccgactcccatccagttcctgcagacctggttgccgggcttcgtgaaggtcatgaccgctgcacggaagatcgacgaaatcatcggcatcgataccgttggctcctgggaagatcaagaaatcgtccagggcatcgtggagccggccggcactgcggtggaatacggcgaccacaccaacatcccgctgaccagctggaacgccaacttcgaacgtcgcaccatcgttcgtggcgagctgggtatgatggtgggcaccctggaagagggtcgtgcctcggccatccggctgaacagcgccgaaaccaaacgccaacaggcggccatcggtctggaaatcttccgcaacgccatcggcttttatggctggcagagcggcctgggcaaccgcacctatggtttcctgaacgatcccaacctgccgccgttccagaccccgccgagccagggttggtccactgccgactgggcaggcatcatcggcgatatccgcgaggccgttcgccagctgcgtattcagagtcaagatcagatcgatccgaaggcggaaaagatcaccctggccctggccaccagcaaggtggactacctgtcggtcaccacgccatacggcatttcggtttctgactggatcgaacagacctatccgaaaatgcggatcgtgtctgctccggaactgtcaggcgtccagatgaaagcccaagagccggaagatgctctggtgctcttcgtcgaagacgtgaacgcggccgtcgatggaagcaccgatggcggcagcgtgttcagccagctggtacagagcaagttcatcaccctgggtgtcgaaaagcgggcgaagtcgtatgtggaagacttctccaacggcaccgctggtgcgctgtgtaagcgtccgtgggccgtggtgcgctacctcggcatctaaccgatgcctattcaccaaaggccgggtttccggcctttgttcactctgactctgactcggttgtaggggccggttagggcataattactaggactacgccaatgactgtttacatcgtttccgccatgactcaatccgtgtcttacaatgcgtatgacacctctgatccgtccaatcctcgccttcagcggaagattctgattcgtggccgcgccggcatcgcatcagaaacttccggcttcggcgacatgatttccgacgcggccgggcgtccgatctggaccccgcagggcgattgtactgccgtgagcgattcggatttcgagctgctccaggccaacaagattttcatgcgtcacatggataagggttatctgcgagtcgtgaagaccgacatcaccagtgaccaccagcggatttccaaagagactcgcaccatggagcgcgatggattccagcctctggacgctgctcgtctgcagcagaaaatcaaggtgactaccgccagcgcttcccaggaacaagagttccggatttaaccgagggtttcggtatggtgattttcgacgaacataagtttcgcacgctgtttccggagtttgctgatccagccgcttatccggacgtgcgcctgcagatgtacttcgacattgcgtgcgaattcatttctgatcgcgattcgccataccggattctcaatggtaaagccctggaagcctgtctgtatcttctgaccgcccacctcctgtcgctgtccacgatgcaagttcagggcgcggctggaggtggcgtcactgccggtgggacccagggcggtttcatcaccagcgctactgtcggcgaggtcagcgtggccaagctcgcgcccccggccaagaatggttggcagtggtggctttccgggacgccttatggtcaagagttgtgggcgctcctcagcgtcaaagcggtgggcggattctacatcggcggtcttccagagcgccgaggcttccggaaggttggagggacgttctggtgatccctggtgcgaatcttctgcgaatggccttcggggtcatcggtactcaaattgtgaaatatcgcaagtttgagcagcgagtgaagaatgatcaagctcagtacgtttccatgttcgaggagcctttcgacctggcagcgtctgttcagcgagtccgacgcgatcagtatgtccagtttaatctggagttccaacggaattacgttatgatcttcgccaactttgagatggttgacttggatcgcgatgtggccggtgaccagttcctctggaccggaagagtctttcagctggagtctcaaggctcctggttttatcaggacggctggggagtttgcctggccgtggatatcggtgcgaccaagctcgctgatgacgggaaaccgactttctaggtgatgtatgtttgacggcgaactgatagcgaaactggttgtcgagttgaatgcggcgatggcatctgctcaagaggctttgcagttcccggattttgaagtcgtccagaaagctcagccgacccaacagggaacgtcaaccaggccgaccatctttttccagaaactgtttgacattcctcgcggctggcctgccaccgattggcacctggacaacacggcccgcaaatatgtagaaataactcgacagcatgtagagacgactttccagatcagttcccttcattggcagaatcctgaaataactcacgtggttacggcttctgatatcgccaactatgtgagggcttatttccaagctcgatccacgattgagcgcgtaaaggaactggacttcctcattcttcgcgtgtctcaaatttccaacgaagcattcgagaacgacaatcaccagttcgaattccacccaagttttgacatggttgtaacttacaaccaatatattcgcctgtacgaaaacgcagcatattcggccgatggggtattaataggcatatgagtctgaggcgcgattcagagctaatcgccgcgcacctccagatgttaagagccatgcgcggcaggtccgtttcagccggatggtattccacggctcgatatcctgacaaggcaggtggatcggtcggaatacaagtcgcgagaatcgcacgtctcaatgagtacggcggaactatcgaccatccgggcgggaccaggtatattagggacgccattgttcggggtcggtttgttggcgttcggttcgtcagaaacgactttccgggagaaaccgaggtaactaagcctcacagaattaccatcccggctagaccgtttatgcgatatgcttggaacttgttttccgcagatcgcgccgcaatccagaaccggatagccatgaggctggccagaggacagatcactccagatcaagctcttgcccagatcggcctggcgttggaaggatacatagccagaagcatcaggaccgggccatgggtggctaactcagcatctacggtcaggagaaagggattcaacagaccgctggtcgatacggcgcacatgcttcaatcgattagcagcagagtaacataaccaggagatcatccagtgatcagtcagagccgttatatccggatcatttcgggcgtaggcgcaggcgctccggtcgcaggccgaaagctgattctgcgcgtcatgactaccaacaacgtcatcccgcccggaatcgtcatcgagttcgacaacgccaacgcagtcatgtcatacttcggcgcgcagtcggaagagtatcagcgggctgcggcttatttcaaattcatcagtaaaagcgtgaattcgccgtccagcatcagcttcgctcgctgggtaaacaccgccatcgcgccgatggttgttggtgacaatctgccgaagaccatcgccgatttcgccggcttctcagcaggggttctgaccatcatggtcggcgcggccgaacagaacatcaccgccatcgatacgtccgcagcgacttctatggacaacgtggcgtcgatcatccagaccgaaatccgcaagaacgccgacccgcagctggcccaggctaccgttacctggaatcagaacaccaaccagttcaccttggtcggcgccaccatcggcaccggcgtcctggctgtggcgaaatctgccgatccccaggacatgtccactgccctcggctggtccacctccaacgtcgtcaacgtcgccggccaggctgccgatcttcccgacgcggccgttgccaagagcaccaatgtcagcaacaacttcggttcgttcctgttcgccggtgcgccgctcgacaatgaccagatcaaggccgtgtcggcctggaacgcggctcagaacaaccagttcatctacacggtcgctacttccctggcgaacctcggcactcttttcaccttggtgaatggcaacgccgggaccgccctgaacgtgctgtcggcgactgctgccaacgacttcgtggagcagtgccccagcgagattctggctgccaccaactacgatgagccgggcgcttcgcaaaactacatgtactaccaattccctggccgcaacatcactgtttccgacgataccgttgcgaacaccgtcgacaagagccggggcaactacatcggcgtcacccaggccaatggccagcaactcgcgttctaccagcgcggcattctgtgcggcggtccgaccgatgcggtggacatgaacgtctatgccaacgaaatctggctgaagtcggctatcgctcaagcgctcctggacctgttcctgaacgtcaatgcggtcccggcgagcagcactggcgaggcgatgaccctggcggtgctgcagccggttctggacaaggcgacagccaacggcacgttcacctacggcaaggaaatcagcgccgtccagcagcagtacatcacccaagtcaccggtgatcgccgcgcctggcgtcaagtccaaaccctgggttactggatcaacatcaccttctccagctataccaacagcaacactggcttgaccgagtggaaggccaactacacgctgatctattcgaagggcgatgccatccgcttcgtcgaaggatcggacgtgatgatctaatggtttgcggcggactcgatccgccgctaccttccataaatggagtgaggaataagcaatgatcaacatttctgcgttcggctcgatctgccagttcacggcaagcagaactttcccgaacggattcaccgtcaccgagttcgccgacgatgccgatcccatcgacagcccgccgttcaccgctgccgataccggcgtcggtctcaacggtgacatggtagtttggaaccgggcgaacatcctggaagtagtcgtcaacgttatcccgaacaccgagggcgagcgcaacctggcagtcctgctggatgccaaccgcaccgggaaagacaagtcgggcgctcgtgatgtcgtcggtttggtcgtggcgatgccggacggcagcaaaatcacctgcaccaacggcacccccatcgacggcgttctgatcaacgctgtggcaagcgtcggccgtctgaagaccaagccgtatcggttccgattcgaaaaagtgatcaaagccggtactagctgatgaagaaaattccgctgacagcagtccccaatcaagcgatctcatttaacgccggtagcagctattggaagattcgcctgtaccagaacatggacatgatgaatgccgatatcagccgcgacggcgtgatcgtttgccatggggtccgctgcttcggcgggattcctcttctccaatacagccatcagtaccgacctgactatggcaatttcgtcttcgaccgcgacgccgattggacgttgttcggcgacggaattaacctgttctatctggacggcgccgaattcgcagagtatcaggcgctcgccacgaggaaagaatgagcacatcaacgatcagaaccgggacgaacaatgatatccttttggacgacaatggaaacatggtcatcctcagggatgtcgaagcgtgcgcccaggacgttcgggcggcgatgctcatgcgcaccggcgaaaatattttcgatgtgaactccggcgtgggatatttcgaatacatcttctcgccgcagaaaagctatgatgacgctcgcaaatccatcgcggatgcaattttgtcctcgccggatgtgaccggcatcgagcagctggacatcgacatcaccggggaagtcttcggcgtcgatgctaaagtcatcaccatccacgggcctgttaccacaggagtttgaaatgagcacaatccgcatccaatacgccaacggcacccaactgttcctggacggcaaaaatccgccgcccctggacctgctgccctcgtttaacccgtctgtcgaagatctggaaggcctggaccgcgaaaagaacaccgacaaaggcgactcctcgccggccggtcttcccgttcccccggtaaacgtcgattccaatgtcgacaacggcggaaccatcccggctccggtatcgaccgacgctcctgcggccgaatcggccccggaaggcgcccaggaagctcctgcagcgggccaaggcgacgagaaaggcgccgaggaagccccgactaccgccccagtagaaaaggccgaggaaacggcctcgccggccgctgaagaggcagccccggctcccgccaaggccacctctcgcaaaaccaccagcaagtaaggactcgacatgatcaacgtcagcggcttcggcacaggaattgtaatagtttccgcctcatcgttcccgatggggttttccttgtcgaagttcgctgatgatgagagtccgatatcctccaaagagctggagccgttcggatatgagatgctttatgacggtggcctattcgcctttgacaaggctgctcctctggaagtatctgtatccgtcatcgcagggagcgaggatgatattaaccttcgcatccttctcaattccaaaaagggatcattcagatttcttccgggaatcatcccggacatgacgactctcgtggccactcttcctgatggcggccgcaccgttctgtccaatgggactatcatcaagggtccggccatcgacaccatacagaacaccggacgacgcaaaggcaacacgtacacttttgttttcggtagctatcttggcgcccagactgcgcgtcaagccatttctaacgttatccaatcggtactggaggtggtctgatgttagggattttcaccagcctcctaagttcgcgatctttttcgattgtggaccaaaacacaaaccagctagttgctgcggatttgaggataagccgggtcaacacccggttttcttctgtagggcaacgccacatgctggaagatggtacgaccaagatggattccagaacgatccaccctatggaaatcatcgtcgaagtattttgcccttcaattgatgtcgtcgatcagatcaatcaattgctcctggatcgcgacacactgtacaaagtcatcactcgcggcatggtattcgaacggatgatgtgtaccagcgaagcgctcaatcagactccggatatgatatcggcgactcctgcgcggctgacattctcccaagttctcgtccagaatcccaagcctataatgttcagaaatgcaggggactcttctatgatcgaccgagggctggccctagctgaagacgtggttggctcggccggcgatctgttcgactacgcagtgaacggcgtccagaacgccgcagacttgttctgaggtgccaattgaactctttcctcaagtctattctcaacacgcctactctcaccatacgcgatgatgttaccaaacttcctgtctggaagagtcttcaagtcaagaaagtggaaatttactcgccggcttccgtagtgtcgaaacctctggcgacgaaagaccagacggaagctcaagtgtacaccgaagctctggacattgatgtgaagaatggaaagatcatccaaccggtgcgactccgcatcagtgctatctgtccggacctgtccaccgttgaaagtatcatgaacgctttcaatgataacacctcgactttcgctatcacttctaagtcgatattggccgataaaatggccatcatgacgctcgatgtagatcagtctccagacatgttgaacgcggctgagatcaatatggaattcgagcaggttgagcctccagtattgaataaattcgatcctgcgttccctcaagatagtccgacttatggggtacagattcaatctctttctgatgctaatttgctggatttgggcgccatcggcgattcgatatcttcggccgcaaaatcgctatataatcgcgtgaccagctacttctgagggtgtatcatgcttgaaatcaatcttcccgatggccgtcaaactcgcgtacaaatcgaggcgtggtcggcattggatggctggggcctccagcgccgtttcgtcgaatttgctgtcagccaagattccgacttccgccgctctttcaccatggaaatcctgggatatgcgaaagtgctgcttggcgacgatgacaccggcattccgctgaccaccgcggcagtcatcaacaaccacctcggccactggaagaacgtggaactggttttcaactctgttctcaagcacaatggcatcgacccggccacgcacgccgaccggccggactattgggaacaagtcggatcgcagatggccatcgcatttctggccgaggcgtccaagctcattggtccagcaatgaagatcgccgaaggactcgccaacaagccggagtgattcatgtctagtgatttggatgaattcatacttcggtatgaggccgatactgccagagccgagcgcaatctggagcgcctccagaaccagatcaggcgcgtgaacagcgcatcgacgagtggccttcaggatttgcgccacttcgcagacggcgcggccactgaactcggccgagtcgttccgcagatcgattctgtgacgagcgcgattcgcgggatgaacgcgcaactggcgataggcgccactggcgtggccctggtcgcggccggcgtcaaggcgttcatgaacaccagggaccagtacaatcagcagcgcatccaggcgatggacatcggcatcgccccggcacgcttggaagagtaccagagaaaattcgttcgccagtccggtggaaccatcagccgcgagcagggcgcggagatgaccaaaaatctggcagacactttccggcgtgcttatcgcgatatcgggcgagtcggcccggaagcgcgaattctgcgtatggccggcgttgatgtcgggagcttccaaaagggcatgcggccgctcaacgacatcattactgatctggccacgaaaatggccaagctgaagccggacgaaatttctgcctacgctgatgcccttggcgtctcgcgagactacctgagcaccctggctaagatcggcccggccatgggaaaagtcaccgagatgacgactgcggaactccagtccagggtccagggcgagtccaacattcagaaattcaacgatgctctggcgaatctcaaccagacgttcaccaccctggaaaaccgagtcggcgaaaagctcgcgcctgcgttcaccaagctgatcgaaatcatcgacaagatagtccaggctattcccaatgaagtggaaagcttcgcgaaggacaccaaatcccgttgggaagatggagtgctcgggaaggcgaccgttggcagtgatatcctatccctcctcagccccggcgccctgctcggtcgcctggcagcgtgggggactcgtcgcggcatggaagaatcagggctcatcgacaaggacaaggttcccggcgctcaaaccagcgaagacctggccaagaaacaagaagaccaggacaaggctactaagtccatgaaagagctagagaagctggctgaccagaccacgaagtctaccaatgattttgcggtggcgatcaacatgttcagtggcgcggtatcgtcgttcgcgaatgccgttgacgagcgccaagcttgggcagcctgggcgggggaaattggtcgggcggtcggtatgggaagcaccgcgccgacttcgcgggccaccggcgtctatccgcacgcgatctatgatcagtcgaagagtggcgcggccggacaagtcttcggcgagccaatcggcgcccagtctcttcgcaatcgcatgttctcgccgcagcgcaaggccgaaccggtcaccgttccatcgtacatcaacgacatcatcaaagatgcgtcgaagatgtacaacattcctgagctggacatcaagaaactcatatacaccgaaagccgattcaacgccagggctaccagcgaagccggagcgaaaggcctcatgcagctgatgccggaaatcgccaaggcgtatggtataactgacgtatatgaccctcgccagaacatcctcggcggaacgcgtctattgcgggaaaacctggatcgagccaatggcgacatgcggctggccttgacctactatcacggcggcctcgatccgaagaactggggaccaaggactcgcgcatatccgggtttggtgatgagcgctccaatcgagctgatggaagaggcgcagcgcaagcagaaggctgcggccatgaccgccgccaacgagacgttcgctccggaaggcggcgacatggacattcgcccctatgatggcggacgattggaaactccagaccagggcaagaaggaagatgagcgccgcgaagcccgtcgatatgacgacagggttgtgcgaccggaaattcgcatcatcgaccgcatgccagaccgcagcgacggcgaaatcctcaagatgtctagacgtcaagaggccgaccgggcagattctggattccggaagttcccgaatcaagttcgcggcgagaccaagcagaacatccaggctcaactcactgcaggagccatcgcgcaagtgatcggcgttaaccccaaccagatcatgcgccgcgaaatcagccgttctgacttgctgttcggatacaaccaagccatcctgggcaagcaacaggagatcaaggccgccgcgaccgaagccaacaacgtattcctgtctccagccaagcttgccgaagccacggccaaggtgaacgccgcatcgcgagaaatggatattctcaggacatacggcgagcaacttctgaagagcgctccagagcgcggccaggagctgaccatcggtcgaatcgacatgttggtcaacgtcaccggcgcgaattctccggaagaggctcgcgagatattcagtaagcagactgcagaccagctgactacggcaatccaggacgctcaaaacgattccgcaactaagatactctactgatgaaaaagagaattctgcgagtaacattcaacatgccttatggacccgaagtcatccgcgaagatctggatgttcgggtccggattatgaaggctgcgttgcggattcagaaccgggcgacgatggaaattttcggcctcaccactcagctgcgcgagtctcttctgtcgcagttcaccgcgtggaagcaccggcaacgtcaagtgggcagggaagatgaattgatgatcaaggtgtcggtggaagccggctactctgaccaggggcgcgagcaagtttccagagtctttgtcggcgaagttgccattgtcgatatcatttctccgccaccggacattggaatccgcatccagtgctataccaggcaaatcgacaggacgaagaccattcggaatatgccgcccgccaacacgacgtttgtcaagttcgtcgagtggggcgcgaacgaaatgggattgaacttcatctgcgataccagttacaacgatcaagttctgaagaatccgggccggtctatcactgtcgcgtcggcaatcctggcgtcgattcaggatatgtacatgccggacgtggccgcgttcgtcgatgatgacatattgatcgtgaaggaccgcgataaagtcattcgtccggatgaggtgaccaacgtcaactcgtttgttggaattccatcttggtctgaatggggcgtggaattccagtgtctgtttgagccatcgattcgtgtggctggaggcgtagcggtcgaatctctcatgaatccaagtgttaatggtaactatgtaataactgctctggaatacgatttggccagtcgggatcggccgttctatatcaaagtcatggggagtccagcagcataatggccagggaaatcaaatcattcaacatgttcggagttcactatacttcgcggcaattctctgccgtcgatgggctcagcatgatgtcggaaattcagagcgtgccgccagaagaattgctcaagggtactgatgtattggcgcatccggaagaccatccggaaggcatctggcttccattgactgctgcgaacatcaatctttatgtcgttgatcgagcgaaagtaatagctcccgtacaagttcttgcacttctgtccgaagtggtaatcgactggaattttggttttctcaaagactggaccggagtcaagattccatccagatttgtcgaagatatcaaaagcgtgaagacggcacattcaccttctgtagttgcgagtttggtggcgaacggttcggcctctatgcgcgagttggaagagtattattcgactcaagatgcctttaagatgatagatatcatgacggcgaagagcgtgaacgaggccttggcgtccgaagcatcgcacaacagaatcaaaaagggataattcctaaccgggcctgggaaggctatactagacctgccaaatcagaggctttcccatgtccaatatttctctaacatcagcaaaagctcccgacaggacgcgactgatcgccgctcttgacgctcggtcgcggcgggatgctctagatttcgaagtaatgataccggctcaggttgttcaatatgacagggccgagaatatcgcaacgattcaacctctcatcacctgggttgacacggaacacaacgccgtccaaaggcatcagctggttgatattcctgtaatttccatgggggctggcggcttccacataagtttcccgattcagcaaggtgacataggctggatttatgcggccgaccgcgacacatctcagttcctggagtcgttgtcaatgtcgaagccgaacaccggccgcatccataagttcgagcatggcctgttcatcccggacgtattccgtcgatacaccatcaattccgaagattcggccgctatggtcatacaatcgacttccggagcgaccagaatttcgattcgcggcgacaacatcaagatcactgcgccgtcgaatgtcaccgtggatactccgcaggcgaatttcactggtgatgtgactatcgctaacactctggttgtaaacggtatcaacgtgaacaaccacggccacctcgaaaacaacccgcctgatgcccggacgaagggcggcatgattgcttaaggagaatttcatggcaagttttgatttttctgatttaacagcgggggggggttgtaatggctaactacaactacatcgtcgatactggtgtgatagtcgcagataccgccgacgttctgagtgacgttgaagccgagttccgcgccgccctcggtgccaatatcaacttggccgcgagcactccgcagggatcgcttgtcgcggccgaggccatcgcccgttccagtgtcatgcggaatgaagcgcgaattgccaatgccataaacccgaacgtttcattcggaacgttcctggacgcgatctgtgccttgatggggatcgagcgcggttctgacctgtcaaccttcggctatggagttcaagtcaccggccgcagccaaacccgcatttccaccgggtctagggtccagactccggccggcgcgatcttcacagtgatgagtgatgtcacgattcctgctggtggtgtcgcgaccatcgatatcaaatcgcaggagtatggcaacattcctctgccggtcgggaatctcatcatcatcgacggaacaattggctggtccggagcgaaagtcatcgcctccactcgcgtcgatccgggcagccgccaaatgagcgatgcagagttgaagaatgcccgcgttaatcgattggccatccaaggccgcaactcgactatggccatcaaggcgtatgtgagcgccgttccaaacgtcacgtcggtgaacgtaatcgagaacaacaccggcgccgttcaagtggtgaatggagtctcgtttacccttccgtatgctgtttgggtctgcgtcgccggaaacccggataaacaagcagtcgccgatgcgttgtgggccgcccataacggcggaactccatgggactatggtgcgacgaacaacggcgtcccggtggacggtccgaatggcgttcctgtgcgcgatccggcgtccggtcgaaagtatgtcgtgaagtggaccactccaattatgtacgatggatatgttaacgtaacagtccagcaaggttcctcctctgtagctccggaagccattcagaacgcagtggtcaattacgcccaggggaaagtggaaggggaagaggggctggtggtgggcgcgagcctgtcggcattcgaagtcgccggcgccatcgctcgcgaaattcccggcatctacatcaaactctgccaggtcgcgtgcgtcgcggctggctcgccggctccggctccgggcgatttcacttcggaatacgtcatgagcgcattcggccaggctaccatttccgttggtaacgttcgggtgactttcgtatgactctgcctgcgtacaattcggacatccaacaagctctgaaatggctccataaccaggcgcctgggatcaccggcctgatccagagaaaggcgcaatggtatgacagattcagccgccaattctgggccaactgggagcgcgacgttttccacttgaaaaccgccaacccgttcggccttatggtttggtgcatcatcctcggcacgccttcgaaagggttcggcctttatccaaaaaacagttcttgggcattcggtcggctacgccagaacttcatctatagcggtacacaagttccgccaccggcagacgcatcgcctggcggcaacttctacggtggcggcaatgccgaaattctcaacttggacgaaatcaggaaagtgcttcagctaagatatgtagcgctgatttctaacggctcgattgcatatgtcaatcgcatgcttcgttacatattcaatgatgatgagccatgggacgaggcgaccggtctgtacttctatctcatggactcaaccggcgagaatggccctgtggagaacttggcgatatatcggaaagattgggaaggtatggtgctattgtccagttcgcccagaacgaaccacgtgctgacatcgacccctgccagcgacgccgattggccgggagtcgatccggccgcgagcggtattccggtaacggtcgaaacggcgtccgctacggccccggacggctccgctacggtgtgcaagcttactaagccggccgggagtaccgcttacgtctccgcgccgatagatgggccgctggggtccggtagcactgtcacgttctcgttcttcgcgaaagccggctccacccgtttcattgcaattcagtcggctgccgatttccccagtcgagccgatgccgttttcgacctggattccgggaacgtaatcagcgatcagatgctggacagcagcgtggtaagcgcccgaatgattcgtctggaaaatggctggtggcgttgcgttctcacgaccaagaccgtcagttcttcgttccgcgctgcttacgtcgctccggcagaaaccaacttcagctggattgattcgagttccagcgcggcgattgatgtgcttatctggggcactcagatcgaactgggtgatactccaaccggatacttggagactaccggaacgcccgtaaccatcaccgattacgttctgcagagcgcccagaccggaacggtcaagttcacacagcctcttccgaccggagtagaagcgtattggactggagactggaaaggtgggtctgcgaccgagccggccagattcgcagtaggggatgggactcaagatacattcaatctgtccagccctgcatacatcggcctacccactagtggggcgttcaagctagaatacagagttggtccggcgcttaatttgtcgccgcaattgatcaacctcatgaatgaccgggcggtcggcatcatgccgacttgcgccggttgcgatgtaaaagtcattcaggagtaatgacgtgatcacacccgaactgatacccagtccgtttgccgctcagggcgataaagacccgattccacaaacctcctccactggcttcgcaaaccttcgcgacggctatacgccggactacgaaatcagcctggcgtcgaacaacccgcaggccaaagcggtcgagcggaaaattcaaaaccaactcttcttcatcgcgacccagaacgcacaggcgtggcagcgacaaatggcgccgccgtggtttcagggcatgcctggcggctacgaacagaatgcagaagtcgtgcgcgtcggaaatgacggcataatgcggcgttatcgttccatggtgaatgccaatgcgagcgaccctctcagcagcacgacttgggaagaacaacccgcatggtcggtgatgcgctccaacatcccgatgccggccggaggcccaggcctatcttctggcggagaagtcatcacgaccggccgcaacttcaacgacctgttaaatgggacgtgggagttcttctctgattcagtggttatcgcttctcagaatgcccccgtatatccggcttccgctggtgccgctgctggcatgttggaggcgaaatcttgggtgtccggagccaatacgttctgcgtccaacgctacactgatcgcgtcgggaacgtcgctgtgcgcgggcttaatgccggagcgtggaccaactggatgtatgcggtaaacgtcatggcccttcaacaaggtcgggtcacctatggagtcgcggccggatcggcgaacgcttacacgttgacgctagttccgcagctccaaggcggcctggtggatggcatgattcttcgggtcaagttcaacaccatgaacaccggcgcctccaccatcaacgtctccggactcggcgccaaagccatcgtcggcgcggccaacttccctctcaccggcggcgaacttggccaaggactcatcgctgagcttgtcttcgacgcagcaggcgaccgctggagaatcctcgcaggcgcgccacgcatccaagttggcaacgccgatcaagattaccaggcccccagctggaaacaggtgaaggattacgtcgcgtcccaaaagctgactgaagtggactgggctgacgtcgtcaacaagccgaacgtcgctatccaagacactacgccgtggttcgccaatctggagttgtctgacgctcggcctttcatcgatttccacttcaacaacaaccgcgccaaagacttcgactatcgctttatctctgaagctgatgggtcgatggcgttctactctcgccaggggtccgctggtcctacccaggatatcctgttcagcaggtcgaatgttacattcctccagccgcgactggatgttgcgaaaaacctcgcgtacatcgcgaactctggtcccctttggcagaacaccactgccgatcagcctggttggaaattcaccttcgcacaaggtgtggacgccaacaacaacgcggttatcgcagtcaataccaccaaccctgacggctcttatcgctcgcaggtcatgcgatgggactgggcgtccacgaacgtcatattcaacaaccgtccgctcttcgccggtcaatacaccccttgggattctgggaacttcgatccttccaccaagttgacggtgagtgccacgaaccaaatcgccggcccaaccgggattcggaataccaacggcaacaccggcaacatgaacacctggggttccggctccacgacggcatcctatggcaatgctgccattcaaatcttcggaaaagggggcggtgagcctgccgcgatctatttcgacaactcccagaccggatggtatctgggcatggacaaggatggacagctcaagcgggccggctggtcgctcggcaataactcctatgtgatcaccgacgaatccaacatccgaacccatatcaacacaatggctgcgcgcccgatttgggggaatgtcgagttctggggtccgtggaacttcgatccgaatcttaaactcactttgaacgctttcaatgatagctcatacaccaggatgaccaacagcggcgcgaaagacgttggtatcgcgtccatgacgagttatgctgatgcggccatgtcattcttcaactatgaagcctcgaatccgaccgggccgcgcgcggccgttatttcgttcgtgagaaatggatcgcgtggagtgctattcggcttggattctgacaacaagctgaagtggggcggatattccctaggggccgtcgcgttcgagattgccgactccaacaacctcatgagcctgtggtcatcccacgctgccgcgccgaactggaacgggcagaccatctggaggtcgggaaacttcaacccagacaccaaggcgactttggcagctcgcaatacgacgtcatcccctacaatattcagttatggggcgtccggaatcgcatcaaccggacaggtcggtgcgttggttgtggaaaacaacagagtcaccaataccgcagccgccatcacgttccattcgccgcagaaatatcaggtcaacttcggcctggatgcggacaacgtggtaaagatcggtggcggcacaatgggcggcgtagcatatcccatcatccactccggcaactacaacaactacatcaaccaggcgctggttcaggtgggtcttggcggagtcggttcctacgcgatccttgccgtatttgacacctccgcgccggcagcgtccattgcccccggaacgatcatggacagttccaagctgttctattcgtcctgcgattcgacctatcgcagcagcgcccgtccgacgggcacctggcgctgcatggggtatgtgtataaccgagactccaccaacggcgactcggcatccctattccagcgggtaacgtaacatgaaatggacgcggatcagaaaccctcgttggctggatgaaacaaacatccacgccatggtgactttcgatgggatcggggaagttcctttcaccgccaatccgcacgacgtggaggcccacggaagggccatccacgctgcgatcctatccggggcgcacggatctatcgccccggtcgatgcgaagcgggagcaggccttgcaggacgctatacgggccagggaaaagcgggctatccttcgtgatacccgctggcccatagatcgtcacgacgagcagaggcggctgggtatcgaaaccacggacggacctgggttgatagcagcccttgttcactggaggcagcagattcgcgattggaatagcggggatcggccgcgacttcccatggctctgaaaacgatgttcaaaaatcaggagtattgatgaaaatcacgaaggatgttctgatcaccgggaccgggtgcaccacggatcgggcgatcaagtggctggatgatgtacaggcggccatggacaagttccacatcgagtcaccgcgagccatcgcggcctacctcgccaacatcggcgtcgagtccggcggactggtaagtctggtggagaatctcaactacagcgcccaagggttggccaacacctggccgcgccggtacgcagtagacccgcgagtccgcccgtatgtcccgaatgctctggcgaaccgcctggcccgtaacccggttgccatcgccaacaacgtgtacgcggatcgtatgggcaatggctgtgagcaggatggtgacggttggaagtatcgcgggcgcggcctgatccagctgaccgggaagtcgaactattcactgttcgccgaagactccggcatggacgttctggagaaaccggagcttctggaaactccggccggcgcgtcgatgtcttcggcctggttcttctggcgcaatcgctgtatccccatggcggagtccaacaacttctccctggtcgtgaaaaccatcaacggcgccgcgcctaacgatgcgaaccacggccagctccggatcaaccgctatatgaagaccatcgccgcgatcaatcaaggctcctgacattccacccaaagaaaaggccgcttattcagcggcctttttgctttctggctttgcctcttcaaccatcttgatctcgaccggcgcggcggactcctcctgagttaccgaatccacatagttccctagtgaactcagaacgccgattaacagcgctcttactaccttgtccttgactgtctcgcctatgatcttggtcagaacggatatcaactcttcccggagtcttgggctgattcttggccgaaagcgcttgcgatgctctttgcgtttcatgtttagtcctctgtctgcggtcttctcctcaccccgataatggcttggggatgcgctgtgttagtcggaagggtcgggcgctattataacccgtcgaaaatgctcgcgcttaactgtttaacgatacgcaccgcgatactaaatcgccttctttctggccaaggaactctggcggcctggtccggtctaaggcctaatttgtcgacattaaaacgagaaaacccggatcgcctgtaggacaaggcgtccgggtttatttcgatctagtgtacgctagaatcagtggcttccgccccaaccgtccagccagcaatcgaagacggcgtgtctcggcttgtccttggcgccatgggagaagtgcttgaaccggatgacctggcccttgagatactccctgtcattccagcggcgctgtttctcgtcgtgggtcaggctggaggccgacacgttgaaggtgactccaggccacagacgttcgttgcggcagacgaacgcaccgaccattccggacggcgacaggttttctgcgtggctggagcgggccgtgtggccaagttcattgatgaaagcttcattgttgttgtgcatcaactcttccacgtcgatgatctcagcttcatcgtagtcgtatcgcttgactttcacacagtgcccttccttggcagtcgagcgaccgaacttgtacagtccatcagcgcgcttgcccatggacccttcgaatcccagcatcgtgtggcggcgctcgacttcgctgaactgttcgatggaagtcaccagttcctgctctaccaggtgaatcctctcatagccgaggcagttacgcaggaagttcacgcgctcggccgccctggctaggcgatcttcggtcggtgcgcgaggatcggtgaaatcatcgaacacatggaaagaccagtccggctcaccgctgtggcggcgaagatcgccggacgacttctggaaaactttcgggtcgctgatgtcgccgcagaccagctcgccgtccaggccgttgaacagtttatcgctgaggtattcgtagatcgattgattgttctgccgcttgagttgacgagtcagcgcctcgccttcgaatacgaagcagcgaaatccatcgatcttcggtgagaaatacatcggcagttggccttcaagcagcttcgggtcaaaattcgatgcgagcatgggtttcatacagttctccagaaaagaagcccggcgaaccgggctaaatggcggtaagccggctcagatggtttcgttggcgtggttcagttcggccacgatcgacgcatagcgctcgtccgactccttgatgaacacgccgtcgtacatgacgcctttgcgatccttgatggtgtcgtaggccgcagcgtagcaggcgagcatggtagtgtcgtgctcttccgtcacatcgaacagagtcatgacggccaagaccaggctcttgatggctaatccatgatttccgcgtgccagcgcgccggccagatgtccgaggtgctgcaaatcgtcgccgtaggtgggatgaacttcgacagtctcgctgaagaccgatagatgatcgaacagattttcaccgagttgcgcggccatgaccgtggcaaccaccattacgtcgccgatgccgtctttcacctcgactggtttgttataaacccaggcttcgcaaacttctgcgaactcttcgaccaacttcaggaattgatccttggccgaagagcctttgatcaggttccggtcggaaccccatttaacaaccaggtcgtgaagttcgcgactcatgatttgttcgatattcattctttcgattccttttggatttgggatttgactgcgttgattatggacgccgtgctctggcgcgatccatccttggtggtgccgaagtagaaggccatgaccgacttcagctcggcgaaccaatagccgatgatggtgccgatggcgacagaggatgtcgggtccatcagagcctcgcggccgaaggtgaagattgcgatgatgatgagaatggagcccgtcagaagagcgaatgtaatcgccgggcgaacgaaatcgttctgctgcgcggcaagcctcctcgccgaatccctgtctgccgcctctgcggcgaactggctaagctcggcctggagctgattctgctcagactgaaggcgattttgttcggcttgaatcgcaagctcctggagacgaacgcgctcggcgctctggagttcggcgaggcgcgctagagcttccggattcgcgtctagagcgctagcgaccgaggctgggtcggccttcgaccccagcgccgtcgcgacgatagcgccaacggcggcgcctgcaggcccacccaggagcgaccccagagccggggcagccgcgccgatcttactacctatgtctttccagtccatttcgactcctcaaaagaaaggcgccattacagcgcctttctctggccgttgacgttagaactcttcggcttcggtcgcatcgccgacgccaccggcgtcactgcgaggctgttcctgcttgctgtagtccaccttcacctcgccgccgacgaacgacttgtacaggtcggccgcagccttgaagtgatccgggttcttcaccaggccttccagctcgaactggacgccggaccagctgcccttgtcgttcgacatgcctacggtggtcatacggaccaggttggcgaaagtcggcggggtgcgcaggccctgcggggtctgaacctttttctgggacagcgcggtcatgagcttcttcgaggccttgatctgcgaagacgacagggagatcagagcctggccgaaatcgccggtgtccggatcgatgacgatgacgtaatgaccacgggtgtcggcgaagtagtcagacttcttgtcgctgaccgaaccgtcttcgttcggcgcgtacaggcgtccttcgacttccttcaccttggtcgggtctttcatcatttccttgaagtcttcgacgctgatggcgcccttgaaaccgccctcggcctcgcgaccggcccagcggatgaactcgcggcggtacgcggccggaatgatcagcaggccggtcttgccgtcgtaaaccttgccggtgacggtgttcaggaacatgccggccttcgcgccttcgatgtacttcgggtcatcttcatcgacctggggagacatcttctgcaaaacctggatgaaggggatggcataggactcggcatcggcgccttcgaagcctgcgccgtcatacgatcccaaatccatgaagtcgggaacttcggtagtcgcgacggcgccgccaccggtggcaactgctacggccttggtttcttcggttgcttcggaagtttcggttttcttaccagccatgttaggctccttgtttgtcgaatttcagttatcgctaactgtgggtttataataacggaagttgcaactaagtaaagcaaattacatattaagatttgctctttttcaccttcggtttcgtgatcttggcctctttgtattcgtgtacgccgatgaaatctggcagctcttcgcccttctccaggtactcgcgaccgaacgcctggagggtctggtaatggacatcgcggttgatggtggcgtcatagccggcttcgatgatggcctcggccgccttcttcgcatcttccatttcgccgcgaccgaattcggccagaaccttggtcttgatgatgccgtcgttgtcggtgtcttccagccacttccagaacttcgatttgttctcttccttgacggaaatgatggccttcggctctacttttaccgtgcgaccgtccgccagagtagtggtcttctgaccaagctcctccaacagctccggaatggtgttacgcttgagggtcttcagctcctcttccttttcggccagcgccttttgaagatcgaggatttcgccgtccagctgcgaagccttgtccaccaagttcagcagtcgatggccgatgtcggtggcttcaaccgccatttcatccatgacgccaaaatagtcgatttcgcccggcgcgttctctttcaagtattccgggatttcaagctcttgctctttcatgtccgcctccaacttattgatgttcccttacttgaaccaagtattgagtagatattatgccgcatcttccttgatacggctactgatttacatattaaatttcgtcgcgagtgctaacgtcagcctcaaacacgccatcaacgacataacttgccaggttgcgtttccactccaagctgacctggattttctcgtcgatggaatccagacagatcaggtcgaagtacagaaccgagttgacggtgccgattcgatgatttcggtcttcggactgcatccgcaactcgttgtcttcgtcggtcgtgtagtaaatggccacgtctgcggcggtgagcgtgatcccgatccctgctgcggccgggttgcccaggaacacctggacgcgcttggcctggaaatcgtcgatcaatttttcccgctcggcctctttggtctcgccgtagtaggtgccaaacgaaatcccttgggcctccaaatacgccttgatctggtcgatttcctgaatgcgcatggcccagacgatgatggaacgctccgggtcttcctccagcagaccctccagaagatcagtaaacacggcgaatcgcgggttgtcttcgggcggcaggatcaccggctcaccatagacgttgatatagccggacgccacttgcttgagcttcgagcgcgctgccgcagcatcgaaagatacatcaagcatgaaatcttcgttctggagaacaaagtggtagtcttcttccacgcgctggtaaacctttcgttgctcaggcgacatttcgaagtatatgcgcttgtacactttgtccggcaggaatgggagtgcttctttcttcgttacacggaaactgtgcggctcgatcagggaccgcagcttgtccaggttccggaataccgggcgcccacactcgtctttttcgaccagttgcggcggcatggtttgcttcccttccagcttgcgcatgatagcgatcattcgaggatcgtcactgggcaccaagacggaaaattcggccacaaacgcccgataggatttagtccccagaattccattccgcaagaattggaactgcatgaacaaatcggtcggtgcccgcgtcagaggagttccggaaaggatgcgacgggccacggccttctcgcccagctttacgatctttttcgcacgcttggcttgtgggtttttgatcctcgttgactcgtccacaattgcgcaaactttgaatgtatcaaggaatcgctcgacctcatcatagccagcctggtggttgattgcgtcaacgttgatggcgaagacgcgaagaactttttcatctgcgaacgtctcggaatacagacggtccaagcgcgccctggcctttttggaagtcggtcggccgcgccaatccacgctcaaagtcttgatcgcgacgtgggtgggaatctcgcgcagaatccagttggtgtggacgcctttgggggcgacgatgagcagcgcgtccacgcgcccctgtaggaagaggcgaacggcatcggccaaagtcgtccaagtcttcccggtgccctgctccatcaggtatgcgaagttccgtttgttcagggacgctgccagggcattgaattggtgctgcatggcctcggtcttcatgcccttgacgggatatgttttggctttcatttgttctccaaatcggcgaggaactgaacaatgttatccagtccttctgcatagctcgcaacttccaccaagtcgcggctgttaagctcgaacaaatcgagcataggattcagcagcagccaatcggttccgatcttggccaggacgaagccccggccaccccagccgatccgctcccgaagaaaagggatttgcccaggttcgaaacatctggccattgggcaggtggaagcgcgtttcggccactcctccaaagccttgaactcgacccagaactggacacctcgacgattcaggcagatcgaatcggacatgccagaccgccgcgtctccagaaagtcgatcaggattcggccgagcgagcgctgcttaaacgcattcgccgctttcgtttcgcgatcattcatcaccttcgccctctttggaaactttctctgcttgcgctgccagctttgctttttcgcgttcggtcaaaatccgcttgacggccttcacgatgaacatatcgattccgctgagcttccagcctttgatgaggaaccaagaacctgtcggcgtcccttcagcaatctgctttccgtattgcagatatttttcaggcctaattctgaaacgtatcggctgatcaaccgagtcatcaacacacatgatgtcgagaaactgcgactggcccttgtacaccgggtttttcccttgatcagccctcttcttctggcgaatcggttcgttctcatcagacagaacttttttcaccatcttgacaatgaccagaccatcatctccatcgcggatatcccgaatgttctgaatggggtttccggaagttactccaaccagctccggattgtcataagcatgaccccagagcgtgtgagcttcgttcaaatctgcgaattgaacttcagaattcgacagactcgcggcgactttctcccaatcctgaagcgtcttcaggtgggtgcctgccagctctttatattgagccttcaactccttcagatcggccttcaactccttcagatcggccttcaacagtttctccagttctttgtcttggctgattttcgccgaaagaatctgggcttccagagctgctacatcagcagccttgtcctcaacatcctgtgccgatatcgggcaattggccagggcgatcctcgcggccttgacttcctcacgaagacgcaggaaccgctcggccttcgccgggccgaagcctttggcgttcatgatgccgccgatcaggcgcccgtccgccaccacccagttgagttcggaatgctccgggtccagggccgtatattctacgccttctttggccaattcgcgaaggatagacacagtttgctggtcgtccttcgccgcccgaaggcacgcggccgcgtattccaggcgatgataccgcttcatgtagcaagtccagtatgtcaccacggcatagcttaccgagtgggagcggttgaatccccaggcgccgaatgtcaccatttcctgccaaactcggtgagcgtcttccggggcgacgcctatggtcttggcgccctcgatgaacaattctcggcgcttgttgaagaactcttcgcccttccgcgccgacatcgctttccggatcgccgacgtttgttcccagtcgaactgaccaatgtccttaacaattgacatgatctgttcttggtacaggaacacgccatacgtccccgacaaatactgctcgacctgcggaatggtataggtcacaggctcgcggccggccacgcgctcgatatacttggttgccataccagaagacaacggacccggacgggcgagcgccgtgatgtggtcgatgttctcgaacgcggtgatgttgatcgcgtttgctaccgagcgaacggcctgcccttcgaactggaagatgccggacattttgtcttcattgagaacgtccagaaccgccttgtcgttcaaaggcaagtcgtacaactcttgcgcggtcacgcagttcgcgtcctggatgactcccaaagttcgaagtccaagcgcgtcaattttgaggagattcagatattccgaatcgggcttgtcgagctgcgcaacgccttcggaagtcaccgtacagaagtcgatgacttcatcgttgcagaccaggatgcctgccgcgtggacgccagagtgggatgggtgaatttcgaggtcgcccatgcaggcggacgcgatctcatacttttcacggaagtcgcggccgggctgagttttttcgaaagtgtcctccaatccttttccatatcgttcgtccgctgatgtatattcgatgatcgagtttttgatgttgtcggtatcgtggaaggggatgccgaagcgctttccgacgtgagcgataaccgacgcggccttgagtgtgttgatgttacccaacttcacaacgttccaagtgccatacttctgctggagatattcgaacactagatagcgatgggtatcggcgaagtcgatatctatatcgggaagatcggaacgggaaatgtcgataaagcgctggaagagaaggcgatgcgggagcgggtcaacctcggtaatgcccaggaggtagcagaccaaagagccggctgaagagccgcgagccgggccgaccagcatatgcttcttggcgaacgcaaccagatcggcgaccaccagaaagtagctgtcgaagtctttcagctgaatctgcttgatctcttcttggaatcgatcctcatactcctgggtccattccttgatgtggccgcgactgaggcggtaggcttgcccctcgcgagccagagcgacgatatcaccatccaagtggatcatcggcgccttcgccagtttcacatccgccaactgctcgactaccgcacgagtattggcggcggcggcatcgaactcttcgcgagtcatgatgtggcgtaaacggctccacaactcctcttcggtggcgatgtggcgaaggccgaccgattcccgcaccttccaggcagacgcgaaatcagcatggtcgatggacggcatgtcgttgtaagaggtaatcaccaccggctttccgaatgctctggacgtctccatagcaccgtgcgcggcgaccatcgacgcgggattgatgtcaatgtagtcgattccggccagatccagatgggcataggcctcgccagcgaatttgatgacgccgtcagcttcctggaattcttgcggagtcaatccttgattctggaccgacttggaagtcaagcggtagaacttcttagtttccttggcaagcacccaggctttgagcttcagctctttttcgccgtcgtcggcgcatttgatcggaatttccatgccgaatccgcgaggcagttctgctttggtagcagcctgctcccaacggacgtgaccccaggttccatcatcgacgatggcgacgaatggggattcgatctctttggcgcgctcgatgatctccgggaatcgcccatatgcggcgccgtaggagtagccagagcgaacgcggagttgagggaaagacattatgcggcctccattgcttgatatgcccgatatacgcccatgcgcttgcaaacttcgtggagcagccgcacgtcgtcgagcgcccggtgtttctgtacatatgggccgcagtagtgctcataaagatgctgcagccgcatgcggtggccgaacaacggcgccgactcttccacagtacagatatcgagcgatgggaaattgacttcgtccaggccgagcttgccgcgagccagatcgcaggtaagcatgaacttatcgaatggaaggttgtgagcaatattcgcgtcggctctggaaaagaagtcgcgaactttctgacgctgatcgaggaaagatgggtgcttgatcagatcttcgttcttcaaccctgtgatcttggtgatgatttcctcgataacgattccaggattgcagatgaactctacttcatccaaaatcttttcaccgtcagttatcacgccggcgaattcgatgatcctcggctgcttcctcaaactcaccctctggtggaacgggagtcctgtggtctcagtatcccacacggcgaatatcatgtttgttccctcttatgtcgaaagggccggctgctttcgcgaccggcctgaggagtataccgcgacggctgaagatttacgccttctgtccgtctttcggcgtgatacggccggagcgcatggtggcgtggacaaacgccgaatagttgatcgagtccaaggccgaatcggcatccttgaacccgctattcgccaggcgagtgagtttgcccaccatgtgcatcacgaacagggcgagtcgatggtcatcggcggttttcgccaccaggccgttcgggaagaggatttccatgatctttccgtacatcagatcattgcgaccataggtgctctggcggtcgcggaagacttctgctgcggcgtacagattgttgagaacatcttccgcgaaatcatctggatgggaatcatcttcgcccggccagacggattccatggcgaacggcgcggcgtcttcggtcgggtcttcggactgagccgtttcagcgagcggagacggggctttcgcaaacgcctcgtcgagggtaggggcggagttcggggcggccgggaacggctcgcctgccatgtcgttgggcgcgctatcggggtcgctatcggccgcgacggcgaagaacggcgcatcgcaaccttccaggttcaggatgtaggagtcgatccccaggctattgtaggcatcgatgatgtcctggcgatcatcgaacgccgcgacgatcttggtgacgccttcgattttcttcagtatgtcgagcgcgactgcccgcttgaactgaggcgccggctcggtgttaccatacggccgcatgatgagttcatactcgcgatgttcggcgatgccgagttcgcggtggagcttggccctggtctggaaaaagtggttgtcggttcggccggtgacgaagaaaatcatgaggtcggcgtcgatggcattcctgatgcgacctacagcgtgcgggttgagagtgtccttgtcgagacgagaatgatactcgtcccattgccgttccaaggcgaagctcttgcggtggctatcgtcgaatacgcagccgtccaggtcgaagatgatgatgccattctttggtttgcgttccatattcagatttccttactggttgctttctgggtgacggttttatcgatgaacgtcccatcagaagtgaggcggaaaacttcgccattctggatgaaatcgaacgattgcacgttcatcgtgatgcgaatggattcgctgccgttggtcacttcgacttgtgcgatgtcgccaactttctcgacaatgatcttcatgttacatggacttcccattgacggccacagggttggcctcttgtttttccgatccccagaaatcgcggcgcagttcttcctgctcggccgagcgatccatccaggggcgatagaacttgcactggtagataggttccaacggaacatcaatcacaggaatctgacctggctttgtctccagagcggccatgaaccggtcataggatttctgctggatttcctcttcattcatcaccttcgacccatagcgcgggaaggcgcaggagccggtggcgacgcagtgcggctggagcaggctgtcgaacataggatagacttccagaaccagccggcgcatttcgcggaatacttcctgatattcaccctgggtccgaacgcacaggcgaaccttcgccatgtcgctgagagtccgcagattgaacttggccgcgatcttcgtttccatgttggaagggatgatggcacgagcgtcctggagcgacgcgccggcctccagaagcttctggtagctggtttgcgcgtcggcaatggcgtcatgccacagacggttcagctcttcgcggacatggtaggtcgggtcaggctcgccatttaccgtagccggttcgtcgaattcccagcggaaggcttccggctgaacgacggcgctgatttccagagcgcgactggtttcctgctggtaagccccggtacgagtccgaacgagttgatgggtgaagttcttgctgacaccctcgatctggaaaatgaagtccacgaactcgaacggcgagcggatggtgtccagcatgtacttccagtggtcaagcttttcggcctcggtcatggtcgccgggtcttggccgcgcatgcgagtggatttcgtccccaggagaagttcccaggcgttctgggtgtaactgatcagagaaattttcatcagaaatcttccggaattggcgtgaagtggaattttttggttagagccagggccaggccttgggcttgctctttacgaatgccatactgctctatctcttccttgagcagttcgcaggcctccagacgcgactcatactcttcagcctcctgaacggatgagaaaacggttccatcagaggttctgtacacaagttcaatcgacatgatgacctcagtagcagcggatgatttcggcgcggatatctcgacggtcgaggtagtgctcacgaatcttatcgcgggcgcgctcggcctcttctcgactgccgaacgacaggttgaacgaagtgaaaggcttatcgtccaggcgcccatcgccaatcaggtacaggatgcctaccagcacgaaagacggcgctgtctgtcgcgtttgcggcgggtcgatttgcatttcgaggaaagacatgggaacctcttcaggatgatctggtgcgtacattaatagcgctcctgctgagcagctacggtttccggctcatagatgagcatgtcaacgatttccgggcactggcctttcacccagtcgatggccgcgaccagtgtggtggaagcggagaaagagaaagtgcggtaagactcatggatgtacggcgaccccatcgaatcgcgctcggtcgtgcgagaaatgactgctttgatattaacgatccggcccatcttcggcctccactttagcgattatatctgacaggctcagtttctcgccattcaggaaataactggcgcgaaacttcctgtcaccctctggcccgacgatccgggccgttatggtgagactcccgccgccaagggcatcggtgtccctgaagaaagccagcagcgcccgcttgagcgctgcctcgcgaggatcgacggccattaacctaccacgttccagccgtgctgagcgcaccaaaccgcaccggcccctgcaggaaggctattcagaaggaacacaggagtcaggcgaccgtcctcggtcatatgtatgaagtagcgggcgccttcaccgagccactcggccttggcgatagcgcgttcgagattggccttggtggcgtaggttttggtgtggttcttgtcggtggagaaggttacttcgcgggccatttgtagattccttttggttgaagggtttcgcgtttcgatgagggaatattacgcccacctgatccagaagtaaagcacttttgtaaattacttcacgaacattttcttggccttctgataagacgaagaagtcatcaggcgctcgatgacgtccatgtccgaaaccagatcatccagaaggacgttgcgccaggtagcgaaccggccgagcgagaagatgccagcctcatgggtgagattccagatcatggattcgcgctcgtcgcgaccgagcggaatgattttgcctttggtctggatggtcggctcgccatcttcgatgagctgtttccttctgatgccgaaggccgcgcaaacgtaatccatatcccagtcgctgtcccattcgatggtttcgattttaccatctaaagtctccactatccctttagtgatggattcgacgatcagagtatcaccggtgatggacgctcgaaacgttcccactttaggaccagggaaatacacggtctggaagacatcacaggggatggagagcttgtatcgactcacgatgatggaggttccttcaccgaatgacgggtcgattcccaggtccagccctgccgcagccagattggcgcggaacggcgcggtgctgatgatattcacgtggtcatcttgccggcgaagatactggaagaaagaggcgtcgaaaggacggctccaagtgatacgattcgcaagcttagccaccagctgctcatagtagtcggccggtgcgatccaacgcttttcagtcgccagattccagatggaccggtccgacaggccgcccgttactttcctggagtacatgttgcagtggtcgatgcgcggctgggaaatgaactcgccatcaatgtagatggccttgtgtacggtgacttcgcggaatgggatgccggtgagttggccgatgactggtgagcggaaccgcaagagcgcgttgtggcgttccttgctcgtcggcgtcgccgcgtcgatgatttgggcttgaggaaagcgatgcgcggcgatcaggccggcgagtccggctcctacgatgattactttctgatcaggaatcatgatgtgtcccttatgagtgtacaaaacttgagaggataaaaaagggacccattttcatgagtcccttgaagagctagacgattcaggctcagaggagcggcggcttactcctcctcaccttcggaaccatcggcgccctgatcttcaccgccgtgctcctggccttcgtcatcggccttctcgtcatcgccctggccagcttcgtcttccttcgaagcgatggcaaccagatcgacccagcccatgatttccagcttgctcaggtagctgcggaccgaggtgccatagagaagatgggccaccttatcgccgaaggattcgatttcgaccggctcaccaacggtgcagtgctcgttgatgtgtgcgaacaccttgccgcgagtcgagaaggcctgcggagtgccatggccgtcgccggtcgggatgaagtgagttgcgcgggggcgacgcgagccgttggacttcaggtcttcgcggcgggcttcggccttcttgcggcgctcttcctgctcttccttgcggcgctgcttctcggcttcgcgctctgccttcttctgctcggccaggcgcttgcgctcttcttcgcgtgcggctttctgggcttcctgcgcggccttcttctcttcggccttcttggcgcgctcggcttccttctcggccttcttctgctcgcgctcggcttccttcgccttcgccttctcggcctgctcagcttccttcgccttggccttttcagcgcgctcggcttccttggcggcggccttttccttcgccttctcggcgcgctcggcttctttcttctcgcgctcggctttgcgcttctcttcgcgctcggctttcttctgctcggcttccttggccttggcttcggccttctcggcgcgctcgcgctctttacgttggcgctcagcggccttctcggccttgcgcagggcagcggcttgttccttggtcagctcttcgccttgggcctgttcgttctggttcttctgttccatgttcttactccgggaatgtttaaagggatggcttattggcctgtgaggggattatctctaaactaattgaagaagggaatacccttagcctgaactttcctaaatattttctttcgggaaagtccaaactctagggaacttatttatgttcgagaagttcctagcttttacgcaagaacagtaagtattcaattgcacgagtgatcccagtatacatcaactgactataagggatggacggcaagttctcttccaacatggcgactcgtttccactccgacccctgcgacttgtggaacgtcatcgcccatccgaagtcgaatccgccaatagccttctgcgcctccagccgcacgtcttcctcggccgaaaaactcagaggattgaacttcacccagcgttcatagttcgtgccgataatacgaactttggcgaacaacatctcatcaggctcgtcatcatcttcttgcccttcaggaaccggcttgaagtccagcagaatggcttgttcgccgttcataataccatattcgtgctggttcccagtgcacaccagcttctcgccgattcccggctgcgcacctttgtagccgaggattcggcgagcgcgtgcgttcaagcgacggcgagtattgttgtaagcgcaaagaattacaccatcgttgtccaggaacgtccgcatttcatcatccgacatatcgaagccggcccggaccactatgtcatcatactcgcggcatggcaagcgcttgccctggcgaacaaacatcgacgcccgaacgatattgccggcgttgcgctcgatttcggtcatgatggtatcacaactgttctcgtggaagatctggacgccgcgcacaggaggaacttggccaaagtcaccaatctccagaaccggaattcgatgcgacaacaggcgctcttcatcccactcgccgatcatagacgactcgtcgagcactaccaacttcggtttctcgtcgagcgagtctttgttggcaaacatgatttcgccgtcttcatcttcaccgatgggtcgatagataaagctgtgaagagtccgggcattggtgcagcctttctcacgaagacgcgctgctgcttttccggtcggtgcgatgaagactgtccagtccatcgagcagcaaagctcagcgatgatcttcgcgatggaagtcttaccagttccggcaaaaccggcgagtcgatagacctggcggcggtgtgctcgatcacaccaaccgcgataccagtcaacgacggaatttatcgcgtcgatctgctggctattgggtcggaatccgaatcgctcttcgatctgatcgacggtgaagttagatgctgacatatttgcgttctccaacgctaggtttaattgaattgaggctaagtttaagcaagccgtccacagaccatccagtatcacgacgatacttgcggccgtgcggatcgacatagaagtttttcgtgcggcgcaacagaacataatgccaagcggcgccgagtgcgtggacccttcctttatacgggaaagccttcgcctgctctgcggcctctttggccccagggagccagcggacggtagaaaggaccaggaccgcacccttaatagcctgggaagcggcgcggccgtcctgtgggctatagcgatgtctatcgaagtctacccagtggtggttgccgcgccggagcttcaccgtccgggaccggccctcaaacaccacagtgccttcgtgagtaaaaatatgttccgccatggaatgttccttataacgtacagttctgctttacctctgcgcaagaagagtatactatcagctgactcgtcaaagcgagcgaatttaatccaactttacttcggcaggaaagtggccgatactagcgccgccgcctgtactgccctccaaaacagaggatacattaaatgcaagaatgcaagatttcccgcgaccaactcccggtcggtaatccgaatcccaatgtcgacaagacccgcgacccgaaccttaagcccggtttcctgcgtcgcagccgcgagctggacccggcgctggccgttcgcatccgtcgcgagctgatccacgccgaagcatccgacttggccaaggccggatgggtcaattcacagtccagcctctatggatcgaaagccttcccgcgccattccgtcgttcgcgtgaccggagttccggaagatggagctttcatcggcatgctgatcggcttcatcgagcatcgcgagcatggcgaatgggcggtcatggaagccggaacgaaagaaggcggcgccgtcattattccagtcgatcacatcatgcgagcgtcattcgccgaagccgaagagttcgccgaaaagtgggagcggaacttggggtggcgtctcctgcgccaactccgcgagtgcggcgccctggccgggactgaagacgagttcctgcggcggatcatcaatcgatacgttcgtgatcgcacgatcctcgatcaccacaaagtcggcgcggacaaaacctatactgatgcagtactcaaaagcatcggcgaaacatggccgaagattccttcggggaaattcgtcggacaccgagtcgcgcagctcctgatcggccacaagctaggtcgagcggggaccatcctgaatgacctggtggacttcctggagaagttcgcggccgggcgcgataaagttctcaacatcgccatctgtaattgaggtgaatgaaatggttgacttggaaaagctgagtccaaagctgagtcctcggcagcatgccgttctactggagatgtacaggcatcctgagcatccagttcacagatcgccaacgaatttaactcttaaggctttgagacgaagggggcttgtcgagctatcctggaaggattccgtggctggatatatgttcggtcgccaaccttgctggaaaataactgatgccggcataaggcgaatcctgggagtgctggggaataatatggaaaaagaacaaagcgaagatcgcccaagcatccctgagtttgagaagaccgacgccaacaaactctatgatgctctggagacgatttcgctgctggagaagaagttggacgaatccgaaaagcgcgggagcgagctggccgcgagctattgtgacggcgtagtcggcgatgaatacggccatccttattgtcgttataaagtggaacgcgacgccgccttggccgaagtagagcgcctgctagaaccaaaaggcgatccctctggcagcttcgacaggtgtatgaagatgatgtacgagcgcgacgagaatgcaaaacgactcgacgccgccttggccagggtcgcggagctggaagggaagttgacggactgggtgcacgaagggttccggctcaacgaggcgctagcggtcgccaaggctcaacccagcgtgccggaaatatctggcatcggtcgcgatgccgaacatcccagagctgtagtgctgtatctgcgtaacgaacccagcgatgaagatatgcgagcaattcagaactttttgcgcgccatggccgcccccgctcagcacagcgtgccgaaagcatggctcgacgttcaggcagagcgccgccggcaggtcgaggcccaggcgctaaggcaggaagtcgcagcactgcgcgcaagggcggatgttgtgccggaggtgttcgggcttgagcggtaccgcgtagaaaaaactgggaagggtttctggccatactgcgtgcgtgcgggggatggaacgcgtgaactgttcgtcggccacttgaagcagtgtcagcgggtagcgaccgaattggctacggcgtttgaagatgggaagtttatcgccgcgcccggcagctcggctcagcacagcgtgccggaggggtggaagctcgtaccgatggacccgacatcgcagatgacctatgtcggtcagtccctgcgttgtgacgcggtaaacagcatcggcgagatttaccggcaaatgctcgccgtagctccctcacccatcgatccggccgcgcatcctcagccgtgccagcaaccacaggcccatcctgcccgctgcgggtgcgagcggtaagtgccaagtaaggaattcatgtaatggaacagaagaaaccttcaccagtagatggagtcatcatgaccagcctcgacgttctccggaaagcacagcccgaagcccaggacgagtatgccgtgtccatgttcgcaacggcgatccgccagaaaatgcagcgctcccgcgataaaggccgaggcggctggatcgactgcgacgaagatattctgatcaacggattcgccgaacatgcgctgaagggaaatgagaacaacctcttggacctggcgacgttcctgatgttcatgtgggtgcgcggcatcgacgatgcgaagattcccccggcgctcgaaaaggcgcggcagcacaagatcatggaagcatggagtcgggtccacgaagatggactaaactccgccagaaaggcgagtgctgcgcgacagttcgtggaagtgcctcgacgcaaggggcgcccggagcgacttgcatgaagcctcacgaaataagactggcacaggccgaagagttcctgcgcgaactcggccgagggattccggacgacgaacgggtaatggtcggctacgctgaagaggccacagtccaaaccgacgagaacggccgcaagctcaacgcaggctggtggcccgtgccctggaaggaaggcaagtacatcaattccaggtcaaacgcctacgcctgtatctcgtcttccatcaagacgcccaacccgaagaccggccagatgcgatactggcgcggcgaggcctctttcggccacggcctggcgttaatggtcgatgacatcggctccggcaaaggttccaaaggcgacttcgaccgcgacgagttccgagaacgcctggagccgaccgcgattgtggagacttcgccgaacaactaccagttctggtatttcttcaaagagccgatgtcccacatgcttcagtttaaggcattgctctattcgttcgtggaccaggtgctaaagaaaggcggtgacaacaccgtcaaagacgtcagccgttacggccggatgccattcggcttcaacaacaagcgcgggaaagacggcaagttcaaatatgccgacgaaaacggcaaacccgaactcgtgcgcctgtacagcgccgactattccaagcgctactcgccagaggaaatcgcgcaggccttcggcgtccgcatcattatgccacagatgaagaaggtggagataaaccgcgacgattgggtgtatgaccaagtatggctgaagtatgccgagcacatctgcacgaaatacaagatgggagaagcggcaggcggccaggtccagcagaatatgtccggcaaataccgcatccgctgtccctggggcgacgagcacaccaacggcgatcctttcggcgcatactttcgcggaccgatacctggcgccgagcacgaatatgtgttcggatgcgggcacgatacttgccgcaaagagcatcgacggacgtgggcggccttcactgatgaagtcgtcctgccctatatcgtcgaacaattggaacgcatcaaccgccgtcatatcggcgaggagtagtaactatgcaaaacgatcctggaatcctgattaccgccatcggcttgctgttcctcggccttatcatcttcttcgaaggcctaaaggggtggaaaatacaagtcgcaaacttcctcgcgtcgcttctgtgcttcttcttcggtctttccgctttgacgttctggttcgtcgttgcgtttgacgtattttaatcgacgaacggtacagaaattttcggatggggacggaacttattagctatgccggtttaggtaggagataatagccgtccctttcgcctcaatatgtagaggcaatgttgaatccgatcatgtaaagcagaaggcggcaaacctaacatgattatcgacgaagataatgtttttgatgatggcgaatcagggtccagtgagtttgatctcacacagatagaagatgctggaatggaccctttgatgaccgccgcgagcaaggcggccgatgatgcgattgcgaggaacgaaacgcatcgcgcgcaaaaggcggcaagatacgccgaggcgtatgcggaaccagacttgagaaagcgagcgcgattgttgatgctcgaccaggcgttcgatcttccggtcagccgggtcgtgaaagggccgttcgatgacttcatcacgaaatacagctcgacttccgacagcaactatctcgcggtgtacgatactttgttctgtaagggcgacggaaccgtcccacacccgcacttcgacgagtttcgcggccggctggtggaccatcgcggcgtggcgttcaacaacaagaccctcgatccgattgacctgatgggcgccctcgcggctgcggccttggacgatccctcgattaagaagacgattgagacttgctgcgtgtgggcgcgtcgatatcgccgcaactcgctgatcgagacgtttgagaagaagataccggagtgggatggagaagagcgaattggcacgctgctgatcgatctttttaagccattcgacaccgaattgaaccggatggtcagcaagtatttctggctgagcctgtactgccgcatcaactatcctggaatctcggcgccgatctcgctggcgttgattggtgggcaggatgcggggaagacttacttttcaatcttgatatgtaaagagttgtcgagcgaccgaaagttatcgccggtccagcttgacctgagccgtcatgaccagacgccatttttgcgcaatatcactggcaactcggtgatcgcgaacgtcggcgaaatgtccggcttcaaaaagggcgacatggaacgcattaaagagttcctggtgcgatccgatgatactttcgatcagaagtttgaaccaggcgaaactatcagccgacaatggatcaccatcatggacggcaacggctatgatggtcttcaacgggatgagtcaggaaaccgtcgattttatccaatgttcgtggcgcaacttcccgacgaggatggcaagccgaattgggttaaaccgggcgatggaaatgaaactttccgcgttgacttcaccgacttcggccgcaaattctggcaagccatggctgagtgccgcgcctggattaaggcgaatggcgtggagggatatctcgatctagttcgggcgaccaacaacgaagtccagaaattctctatttcggaaatggagaatgcgcgtggcgtggttcgtgacgatacgattgacatgtatctgatcaatgttctgatcagttgtgagttcgaagagatcaagcctggcaggaattcaaagaatcctggatggagagtcaacaccatcgaaatcctgaaatggttcgatattctcgccaggaagaagccgatttctcgccacttgactccgcacctgaaggcgctaggatttgttccgaataagaatggcttgaatggctggtgcctgcctgtagataaggttgcgcctggatggaccagagatatgcacacgacgttgccgccgttcaatgatgtgcttgtatacttgctgaggaaggttgattctgaggtgactgatgaagaggcaatgattcaaatccgcaaagttaaggccgagcgcgcaaggatattgggtgaggatttctgatgtagtgatggagtgtacttggactaggccgccttcgggcggtcttttctttggtgcggagtacattcgatttcggttgtggccgagtgagattcggaagctatctggtaattagggtttggtggcgatggcggattgtggaaagttcgtgaacgttggatcaaggattttgtgcggtgattggatgaattgtggaaaatcgacgattctgactggatttttggggtcggccgcgccggtcttactggtaattaccgaaaccgggaatttgggtcgagccttagtgccgcgtgggcttgaagcgcttattcggatacttcccggtttcggatgcagccgcaaaagtatactacagcgaaaatcgattgcccaatcctaatagaaaaaatctatcacggacgttacctatctttaaaattaataaaattaat

SEQ ID NO: 51 - DNA, 67431 bp, synthetic construct
  source 1..67431: mol_type = other DNA
agtaatttggtaatttggtatactttagtatttgaaagccttgcggcactaagcctgtacacttcccgtcaagtttccgattccgctcaactcgcggcagggtcgccggaaacttccagacttacaatccatgggtcgcggcaacaccacggcggactaagcggcaagcgccaaaactcgacgaacggaaccggaaatttgggagcgcgacagaatcgctcagctggacatatttctaacattcgatttaacactcctcccaaacactcaccaccatcctcacccaccaaccgccgactcgatcctcacccaccagcaaacctcccatataacatcctataacaccacctaacactcattcaccatcaaacccacccagacctacaggccacccacaagcagcccatagacgcgatccctggccccatagtacaatcgcgccatactcagtgtcgcggcagagcaccaggggccatccgccaaccaagccaccacgacgactccagaatcgaactcagggacgcagcaccaaatgaccaaattctacagccccgacgatctagtcacgccacaggaattcgcagacccgcatttcgcggcgatcaaccaaaagcgattcgacctgtacatcgacctgcgcgtccaaggttacagctcctggcgggtcttccgggccatctggggcgaggagcatatggacggtcccgcgcaggcccgcatcttcgcgatggagtccaacccgtactatcgcaagcagttcaaggccaagttgaacgcgaccaaaacgtccgatttgtggaatccaaagacggcgctccacgaactcctccaaatggttcgtgaccccaccgtcaaggactccagccgtctgtcggccatcaaggaattgaacgttctggctgaaatcacgttcgtggacgagtcgggcaagacccggatcggtcgcggtttggccgatttctacgcatcagaagccgaggctcagaccgcgaccgtcgctgctgcggccgaagccaatggctatgtgccggaaggtgaagagggagatttcccgtctccgtctccggaaccgaccgaggaagaccgcgccaaccccatttagacataaaataacggctaaggatttaaggtaaggaggtttatttatgcaccccttcgatcaagcggtcgtgaaggatccgaccgcgtcctacgtggacgtcaaggcgcggcggacgttcctgcagagcggccaactggacgatcgcctcaaggcggcgctgccgaaagaatatgactgcaccaccgaagcgacccccaatccgcagcaaggggaaatggtcatcccgcggcgctatctgtcggggaaccatggcccggtcaatccggattacgagccggtggtgaccctctaccgcgacttcgagaagatcagcgcgacgctgggcaacctctacgtggcgaccggcaaacccgtctatgccacctgcctgctgaatatgctcgacaaatgggccaaagcggatgccctgctcaattatgatccgaaaagccaaagctggtatcaggtcgagtggtcggcggcgaccgcggcgttcgccctgagcacgatgatggcggaacccaacgtcgacaccgcccaacgcgaacgggtcgtgaagtggctcaaccgggtcgcgcggcaccaaacgtcgttcccgggcggggacacgtcgtgctgcaacaatcacagctattggcgggggcaagaggcgacgatcatcggcgtgatctccaaagacgatgaactgttccgctgggggctcggccggtatgtccaagccatggggctgatcaacgaggatggcagcttcgtccatgaaatgacgcgccacgagcagtcgctccattatcaaaactatgccatgctccccctcacgatgatcgccgagaccgcgtcgcgccagggcatcgacctctatgcgtacaaggaaaacgggcgggacatccatagcgcccgcaaattcgtcttcgccgccgtgaaaaatccggacctgatcaaaaaatacgcctccgaaccgcaggatacgcgggcgttcaagcccgggcggggcgacctcaattggatcgaatatcaacgggcccgcttcgggttcgcggatgagctgggcttcatgaccgtgcccatcttcgatccgcggaccggcgggtcgggcacgctgctggcgtataaaccccaaggcgcggccgcccaggcccccgtcagcctcgaacatcaccatcatcatcattgaagaaacgacaaagcccccggactctagctcagaatccgggggctttcttttgggcgccttattcgccagcttcgatgatttcgaagttgtatttgacgccttcgtgctcgaaagtcatcttgccagccgccttcagctgcatgcggaagcggatatgtttcgaagaaggcaggccgaactcgatgaatgctgcgttggtggaccggaactcgccgcgcttgcctttgacagtcacagccacgccatggcgctgagtgcgtttcttggaaacttccgggtctttccaggagttggcgatggctgccgacaggtctttggactctttggctttctccggagcgttcttggcctcttcgcgcatcttccggatttcttccagcgcttcctcttcggtgatctcttcttcaggcttcagattctcttcctcggccttctcttcttccttcttcttcttggaagtgcgggttttgtagactttggccggggcttcctcttcctgaaaggcttcttcctcggccggcagagcattcaggatggcgaggcagcgacgctcagcagtcttgcggtcagagaaacgcttgacggtcgcatcggcgttgtgagcgttgtagaaggcgaccagttctttcatttctgcgttctggatgtcgccgaaggttttgatggagttggtcattttgcgatcctctgttttggaagatttcgtttgggcttcagtttgtcgccccgttgaaagagattatgcctaggtcgatgctgcgtgtctacatttattttagcagaatgatggtgaacccgacgaacggttgtcgggtgtgaaaacaccgcaggacgaggctgcggtgttttctggacgatggtgcgacggtcagaaagtcgggatcggctcgacgggcagatcgccgggcttgtcgttgtccgacgcgggcgacggactggacgggatggccccggaccgaagccccagcggttcaggccgcctgcttacctgcggagctggaggcgcaggcggagcttttggtgcttgtggaactttcggaactggaggtgctggcggagacatcggcccttctggaagatctggaagatctggaaggctcgtcgccgcgtgatcgacgccaacgaatggctctggaaggtcgatgaggctcggcaccggatcgaagcctgtgaatggagtggtcacgcagcgcatgttcggatgggtcggcagattgttcaggacgatggagtccgcccagacatacgggtttttgtggttgccgggtccgtggctgatgatctcggcaggaatatggccgttcatggtaagccattccgccatcccttgccgagtcagcgggcttaccacgatctgaccagtggactctttggcgatggcgaacagatcaccgaattcgaatccgatgattgtgtagttggacctggactcgccgacgaaagccagggtttcgatgttgtggtggatatcttgttcttcccagatgtaaagcatgatgcgctcctcaataaggctgcttgctgtattcgaccagagacataccggccggaactttgaagcggacgtattcgatcatcatcgccgtgcgacgccgattcgtgcccgactcgtcattgacgaatagttcgcactggtgcggaatgactcgcgtcaccaggcactcacctttcgagctgtagaacttgctgtaggctgcgacgcctcgcgtcatgttcagacggatcgtttcgcagagtcgctgcgcggccgacgcgctggacagatcggtcggactgaccgtcacccagtaatggccactttgttctttatcggacataagctgccctccaatgagaaagcctctgcgactcggcagaggcttgttgttgttagtcgcgcttcaacagaacgactttgtcatatgcgcgatatttaccgcgccagtcttcccagtagtcgccggccgggcaggtaagctccaggttgatttcgtcgcgccagcattcgacagaaaggacaattgccttgttcctggctgcggaatccgccctgagcttaatcagaatttcgtcgccagttttcaactcatcaactcttacaacttttgccatggtgttctcctattgggcagcgccgcgagggcggatcgggtcgatgtcatgtaagcagatggtaggatagtccctggccaacttgagcttgaagtccacccagtcagcgccgatgagtgccgagacttcgatgcttactttgctgtgcggcgcagctccagatcgcaggactatggcccgacgccgaacgggatcgttgacgtcaacatgagtgagtatttcgtcgccgacgagcaactcacaggccatcaatattttggccatcatacactcctatgagaaggcgcggccaggacgatcccagccgcgccgatggattaacgtttgtgaaggatggacactgcgtccacgtcgaggatgctaatggtacggcgacggcgcggattgctgcgttcatggatgcgaatcaggttcgcagctggagcttcgtccaccacccatacgtcttccggtttctgcgtccggagcaggaccgtcacttcagtattctgggcgaggccgttgcagatgaaagtgaacttggacgagggagttctgtacatttcgagattcctttttggacttctggtccggcttctcagccggtgaagagattatgccctgattctcaccgccgagtaaagcatttgtgtaccaattctcccgtcaggtggaaccaaagtgcggtatcgcttatggctacgctaccgcgccatggcccttcttgctcgcacactgcgaaccacaggctgatttccatccttgccaggactcggccgaaagattcgaacctgcgccgactggacaggatgtcgacattcactcgtcgattgacctcataccggcgaccgttgatgacgaagaccagccgcagggtttgtccgtccagacattcccagtatctggtttcataccgaagccagtagcgctttccagccgggcctaccatggtcatttaatcgatgctcctggccgcgccacgcggtccggtcggcgggacgggatcgaaccgacccaggatgtagtcgggccggcgcgcttcctgaggacacacggcgagaaggcgccatcctgcgtccagggcagactggagttcgtccgtgcagcagtcttccttgagcagcagacggttgacgttctggagattcggaccaggtatggccgatcctgtgagtgagttccaaccctcgattccactcaccatctccggttggttgatgtagcttacggacataccggccaaccggctcgcggccagctccagacgctccagcatgggtcgcagagcagcttccgggtcaatgtcgtcccagagaaggaccaggctgatgatggtatacggatagtccttgtccagatcccaggctgaagcggtcaggcggcccaggccgatttcattacacataacgggaacgtcgttgctccaggtggacggctcccagttccgctcaccaggattcccgattgttacgccttccaggttccccagtagaacatggagcttgctgacatattccgcctccaaggctttccgctcttcgtcggtctggttgtggcgatagaaggatggagggctgactttggcatggtagagtttcataactgttcctcggttttggaagatttgaaagttagagaatggtgtcgcagtatttctcgaaaggactctggcgcttcttctcgcagatcgcgcaggtgatttccaggtcgggcagctcgctgtaagtcttgccgagatacagccagcgcttgcacagactgcgaccgtccgccatgaagaaatggactttgcgagcgttgccgggttgcgcccagccgcttggtgccggcttcctgctcataccatcaccatgtcgatttcgctggcgaagaagttaacgccgactccatctgcgtagccggtgtaacgcagccgaatagtaccatcgatgtgggcttcttcgacgccgatgacttccaggatggtttcgtcgcagtgcagcttgacgaacatcttgatgccggagccaatcgccgcgaaggcgatctgcttgtacaggtcttgcttgatcatgctttgcgctcctgtttgcggatgtattctgccctggcttcggcttcgaacttcgcccaaagcgcgttgtcgactggaccccagggaccggtctgagtcccgtccaccggcgcgaacttgccaccggcgcgacgatacttggacagcgttctcaggctgatgattttctcttcttgggaatcgaattggacgatcacttgacatacttcccgaagtagcaggtgtggaggatttccaggcccttggagatggccttcagcttgattccgaaattcttgatcgcccagtccagatcgtggtgatagaactcgatgatgttgacgatttgaccggcgctgtagtggatgacgcgaaccttgccgttccagcggaaatcttcgcggctgtttacggcctcgactgcgatggtgtcgtttctgccgatggtccattttgagctagtcatgtcgcaatcctctttttggagtgtttcgcgtttcgatgaggtaactatacctcagcaacttcattgagtaaagcacttttgaacagattgtctaaaatttctggaagacaaatcaatcggccgcgtcatcgatagcgaacgccgatcgcgccaggtcgatgatctctggccatgtcaaagtaaaggttttgccgtcatcacgaatgataattggagtctgcagcggctcgcccaccagcattgtgtaggtatgtttctcgccggatgcggagccgatgcgggtgcttaaggtgagcggggattctttgtgtacggtgccgatcatcgtttcgttcctcggtgatacccggagaatcgggcgcgttggattaggctttgccgcgacggattgttacgccgcattcagtagtcacttccttagcggcaggatcgcgaacaagataagcacaggcggctttgacattcaaagctcgggttgcgccgagtttgcaggaaagatcattcccctcttcgtcccacagatgggcaatgcgagagatacagcccttttctacttcagcttctacagttacggactggtcaatgttaaataccggcatcgctttctctccgagattgttccgtttcaatgaggtgactatacctcagcaacttcattgagtaaagcattttcttcagattatctgaaaccttttgaagtcaggaactgccgccagagccagtcgatgtgttcgttgcagtaacgctcgccatcggacgacatagccagagcaccatccttgatgccgaaccgggtgacggcgagccattcgaactcgaactggagcgttcctgggcgagggatatggggacatggcgtatttctgcacggtcagtgatcctcagaaggtttagcgtttgcgatagccgctactttctgcataccgaggcgatagaaatcggcttctttcctggcttttgtaagctgctccatggcgtcgcacgccgtcttgtgctgggcattggcgttcttgatgctgccttccaggctcttgtccagctcttcccggagcgccttctgcgatgctagctctgcctccaaatcctggattctgagctggagctggcgatttgtctcgccaacctggttttcgcgggcgatggagttctgaaggcattcgtcaaggcgagtattttcgcgcaccagctgatgcttttcgactttcgcctttctgcacgtctctcgcatttctgaaagctcaatcgcatgcagatcgtcatccgggtctttacgctcttccttcgactccatccgcaggtagtactggccggctgcgaaggcgagcactgcctggtcggcatacgctgcggcatcggtcatgtatctggatttgtagcgaggcagaaacttgcactcctctggatcccagaggagactatcggcaataggccagaatttgcggaagccatcaggatcgacttctacattgaccatttgcagctggccggcctccacttcgacttccagaggaacctgaatggcgccggtgatgtactggaagtacactatgctagacataacacaatcctcataagaagtcgcggccgggaccatcccagccgcatcgtaatcactcttcgccttcgtccgcgctcagccactcttcgaaggcgaaatttaccttagactcgacccaatcttgaagctcatcggcgaactcgtcactgtcgatgtccatcggaatgcccagagtctcttcgttccacagttcggcattcagttcgaactggatagccggttcgccatccacattcagcaggatgcggtctgcgacttcatattcgtcgacatcgaagaggaaaccgccgctgatgatgtgctggatgaaagcttcgtcgaagttgctgatgccgatattgatctgcttagtcattttttctggccccttatttggcgagtttgtactgagctttgagggtggtcagcttagctttcagggcgatcatagcctggccgcgcaggccttccatttctgcctcgctgatggcgatcttggcggagcggatttgatcgttgatctgggatttggtcatttctgcgttcctctgttttggagtgtttcgcgttcgatgaagagattatgacgctattcagaatggaagtaaagcagaattgtgaaatatttctcaaagtggacgaacggtatgccccgtcaggaatatttcctcccatggaaggcatttccgcatccgaatgttgattaggtatcccaaagcgcgcagtggcgaatgtgagtccgcacgtacatagggttgtattgtgcgaagtgctcgacggtcgcatccaaggctctgctattgccgcacccttccgctttgcgagccaggaagaatgcttctatttgctggtttgcgttcatcgtcttaccctccaggtgtttgttcgtttcgatgaagagattatgccgttggtcagaatggaagtaaagtgtattaacaataaaattatgttcaccgacgaacggttgtgctcgaccgtccgttgcggcgtcgatatactcgacctattgctgacaccggattgattagaatgtacaaactcaaccctgcactgcgagcggtctggcgaactcgcgcccgttacaaagtcatttatggcggccgggcgtcttcgaagtcacacgacgcaggcggtatcgccgttttcctcgcggccaactacaagctaaagttcctctgtgctcgccagtttcagaaccgcatcagcgaatcggtctacacgttgatcaaggacaagatcgaaaactcagagtataatggcgaattcatcttcaccaagaactctatcaagcacaagagtaccgggtcagagttcctattctatgggatcgcccgtaacctgtcggaaatcaagtccaccgaaggcatcgacattctctggcttgaggaagctcactatctgacccaggagcaatgggaagtcatcgagccgaccatccggaaagagaactcagaaatctggatcatcttcaacccgaacgaagtgaccgacttcgtgtatcagaacttcgtggtcaagccaccgaaagattcctgcgtcaagatgatcaactggaatgaaaatccgttcctcagtgagacgatgctcaaagtcattcacgaagcatatgagcgcgaccgggagcaggccgagcacatttatggcgggattccgaagactggtggcgacaaatccgtcatcaatctcaagttcattcttgcggccatcgacgcccacaagaaactcggctgggagccggccggatcgaagcgcatcggcttcgacgttgcggacgacggcgaggatgcgaacgcaactacgctcatgcacggcaacgtcattatggaagtggacgaatgggacggcctggaagatgaactgctcaagtcgtccagccgcgtttacaacctggcgaagatgaaaggcgcctcggtcacttatgactccatcggtgtcggcgctcacgtcggatcgaagttcgccgagttgaacgatgccagtcccgacttcaaactgatctatgatccattcaacgcgggcggcgctgtcgataagcctgatgatatctacatgaagctgccgcacacgacgatcaagaacaaagaccacttcagcaacatcaaggcgcagaagtgggaagaagtcgcgacccgattccggaagacttatgaagcggttgagcatggaaaggtttatcccttcgacgaattgatttcgatcaactctgaaacgattcacccggacaaactaaatcaactgtgtatcgaactttcgtcgccgcgcaaagacctggacatgaacggccggttcaaagtcgagtccaagaaggatatgcgcgagaaacgcaagatcaagtcgccgaacatcgctgactcggtgattatgtcggccattctgccgatccggaagcccaaaggtttcttcgacttctaaacacagaaaagcccggatcgctccgggcttcgggtcttactcggtgtggttcctggcgctgagtgtcgacgcaacggcctcgccgactcccagggcttcctggccggccgcgagcgcttcggcttccgactcgacgatgaagtcatcaccttggccgtcgcctggcggaacctcgaccagcacggcttcttcgccttcgaaccgcaggtcataagtcttttcgacggacagtccgtaacgggcattgagcgcatcccagagctgagcttcatagttgcgcaggtcttgcagagatttctggtggctgagcatcgccatatcgacggcccgttgcagggtttcgtccaggacgttgaatcgcatgcgaagagaacgaatccgctcgaccacttccgcatccactacatgtctttcgatcatcgcttttcacctttgctgaatgttacgttgtagccattgtcggccaggtaggtcagggcgccttcgaaggaagttccgacaagatgctttagctgcatttcgcgttgcgcggcgatccagaatgccgttccggagaactctgcgcggccttccgacaataccttgccatcaggcccgtcgatccgaacgtgaacggaagatagcttcagtaccatcaatgaatccctccactggcttgcgacggcatgctttcagcgcgagcggcttcacagtccgggcagggacaggcttggcggacgcgctccaactcgtcggcatccatgacatagagcttcccatcggaagtgtcgtgcgccatggcgatgttcgggaagtcggcagcgctcaggccggcgacagcgcggatttcgtcccagagcgccacatgctcggcattcaggcgagctgcgagcgcttcgtgctctttcgctacacgagccatgaactcgtccatccggaatgcgaattccgcatcgatggatcgggccgaggccatggagttgaggcgaatcggttctttcttcatggtaattctcttttggctgggggtttgtggtctacccaggcctattcaaagcctgggtagcatgatgctgaagatgaacaagaaggctgcaaacgccaatagcgttcctgtgagtattttggttcggctctgcagctcagcgtactccttggttgacagcccttgctgcgccgcctcggccgcgaaacgagctttcgcctcgataacttccgggcgcagcgacaggacatattctaaggcctcttcccgcgctttttcggcctcgaccgacctagggtcgcgggccgagacttcgctgtgccctggcctcgcgggatgggcctgcagcgatggaggaagttcagcagccacgactccatagtcggcgcaggcccaagcgatcccgatgaggatcgcgaggatggattggacgattcgcagcatcactttgtcgctagggaagttcataatcaatcctccaccgaccgaacgatttccatattgcgcccggcattggcccctgcattgaaggcgcgccgaccgtcgctatcgtccagacgcatgagcttcgtaacattggacttcttgtagccaggatcgccgaaatgttcgtgaaccgcagcttccttcaccaccaccagagacgttccggcagaagataccagctccatacgcttcctggtgatggactgaaggcgatagctgatttcctgggtcgcggcgagcttgaattgcgcggcaaccttgacgttgaaccgttcgaatccttgagctttctgatactcccggcacagacgatcaacggcctcgaccagggaattgaacatgttcaccgccagctccacgtccgacttgtagcctttaaagcgaacggcatggccccagcgtttggtggtgctgccgtcgcgggcgctcctggacgccttggccgatgctcggtgattgttgacgccaccggcgaaatccatgatgcagtcgttgtacgtcgcaacggccaccgagaagaatttcatccaattcgggattgcggaatagtaacgagtagcgatttgctcgtcgaactcttcgcgaatctcgccggccgcttcgaagtcgtgaagatcatatttgtccttcagcttcttcacgcgctcggcagcgatggccgcttcgtgcggactggaagagtcggccgccatggcggtcagcttgcggatgcggtctttcgctttctcgatggcttccggggtgaattcgttctggtcggtcatgttacgttccttttgtctgaagggtttcgctttcgatggagctattctgccttcatccagaatggaagtaaagcattttcttccattatttcggaagagcctggaaataattccaagcccagtcgcctgcggccaggacgaagatgatgaccgcgaagaacgcgattgcagcgaccagttgcgcgcccggcttcagcttgggatggctgagcttgggctctacgggagcgcccggagtgctggcgctggaaccggcgtctcctgggccgtagccgattccacgttcacgcgcctggagcgacaccagggatttcagatactcggtctgcttttgcgactcttcgtagatgccggcgacggcgaaccagagcgcgaacactacggccgtgcatatgacccaggcgccggtcagcaggagggccagcggaccgatgaggaagacggaagcggccaggacgatggcgccgccccagatgatgaagccggccagaccattggtgatgtcgatacagaactttttcatttttcagattccttcggttacgggatggaggggatttggaactctgcgccgccgagaacatcaatgacgacttcccagagcgtcggaacagaccactggtaacggtcgaagtcggtttcaggatcgacgcccagcgtcacataggaagtggcaggccatttatgaacactgcctttccgcatgagagtcgccacgcggccgtcaccgagcggattcgtcctgtgcggaacgtacgcagacatcgaatattgctgcccggcgtcgacaacaaatctttgcctctggcgcagacatacagagcccacaggattccagccgcgaccgccgcaagcctggcgagccgaagaatgctcataaccttcgtgagtcatttcgccgaggcaagccgagcgatcctcgtaatagttgatgttctccatcgatccaaccagcaccagagactcgaaatcgaatcgatgatcgtggatggccgagtgattgaagcaaagccgacgcggcagctccgggtgccaaacatggaggcgaccggccggaagttggacctgaatgaaccccaggccgtgcagagtgatcttgtccttcatcgggtcatggacggtgctcatggataatcctcagtagcagaaatgtattgtgagagttacgattgacaagccggtcgcccatagaagggcgaaccaggccatggctttgatggtcgtgtagatcatccgaagaattttccggcacagatcgggccaatgcccatttcgatggatgcgtggttggtcaactcgcgaccgcagcaggagcactgaccagtcttccgaccgtaggcgactgccgattccatcggcttttcgaacatcttcagaacgtcgtcgtgctcagtatcggtgcagtcgcgactcttgatgaatttgccattggtgatccggccgaggtagatgtcgcccaggacgtacaggctaccggcgttccggctgtgagcgctagcctctttcacaacaacgatgagcggctcctcgccttcgccagctaggcggattttcgggcgcttgataccagactctttcgccttctcaaacgctttctcgatgccggaaatgtccagagtcggcgcagcagcttcctgcgcggccactttctcgcgatacttggcgaggttttcgatggcgcgcttcgcagcagcgatctgattttctgtcaaggagccgtatttatacaacgactcctgaaggctctgagcgaagctgaaggaatttccagtccaccactcgatgatgtccgggtgcgcggcttcgaaggccttaattttgaggtcgcgctcttgcgcagcgctacagattttctcgatgcgcttttctaccgccttagcacggctcttggcgcgctgctccgggctggttttatactctttgtatccgacgccgccgcaggcaaagcaggcgcgaccataagacgaagggccacggtacaggccggtgcctgcgcatttggtgcacttgtcgcgatacagcttcacttccttccgggagttcgggcgggcacccatggacacgtcttccagggtcttcggcgcttcgttgttgatctctacggtagcgaagtcatcacccaggtcttcgaagccggtgaacagattctctgctgcgttcatgtcgattctcctgtttggaaagttcgtttcgatgagttgactatacgccagaaatggaaaaacggtagagatttctcactaccgttcgtcgggtcgaagacaatcaataaatgtcgctattgatcttgaacccatgctcagcgccgtcgttgtagtcgtactcagcatagctgtcgcagtagtcgttcaaatgctgaatgatgcctagaacgtcgttcgcggccttgtgccgtttcgcggcgatggtcttggcgatgctgtcgccgacttccagggtttcggccgtccggcgatggatcagcagacggctccaaagatagagccggacgcgacgaatgatgtctcgatggcgctccagtcgtccgtgcaactcttcaatttcttgctcgcgagatttcactactcgtcgaagctgctgaacttccagttccaaatcggccttagtagccatgttcacctcaaaaaggaaaatcgtctgggactccaggaagttcgacgattattgttgagcctgatcgatccagaatgcatccgaccgagccagccctgtggggatagggtctacacgaactataacaggtaacttccatgactattcgccaggtcgatcctccacaccatctacagactggtgggcgcttcgacttcagttttcgttcgtccaagacggcgcgtctgtcgcatgaaaggcagcgcgccttaaccgacgtaaccatgggtatagtcgatcattcggatgagaccatcatcctctgattccctcgacttcagaccgcccaaagagtccaactggccgttgcatttcgcatcgatatccatcgaagacaggaatcctgccgatactgcggtgatatcaactttgtcgccggccttcttgaagtcttcgcactcagcatcgagggccacaattgcactcgcggccatgttcacatgactgatgaggtcggggaagatcacaggaacttcacgcgacatgccacggaccgtcagcttcaggactacatacttcatactcactatcccttttgtatgtgaggaaagaacttgctgttttccggatggtgaaaacgctcggtcgcaggcggtctttcttccggacattgaatcgtcgaaggcgggaaaaccgcgccggcgataatcgccgcgaggagtgcagcggatgtcgacatccagagggcggtttccaggctcacccgaacttccggacggcgcggcttcattcgctccaccctcttcctggctcataggatggcagaccgccgccgcgaatccaattgtcccacatacggttcagaccagtcggtggctggggcggcggactgtagaatccgggagtctcagtgctgctcaggaaataaggcgtgcaaacggcctggacgaccaattggtgccgctcccacatcttatcaatcgctcttagcatgacgtcttcgcactgagccttactgtcgaaccgtctgctagtatggtccggcatctggacgcagccgtctccagtgcaaaggaaagcagtagcaatccatacggtgatactcgccatttcgtcaccctctttagttgatgagcagagtctattccatctgctcgccaggagtaaagcgcttttcgtcgggataaatgccgatgatgtctgcgtcaagcatccaaatctccacggacggatcgtcgctgctgatttgatataggttgtacagctcccgtccgccgacagcacgctcgcctcgtggctcaaccgccagaaccttgccgtgtccttctccgtgctcgtccaggtatatgacgtgatcaccgacttcatagctttctttcgtgacgaggcgtgaacgcgagctgttctgcgattccaccatccaggaatccagcacgccgcctttcatgtcgcgaaacaatcttgccgatttgtcgcaatcgaatacgcccagaacttcgccgtctttcaacacgatatgtacgattggcaaaagagtattcatgtttaatctccattggttgataattagagtctaatctgccgaaaagttcccgtaaagaattattttctcataactgattagttgcaactgttaatctgatgtatatgtttgaatctcttttgaacgtttgatgtttcccctataataagcgcacacagtcaacaaccacgtggaactacaatgtttaaactttcctggatattcgggcgcaaaaaggataatgctgcctgttcggaatcggcgccggagaaagtcgcacaaatccctcaacacgatccgctcgaccccatgatcaagctgggaaggattcgcggctggaacgtcgagccggagaaaaccccggtcattcgtagtgtgaaagatttcctggagccgggcctatctgtagcgatggatagtgcgtatggtgatggaccaactccggccgcgaaggctgctgcgggcggccagaatccctatgtcgtcccgactatgttgcaggactggtacaattcccaagggtttatcggataccaagcttgcgcaatcatttcccagcactggttggtggacaaagcttgttccatgtctggggaagacgcagcacggaacggatgggaactcaaatcggacggcaggaagctatccgatgaacaaagcgcgctgatcgcccggcgcgacatggagtttcgcgtcaaagacaaccttgtcgaactcaacagattcaagaacgttttcggcgttcgtatcgcgctgttcgtcgtggagtctgacgatccggactactacgaaaagccgttcaatccggatggaatcacgcccggctcctacaagggaatctcccagatcgatccatactgggcaatgccgcagctcactgctggctcgacggcagatccgtcttccgaacatttctatgagccggatttctggattatcagcggcaaaaaatatcaccgcagccacctagtggtggttcgtggaccgcagccgccagatatcctgaagcctacatacatcttcggcggtatcccgctcacccagagaatctatgagcgcgtgtatgcagcggaacggacggcgaacgaagccccgctgcttgccatgtcgaagcgaaccagcaccatccacgttgacgtggagaaggccatcgcgaacgaagaggccttcaacgctcgcctggcgttctggatcgccaaccgtgataaccacggcgtgaaagttctgggaattgacgaaggcatggagcagttcgacacgaacctggccgacttcgacagcatcatcatgaaccaatatcagctggtcgcggccatcgccaagactccagccacgaagctcctcggcacttctccaaaaggattcaatgccactggtgagcacgaaacgatttcttatcacgaagaactggagtccattcaagagcacatattcgacccacttcttgaacgccactatttgcttctggcgaagtcggaagaaatcgatgtgcagctggaaatcgtctggaatcctgtagactccacgtccagccagcaacaagccgaattgaacaacaagaaagccgctaccgacgaaatctacatcaactctggcgttgtgtctccggatgaagttcgcgagcgtctgcgcgacgatccgcgttccggctacaaccgactcaccgacgatcaggcagaaaccgaaccgggcatgtctccggaaaacctggccgaattcgagaaggccggtgcacagtcgacaaaggcgaaaggcgaagccgagcgagccgaagcccaggcgggcgccgtagagggcgcaggcggcccggttcccgccgctccacgcgggactaagcctctcgcgaaagcggccgaggaaggggccagcgaggccgctgaaccgccgtcgaggccggaccccaaggccgagctgcggaacttgttggtcgatcttttgtcgaagctccaagacctggacgacattaaggcgccggacggcgtagacatagagcacaatgatgcgcctggcttaaagcgcacatccaaacctggcgtgtctggtatggagccttcggtgttttcgtccaaccgcatcgtcgggcctcgtgatcattcggaactccagagaatcaaggtgaatggaataaccaccttgatcgaaaatccgcgcggaagcattcgacaaggcaaggatgggagttggcgagttcagatgaaacaccactacgggttcatcaagggaacgaaaggcgctgatggggatgaagtcgattgcttcgtcggtccgaatctgggatccaaacgggtcttcgtcgtcaaccaagtgaacaagggaggtcagtttgacgagcacaagtgtatgctcggcttcaacaacatcaacgatgcgaagtctggatatctgtcctgcttccgtccgggctgggatggtctcggctccatccatgaagttgacctgcccgctttccgtcgctggctggcgaacggcgacaccaccaaaccgttcgggggcgagtgatggcattcaaggcctccaaaaagcgcgagcgccgggcacctcttccagtcggaagagggaagcccataattccatcggcaggaatcgaggcctggtatcgaaagcagatgaaggatatgtccaagctcatgatctccgactatcgaaacgagattgagaaggcgctgtcccagcctgcggccgaacgtttcttcgccagagacgaatccgttaacgtcctgttcaagatgacccttcgaagcctacagcagcgatggagccgcatttttgaaggtttcgcggccaagatcgccccggagttcgtcaaccggaccgaagaagccgctaccgccgcgacccttcacagcttgtcggtggccggcgtcgatcagccacgagctgcgtataatgagagcgtcaggaacaccctggaggccgcaaccacttacaatcatactctcatcaccaagatccaagaggacgtccacgagaagatttacacatcagtaatgctgtctctgacttccccgaatccggaagagcaaggaacttccggcataactaacgcacttcgcaaagtcgggaagttttctgaagatcgaatcgaactcatcgcaagagatcaaacaagcaagctttacagttctctgagcgatgagagaatggcggaaaatggagtcgaggagttcgagtggctacactcttctgccggcaagactcctcgccacacccacctggagaaagatgggaagaggttcaagctgaatgaccccagactttgggagggtccgaaagcagaccaggggccgccaggatgggcgattaactgtagatgcagaaagataccagtcatttgacatcgataggagcgctatatgccgttagttcatggcacttccaatgaggctcgttctgaaaacatcaagcgggaaatcgaagccggtaaagacccaaagcaggctgcggccatcgcttattccatccagcgcagtgagaaagggaagacggcgaaagattgttcgcctgagctcgtcgccgatcttcgcgccctggtgggcgctctgtcgaggctcgtgaaatgaaccgcaagacgtgccggcgccgactcgtggtcgatgtaatcagggccaatattcacggcggattcttcagcctgaagtttgccgccatcgatttggcaatcatcggcgtcgccatcttgatggcttttggccgataatgctgagaaaaatctggattctgactaaaaattctagtccggatagccgcaagttaccgtttacggaaaatagcagtaatttggaaatcctactgccgcgaggctttaacagagccagttcctaatttccgatttagccgcatgcttcaaaagtatatagcctgggaaattagaagtaacgttccaatagaattcatctataagtaacgttataatataacgtcaatctatatgctctagacgtattgaaattcaatttttaatcggtaaattggtaatttgaattagtttaggagttgaaagcctcgcggcagtaggcttagacaaatcacgtcaagtttccgagaccaaattaccggattttcgcggctgaggaaactggtaattagatcacaatacaaattataatgtaagttaacagtcacggctacatctaattattgttccgcttatttacccttagatgtactgcgtatataatacagccatagtccacgactcttcgaattaacgatggcaaagtcgaaaagaaaaattgacgaaaatggatatatgaccatagagggctgcccgatcagctcttatggcgttttccaatattctgctggtcaactcggtcttccgggcgatccgacgcggattgtcaacgtatatcgcccggagtctgccgtcagcgatccggagtacatcgaatctctgaagaatctcccgttgatcgacgagcatgagatgctgtcgggattcgacgatgatgacgatagcgtggcccccgaagacaaaggggtggagggcatcatcacatccaacgcttactacgaagccccatgggcacgcggcgatatccgcatctattcccgcaacatgcagaatcagctggaaaggggcaaagaagacctgtccctaggctatagttgccgctacactgagcaacccggcatctggaacgggacgccttatgaagtcgtccaggacaagatgcgcggcaaccacatcgccctggtaaaagagggtcgtgtgccgggggccagagtattggatggtctgtgttttgaccatctcagttttgatttcagaccatccgatgagggtaatgaaatgagtctcaagaaagccaagcggaagccccctgtccagcgcgtagggcaagctgctgactcggcggtcgaagagttgcgcgccctgtggccgaagctatctgcgtctgtccagaagttcctgggcgaagaagagcaggagccggagcatcaggaaggcgcagctccggccgaaccgaccgacagcgagcacctgaccgagcatccgactctggaaggtgctcagaaggatgacgaagagcaggaagaggagccttccgttgtcgatccggccgtggccgccgtcgagccggagcatcaagaaggtgccgcatccgaaatgtccggtgaaggcgaagtcgccgaactgatctctcaggtcaaagccattctggctcgactggagggcacggtagccgaaggggcagacgaagagcatggcgaaggtcaagatgtcgtcgagggcttggaggagcagagcagcctcagcggctcgcaaaccgccagcgacgatggtggtgagagcaaggataacagcgaggaacttcctgaaatggcacagaagaacgcgcaagatgctgcaattcgcggtctctatcgcgacattgctgctaaagatcgcctctacaagcgtcttagctccgtggttggtgcgttcgatcaccgagctatggactcggctgaagtcgctgtttacggcgtgaaaaagctgaatatcagctgcgcgaagggccaggaagctctggcgctcgacatgtacctgaaaggcgtcgaagcctcgcggggcgcggccagccgtcaatcgaaagcccaggattcggccggttctgctccgcagtgcgccgagctggacagctacctgaagggggagtaactcatgttccagaaacaagtttaccgccagtacactcctggttttccgggcgatctgatcgaggacggcccgaagcgggcgcggccgggtcgaatcatgtctctgtctgccgtaaatccggctgccaccgccaccggccccaaccgcatcagtcgcgctttcggttacgccggtgacgtcagctccctcggcgaaggtcagccgaagactatcgcggctcgcgcttctgaagtcgtgatcggcggcgccaacttctttggtgtcctcggtcatccgaagcactatgcgctgttcggttcggccggagactccctggctcccagctatgatctgcccgatggcgccgaaggcgagttcttcgacatggccaccggcctggtcgtcgaaattttcaacggcgccgcaaccgccctggacctggactatggtgacctggtcgcctatgtaccaaacaacctgcctaccgccgacaacgcgcttggcctgccggccggcgccctggttggcttcaaggctggctccatgccgaccggcttggtccagattcccaacgcacgcatcgttaacgccatcagtctgccggcccagtcggcggggaatctggttgctggcgttaccatcgtccagctcacgcagtaaggaggcgtcatgagccagatcagcaagacccattcgcgcctcgcaggccgcaatgcgaaacctttcgacctgaaaaacatcaccaatgacgccgtggcgtctctgcgccgcatcggcctggtattcgatcacgccgtcgtccaggaccagatcaaggccttggcgaaggccggcgcgttccgctccggctcggccatggacagcaacttcaccgccccggtgaccacgccgtccatcccgactcccatccagttcctgcagacctggttgccgggcttcgtgaaggtcatgaccgctgcacggaagatcgacgaaatcatcggcatcgataccgttggctcctgggaagatcaagaaatcgtccagggcatcgtggagccggccggcactgcggtggaatacggcgaccacaccaacatcccgctgaccagctggaacgccaacttcgaacgtcgcaccatcgttcgtggcgagctgggtatgatggtgggcaccctggaagagggtcgtgcctcggccatccggctgaacagcgccgaaaccaaacgccaacaggcggccatcggtctggaaatcttccgcaacgccatcggcttttatggctggcagagcggcctgggcaaccgcacctatggtttcctgaacgatcccaacctgccgccgttccagaccccgccgagccagggttggtccactgccgactgggcaggcatcatcggcgatatccgcgaggccgttcgccagctgcgtattcagagtcaagatcagatcgatccgaaggcggaaaagatcaccctggccctggccaccagcaaggtggactacctgtcggtcaccacgccatacggcatttcggtttctgactggatcgaacagacctatccgaaaatgcggatcgtgtctgctccggaactgtcaggcgtccagatgaaagcccaagagccggaagatgctctggtgctcttcgtcgaagacgtgaacgcggccgtcgatggaagcaccgatggcggcagcgtgttcagccagctggtacagagcaagttcatcaccctgggtgtcgaaaagcgggcgaagtcgtatgtggaagacttctccaacggcaccgctggtgcgctgtgtaagcgtccgtgggccgtggtgcgctacctcggcatctaaccgatgcctattcaccaaaggccgggtttccggcctttgttcactctgactctgactcggttgtaggggccggttagggcataattactaggactacgccaatgactgtttacatcgtttccgccatgactcaatccgtgtcttacaatgcgtatgacacctctgatccgtccaatcctcgccttcagcggaagattctgattcgtggccgcgccggcatcgcatcagaaacttccggcttcggcgacatgatttccgacgcggccgggcgtccgatctggaccccgcagggcgattgtactgccgtgagcgattcggatttcgagctgctccaggccaacaagattttcatgcgtcacatggataagggttatctgcgagtcgtgaagaccgacatcaccagtgaccaccagcggatttccaaagagactcgcaccatggagcgcgatggattccagcctctggacgctgctcgtctgcagcagaaaatcaaggtgactaccgccagcgcttcccaggaacaagagttccggatttaaccgagggtttcggtatggtgattttcgacgaacataagtttcgcacgctgtttccggagtttgctgatccagccgcttatccggacgtgcgcctgcagatgtacttcgacattgcgtgcgaattcatttctgatcgcgattcgccataccggattctcaatggtaaagccctggaagcctgtctgtatcttctgaccgcccacctcctgtcgctgtccacgatgcaagttcagggcgcggctggaggtggcgtcactgccggtgggacccagggcggtttcatcaccagcgctactgtcggcgaggtcagcgtggccaagctcgcgcccccggccaagaatggttggcagtggtggctttccgggacgccttatggtcaagagttgtgggcgctcctcagcgtcaaagcggtgggcggattctacatcggcggtcttccagagcgccgaggcttccggaaggttggagggacgttctggtgatccctggtgcgaatcttctgcgaatggccttcggggtcatcggtactcaaattgtgaaatatcgcaagtttgagcagcgagtgaagaatgatcaagctcagtacgtttccatgttcgaggagcctttcgacctggcagcgtctgttcagcgagtccgacgcgatcagtatgtccagtttaatctggagttccaacggaattacgttatgatcttcgccaactttgagatggttgacttggatcgcgatgtggccggtgaccagttcctctggaccggaagagtctttcagctggagtctcaaggctcctggttttatcaggacggctggggagtttgcctggccgtggatatcggtgcgaccaagctcgctgatgacgggaaaccgactttctaggtgatgtatgtttgacggcgaactgatagcgaaactggttgtcgagttgaatgcggcgatggcatctgctcaagaggctttgcagttcccggattttgaagtcgtccagaaagctcagccgacccaacagggaacgtcaaccaggccgaccatctttttccagaaactgtttgacattcctcgcggctggcctgccaccgattggcacctggacaacacggcccgcaaatatgtagaaataactcgacagcatgtagagacgactttccagatcagttcccttcattggcagaatcctgaaataactcacgtggttacggcttctgatatcgccaactatgtgagggcttatttccaagctcgatccacgattgagcgcgtaaaggaactggacttcctcattcttcgcgtgtctcaaatttccaacgaagcattcgagaacgacaatcaccagttcgaattccacccaagttttgacatggttgtaacttacaaccaatatattcgcctgtacgaaaacgcagcatattcggccgatggggtattaataggcatatgagtctgaggcgcgattcagagctaatcgccgcgcacctccagatgttaagagccatgcgcggcaggtccgtttcagccggatggtattccacggctcgatatcctgacaaggcaggtggatcggtcggaatacaagtcgcgagaatcgcacgtctcaatgagtacggcggaactatcgaccatccgggcgggaccaggtatattagggacgccattgttcggggtcggtttgttggcgttcggttcgtcagaaacgactttccgggagaaaccgaggtaactaagcctcacagaattaccatcccggctagaccgtttatgcgatatgcttggaacttgttttccgcagatcgcgccgcaatccagaaccggatagccatgaggctggccagaggacagatcactccagatcaagctcttgcccagatcggcctggcgttggaaggatacatagccagaagcatcaggaccgggccatgggtggctaactcagcatctacggtcaggagaaagggattcaacagaccgctggtcgatacggcgcacatgcttcaatcgattagcagcagagtaacataaccaggagatcatccagtgatcagtcagagccgttatatccggatcatttcgggcgtaggcgcaggcgctccggtcgcaggccgaaagctgattctgcgcgtcatgactaccaacaacgtcatcccgcccggaatcgtcatcgagttcgacaacgccaacgcagtcatgtcatacttcggcgcgcagtcggaagagtatcagcgggctgcggcttatttcaaattcatcagtaaaagcgtgaattcgccgtccagcatcagcttcgctcgctgggtaaacaccgccatcgcgccgatggttgttggtgacaatctgccgaagaccatcgccgatttcgccggcttctcagcaggggttctgaccatcatggtcggcgcggccgaacagaacatcaccgccatcgatacgtccgcagcgacttctatggacaacgtggcgtcgatcatccagaccgaaatccgcaagaacgccgacccgcagctggcccaggctaccgttacctggaatcagaacaccaaccagttcaccttggtcggcgccaccatcggcaccggcgtcctggctgtggcgaaatctgccgatccccaggacatgtccactgccctcggctggtccacctccaacgtcgtcaacgtcgccggccaggctgccgatcttcccgacgcggccgttgccaagagcaccaatgtcagcaacaacttcggttcgttcctgttcgccggtgcgccgctcgacaatgaccagatcaaggccgtgtcggcctggaacgcggctcagaacaaccagttcatctacacggtcgctacttccctggcgaacctcggcactcttttcaccttggtgaatggcaacgccgggaccgccctgaacgtgctgtcggcgactgctgccaacgacttcgtggagcagtgccccagcgagattctggctgccaccaactacgatgagccgggcgcttcgcaaaactacatgtactaccaattccctggccgcaacatcactgtttccgacgataccgttgcgaacaccgtcgacaagagccggggcaactacatcggcgtcacccaggccaatggccagcaactcgcgttctaccagcgcggcattctgtgcggcggtccgaccgatgcggtggacatgaacgtctatgccaacgaaatctggctgaagtcggctatcgctcaagcgctcctggacctgttcctgaacgtcaatgcggtcccggcgagcagcactggcgaggcgatgaccctggcggtgctgcagccggttctggacaaggcgacagccaacggcacgttcacctacggcaaggaaatcagcgccgtccagcagcagtacatcacccaagtcaccggtgatcgccgcgcctggcgtcaagtccaaaccctgggttactggatcaacatcaccttctccagctataccaacagcaacactggcttgaccgagtggaaggccaactacacgctgatctattcgaagggcgatgccatccgcttcgtcgaaggatcggacgtgatgatctaatggtttgcggcggactcgatccgccgctaccttccataaatggagtgaggaataagcaatgatcaacatttctgcgttcggctcgatctgccagttcacggcaagcagaactttcccgaacggattcaccgtcaccgagttcgccgacgatgccgatcccatcgacagcccgccgttcaccgctgccgataccggcgtcggtctcaacggtgacatggtagtttggaaccgggcgaacatcctggaagtagtcgtcaacgttatcccgaacaccgagggcgagcgcaacctggcagtcctgctggatgccaaccgcaccgggaaagacaagtcgggcgctcgtgatgtcgtcggtttggtcgtggcgatgccggacggcagcaaaatcacctgcaccaacggcacccccatcgacggcgttctgatcaacgctgtggcaagcgtcggccgtctgaagaccaagccgtatcggttccgattcgaaaaagtgatcaaagccggtactagctgatgaagaaaattccgctgacagcagtccccaatcaagcgatctcatttaacgccggtagcagctattggaagattcgcctgtaccagaacatggacatgatgaatgccgatatcagccgcgacggcgtgatcgtttgccatggggtccgctgcttcggcgggattcctcttctccaatacagccatcagtaccgacctgactatggcaatttcgtcttcgaccgcgacgccgattggacgttgttcggcgacggaattaacctgttctatctggacggcgccgaattcgcagagtatcaggcgctcgccacgaggaaagaatgagcacatcaacgatcagaaccgggacgaacaatgatatccttttggacgacaatggaaacatggtcatcctcagggatgtcgaagcgtgcgcccaggacgttcgggcggcgatgctcatgcgcaccggcgaaaatattttcgatgtgaactccggcgtgggatatttcgaatacatcttctcgccgcagaaaagctatgatgacgctcgcaaatccatcgcggatgcaattttgtcctcgccggatgtgaccggcatcgagcagctggacatcgacatcaccggggaagtcttcggcgtcgatgctaaagtcatcaccatccacgggcctgttaccacaggagtttgaaatgagcacaatccgcatccaatacgccaacggcacccaactgttcctggacggcaaaaatccgccgcccctggacctgctgccctcgtttaacccgtctgtcgaagatctggaaggcctggaccgcgaaaagaacaccgacaaaggcgactcctcgccggccggtcttcccgttcccccggtaaacgtcgattccaatgtcgacaacggcggaaccatcccggctccggtatcgaccgacgctcctgcggccgaatcggccccggaaggcgcccaggaagctcctgcagcgggccaaggcgacgagaaaggcgccgaggaagccccgactaccgccccagtagaaaaggccgaggaaacggcctcgccggccgctgaagaggcagccccggctcccgccaaggccacctctcgcaaaaccaccagcaagtaaggactcgacatgatcaacgtcagcggcttcggcacaggaattgtaatagtttccgcctcatcgttcccgatggggttttccttgtcgaagttcgctgatgatgagagtccgatatcctccaaagagctggagccgttcggatatgagatgctttatgacggtggcctattcgcctttgacaaggctgctcctctggaagtatctgtatccgtcatcgcagggagcgaggatgatattaaccttcgcatccttctcaattccaaaaagggatcattcagatttcttccgggaatcatcccggacatgacgactctcgtggccactcttcctgatggcggccgcaccgttctgtccaatgggactatcatcaagggtccggccatcgacaccatacagaacaccggacgacgcaaaggcaacacgtacacttttgttttcggtagctatcttggcgcccagactgcgcgtcaagccatttctaacgttatccaatcggtactggaggtggtctgatgttagggattttcaccagcctcctaagttcgcgatctttttcgattgtggaccaaaacacaaaccagctagttgctgcggatttgaggataagccgggtcaacacccggttttcttctgtagggcaacgccacatgctggaagatggtacgaccaagatggattccagaacgatccaccctatggaaatcatcgtcgaagtattttgcccttcaattgatgtcgtcgatcagatcaatcaattgctcctggatcgcgacacactgtacaaagtcatcactcgcggcatggtattcgaacggatgatgtgtaccagcgaagcgctcaatcagactccggatatgatatcggcgactcctgcgcggctgacattctcccaagttctcgtccagaatcccaagcctataatgttcagaaatgcaggggactcttctatgatcgaccgagggctggccctagctgaagacgtggttggctcggccggcgatctgttcgactacgcagtgaacggcgtccagaacgccgcagacttgttctgaggtgccaattgaactctttcctcaagtctattctcaacacgcctactctcaccatacgcgatgatgttaccaaacttcctgtctggaagagtcttcaagtcaagaaagtggaaatttactcgccggcttccgtagtgtcgaaacctctggcgacgaaagaccagacggaagctcaagtgtacaccgaagctctggacattgatgtgaagaatggaaagatcatccaaccggtgcgactccgcatcagtgctatctgtccggacctgtccaccgttgaaagtatcatgaacgctttcaatgataacacctcgactttcgctatcacttctaagtcgatattggccgataaaatggccatcatgacgctcgatgtagatcagtctccagacatgttgaacgcggctgagatcaatatggaattcgagcaggttgagcctccagtattgaataaattcgatcctgcgttccctcaagatagtccgacttatggggtacagattcaatctctttctgatgctaatttgctggatttgggcgccatcggcgattcgatatcttcggccgcaaaatcgctatataatcgcgtgaccagctacttctgagggtgtatcatgcttgaaatcaatcttcccgatggccgtcaaactcgcgtacaaatcgaggcgtggtcggcattggatggctggggcctccagcgccgtttcgtcgaatttgctgtcagccaagattccgacttccgccgctctttcaccatggaaatcctgggatatgcgaaagtgctgcttggcgacgatgacaccggcattccgctgaccaccgcggcagtcatcaacaaccacctcggccactggaagaacgtggaactggttttcaactctgttctcaagcacaatggcatcgacccggccacgcacgccgaccggccggactattgggaacaagtcggatcgcagatggccatcgcatttctggccgaggcgtccaagctcattggtccagcaatgaagatcgccgaaggactcgccaacaagccggagtgattcatgtctagtgatttggatgaattcatacttcggtatgaggccgatactgccagagccgagcgcaatctggagcgcctccagaaccagatcaggcgcgtgaacagcgcatcgacgagtggccttcaggatttgcgccacttcgcagacggcgcggccactgaactcggccgagtcgttccgcagatcgattctgtgacgagcgcgattcgcgggatgaacgcgcaactggcgataggcgccactggcgtggccctggtcgcggccggcgtcaaggcgttcatgaacaccagggaccagtacaatcagcagcgcatccaggcgatggacatcggcatcgccccggcacgcttggaagagtaccagagaaaattcgttcgccagtccggtggaaccatcagccgcgagcagggcgcggagatgaccaaaaatctggcagacactttccggcgtgcttatcgcgatatcgggcgagtcggcccggaagcgcgaattctgcgtatggccggcgttgatgtcgggagcttccaaaagggcatgcggccgctcaacgacatcattactgatctggccacgaaaatggccaagctgaagccggacgaaatttctgcctacgctgatgcccttggcgtctcgcgagactacctgagcaccctggctaagatcggcccggccatgggaaaagtcaccgagatgacgactgcggaactccagtccagggtccagggcgagtccaacattcagaaattcaacgatgctctggcgaatctcaaccagacgttcaccaccctggaaaaccgagtcggcgaaaagctcgcgcctgcgttcaccaagctgatcgaaatcatcgacaagatagtccaggctattcccaatgaagtggaaagcttcgcgaaggacaccaaatcccgttgggaagatggagtgctcgggaaggcgaccgttggcagtgatatcctatccctcctcagccccggcgccctgctcggtcgcctggcagcgtgggggactcgtcgcggcatggaagaatcagggctcatcgacaaggacaaggttcccggcgctcaaaccagcgaagacctggccaagaaacaagaagaccaggacaaggctactaagtccatgaaagagctagagaagctggctgaccagaccacgaagtctaccaatgattttgcggtggcgatcaacatgttcagtggcgcggtatcgtcgttcgcgaatgccgttgacgagcgccaagcttgggcagcctgggcgggggaaattggtcgggcggtcggtatgggaagcaccgcgccgacttcgcgggccaccggcgtctatccgcacgcgatctatgatcagtcgaagagtggcgcggccggacaagtcttcggcgagccaatcggcgcccagtctcttcgcaatcgcatgttctcgccgcagcgcaaggccgaaccggtcaccgttccatcgtacatcaacgacatcatcaaagatgcgtcgaagatgtacaacattcctgagctggacatcaagaaactcatatacaccgaaagccgattcaacgccagggctaccagcgaagccggagcgaaaggcctcatgcagctgatgccggaaatcgccaaggcgtatggtataactgacgtatatgaccctcgccagaacatcctcggcggaacgcgtctattgcgggaaaacctggatcgagccaatggcgacatgcggctggccttgacctactatcacggcggcctcgatccgaagaactggggaccaaggactcgcgcatatccgggtttggtgatgagcgctccaatcgagctgatggaagaggcgcagcgcaagcagaaggctgcggccatgaccgccgccaacgagacgttcgctccggaaggcggcgacatggacattcgcccctatgatggcggacgattggaaactccagaccagggcaagaaggaagatgagcgccgcgaagcccgtcgatatgacgacagggttgtgcgaccggaaattcgcatcatcgaccgcatgccagaccgcagcgacggcgaaatcctcaagatgtctagacgtcaagaggccgaccgggcagattctggattccggaagttcccgaatcaagttcgcggcgagaccaagcagaacatccaggctcaactcactgcaggagccatcgcgcaagtgatcggcgttaaccccaaccagatcatgcgccgcgaaatcagccgttctgacttgctgttcggatacaaccaagccatcctgggcaagcaacaggagatcaaggccgccgcgaccgaagccaacaacgtattcctgtctccagccaagcttgccgaagccacggccaaggtgaacgccgcatcgcgagaaatggatattctcaggacatacggcgagcaacttctgaagagcgctccagagcgcggccaggagctgaccatcggtcgaatcgacatgttggtcaacgtcaccggcgcgaattctccggaagaggctcgcgagatattcagtaagcagactgcagaccagctgactacggcaatccaggacgctcaaaacgattccgcaactaagatactctactgatgaaaaagagaattctgcgagtaacattcaacatgccttatggacccgaagtcatccgcgaagatctggatgttcgggtccggattatgaaggctgcgttgcggattcagaaccgggcgacgatggaaattttcggcctcaccactcagctgcgcgagtctcttctgtcgcagttcaccgcgtggaagcaccggcaacgtcaagtgggcagggaagatgaattgatgatcaaggtgtcggtggaagccggctactctgaccaggggcgcgagcaagtttccagagtctttgtcggcgaagttgccattgtcgatatcatttctccgccaccggacattggaatccgcatccagtgctataccaggcaaatcgacaggacgaagaccattcggaatatgccgcccgccaacacgacgtttgtcaagttcgtcgagtggggcgcgaacgaaatgggattgaacttcatctgcgataccagttacaacgatcaagttctgaagaatccgggccggtctatcactgtcgcgtcggcaatcctggcgtcgattcaggatatgtacatgccggacgtggccgcgttcgtcgatgatgacatattgatcgtgaaggaccgcgataaagtcattcgtccggatgaggtgaccaacgtcaactcgtttgttggaattccatcttggtctgaatggggcgtggaattccagtgtctgtttgagccatcgattcgtgtggctggaggcgtagcggtcgaatctctcatgaatccaagtgttaatggtaactatgtaataactgctctggaatacgatttggccagtcgggatcggccgttctatatcaaagtcatggggagtccagcagcataatggccagggaaatcaaatcattcaacatgttcggagttcactatacttcgcggcaattctctgccgtcgatgggctcagcatgatgtcggaaattcagagcgtgccgccagaagaattgctcaagggtactgatgtattggcgcatccggaagaccatccggaaggcatctggcttccattgactgctgcgaacatcaatctttatgtcgttgatcgagcgaaagtaatagctcccgtacaagttcttgcacttctgtccgaagtggtaatcgactggaattttggttttctcaaagactggaccggagtcaagattccatccagatttgtcgaagatatcaaaagcgtgaagacggcacattcaccttctgtagttgcgagtttggtggcgaacggttcggcctctatgcgcgagttggaagagtattattcgactcaagatgcctttaagatgatagatatcatgacggcgaagagcgtgaacgaggccttggcgtccgaagcatcgcacaacagaatcaaaaagggataattcctaaccgggcctgggaaggctatactagacctgccaaatcagaggctttcccatgtccaatatttctctaacatcagcaaaagctcccgacaggacgcgactgatcgccgctcttgacgctcggtcgcggcgggatgctctagatttcgaagtaatgataccggctcaggttgttcaatatgacagggccgagaatatcgcaacgattcaacctctcatcacctgggttgacacggaacacaacgccgtccaaaggcatcagctggttgatattcctgtaatttccatgggggctggcggcttccacataagtttcccgattcagcaaggtgacataggctggatttatgcggccgaccgcgacacatctcagttcctggagtcgttgtcaatgtcgaagccgaacaccggccgcatccataagttcgagcatggcctgttcatcccggacgtattccgtcgatacaccatcaattccgaagattcggccgctatggtcatacaatcgacttccggagcgaccagaatttcgattcgcggcgacaacatcaagatcactgcgccgtcgaatgtcaccgtggatactccgcaggcgaatttcactggtgatgtgactatcgctaacactctggttgtaaacggtatcaacgtgaacaaccacggccacctcgaaaacaacccgcctgatgcccggacgaagggcggcatgattgcttaaggagaatttcatggcaagttttgatttttctgatttaacagcgggggggggttgtaatggctaactacaactacatcgtcgatactggtgtgatagtcgcagataccgccgacgttctgagtgacgttgaagccgagttccgcgccgccctcggtgccaatatcaacttggccgcgagcactccgcagggatcgcttgtcgcggccgaggccatcgcccgttccagtgtcatgcggaatgaagcgcgaattgccaatgccataaacccgaacgtttcattcggaacgttcctggacgcgatctgtgccttgatggggatcgagcgcggttctgacctgtcaaccttcggctatggagttcaagtcaccggccgcagccaaacccgcatttccaccgggtctagggtccagactccggccggcgcgatcttcacagtgatgagtgatgtcacgattcctgctggtggtgtcgcgaccatcgatatcaaatcgcaggagtatggcaacattcctctgccggtcgggaatctcatcatcatcgacggaacaattggctggtccggagcgaaagtcatcgcctccactcgcgtcgatccgggcagccgccaaatgagcgatgcagagttgaagaatgcccgcgttaatcgattggccatccaaggccgcaactcgactatggccatcaaggcgtatgtgagcgccgttccaaacgtcacgtcggtgaacgtaatcgagaacaacaccggcgccgttcaagtggtgaatggagtctcgtttacccttccgtatgctgtttgggtctgcgtcgccggaaacccggataaacaagcagtcgccgatgcgttgtgggccgcccataacggcggaactccatgggactatggtgcgacgaacaacggcgtcccggtggacggtccgaatggcgttcctgtgcgcgatccggcgtccggtcgaaagtatgtcgtgaagtggaccactccaattatgtacgatggatatgttaacgtaacagtccagcaaggttcctcctctgtagctccggaagccattcagaacgcagtggtcaattacgcccaggggaaagtggaaggggaagaggggctggtggtgggcgcgagcctgtcggcattcgaagtcgccggcgccatcgctcgcgaaattcccggcatctacatcaaactctgccaggtcgcgtgcgtcgcggctggctcgccggctccggctccgggcgatttcacttcggaatacgtcatgagcgcattcggccaggctaccatttccgttggtaacgttcgggtgactttcgtatgactctgcctgcgtacaattcggacatccaacaagctctgaaatggctccataaccaggcgcctgggatcaccggcctgatccagagaaaggcgcaatggtatgacagattcagccgccaattctgggccaactgggagcgcgacgttttccacttgaaaaccgccaacccgttcggccttatggtttggtgcatcatcctcggcacgccttcgaaagggttcggcctttatccaaaaaacagttcttgggcattcggtcggctacgccagaacttcatctatagcggtacacaagttccgccaccggcagacgcatcgcctggcggcaacttctacggtggcggcaatgccgaaattctcaacttggacgaaatcaggaaagtgcttcagctaagatatgtagcgctgatttctaacggctcgattgcatatgtcaatcgcatgcttcgttacatattcaatgatgatgagccatgggacgaggcgaccggtctgtacttctatctcatggactcaaccggcgagaatggccctgtggagaacttggcgatatatcggaaagattgggaaggtatggtgctattgtccagttcgcccagaacgaaccacgtgctgacatcgacccctgccagcgacgccgattggccgggagtcgatccggccgcgagcggtattccggtaacggtcgaaacggcgtccgctacggccccggacggctccgctacggtgtgcaagcttactaagccggccgggagtaccgcttacgtctccgcgccgatagatgggccgctggggtccggtagcactgtcacgttctcgttcttcgcgaaagccggctccacccgtttcattgcaattcagtcggctgccgatttccccagtcgagccgatgccgttttcgacctggattccgggaacgtaatcagcgatcagatgctggacagcagcgtggtaagcgcccgaatgattcgtctggaaaatggctggtggcgttgcgttctcacgaccaagaccgtcagttcttcgttccgcgctgcttacgtcgctccggcagaaaccaacttcagctggattgattcgagttccagcgcggcgattgatgtgcttatctggggcactcagatcgaactgggtgatactccaaccggatacttggagactaccggaacgcccgtaaccatcaccgattacgttctgcagagcgcccagaccggaacggtcaagttcacacagcctcttccgaccggagtagaagcgtattggactggagactggaaaggtgggtctgcgaccgagccggccagattcgcagtaggggatgggactcaagatacattcaatctgtccagccctgcatacatcggcctacccactagtggggcgttcaagctagaatacagagttggtccggcgcttaatttgtcgccgcaattgatcaacctcatgaatgaccgggcggtcggcatcatgccgacttgcgccggttgcgatgtaaaagtcattcaggagtaatgacgtgatcacacccgaactgatacccagtccgtttgccgctcagggcgataaagacccgattccacaaacctcctccactggcttcgcaaaccttcgcgacggctatacgccggactacgaaatcagcctggcgtcgaacaacccgcaggccaaagcggtcgagcggaaaattcaaaaccaactcttcttcatcgcgacccagaacgcacaggcgtggcagcgacaaatggcgccgccgtggtttcagggcatgcctggcggctacgaacagaatgcagaagtcgtgcgcgtcggaaatgacggcataatgcggcgttatcgttccatggtgaatgccaatgcgagcgaccctctcagcagcacgacttgggaagaacaacccgcatggtcggtgatgcgctccaacatcccgatgccggccggaggcccaggcctatcttctggcggagaagtcatcacgaccggccgcaacttcaacgacctgttaaatgggacgtgggagttcttctctgattcagtggttatcgcttctcagaatgcccccgtatatccggcttccgctggtgccgctgctggcatgttggaggcgaaatcttgggtgtccggagccaatacgttctgcgtccaacgctacactgatcgcgtcgggaacgtcgctgtgcgcgggcttaatgccggagcgtggaccaactggatgtatgcggtaaacgtcatggcccttcaacaaggtcgggtcacctatggagtcgcggccggatcggcgaacgcttacacgttgacgctagttccgcagctccaaggcggcctggtggatggcatgattcttcgggtcaagttcaacaccatgaacaccggcgcctccaccatcaacgtctccggactcggcgccaaagccatcgtcggcgcggccaacttccctctcaccggcggcgaacttggccaaggactcatcgctgagcttgtcttcgacgcagcaggcgaccgctggagaatcctcgcaggcgcgccacgcatccaagttggcaacgccgatcaagattaccaggcccccagctggaaacaggtgaaggattacgtcgcgtcccaaaagctgactgaagtggactgggctgacgtcgtcaacaagccgaacgtcgctatccaagacactacgccgtggttcgccaatctggagttgtctgacgctcggcctttcatcgatttccacttcaacaacaaccgcgccaaagacttcgactatcgctttatctctgaagctgatgggtcgatggcgttctactctcgccaggggtccgctggtcctacccaggatatcctgttcagcaggtcgaatgttacattcctccagccgcgactggatgttgcgaaaaacctcgcgtacatcgcgaactctggtcccctttggcagaacaccactgccgatcagcctggttggaaattcaccttcgcacaaggtgtggacgccaacaacaacgcggttatcgcagtcaataccaccaaccctgacggctcttatcgctcgcaggtcatgcgatgggactgggcgtccacgaacgtcatattcaacaaccgtccgctcttcgccggtcaatacaccccttgggattctgggaacttcgatccttccaccaagttgacggtgagtgccacgaaccaaatcgccggcccaaccgggattcggaataccaacggcaacaccggcaacatgaacacctggggttccggctccacgacggcatcctatggcaatgctgccattcaaatcttcggaaaagggggcggtgagcctgccgcgatctatttcgacaactcccagaccggatggtatctgggcatggacaaggatggacagctcaagcgggccggctggtcgctcggcaataactcctatgtgatcaccgacgaatccaacatccgaacccatatcaacacaatggctgcgcgcccgatttgggggaatgtcgagttctggggtccgtggaacttcgatccgaatcttaaactcactttgaacgctttcaatgatagctcatacaccaggatgaccaacagcggcgcgaaagacgttggtatcgcgtccatgacgagttatgctgatgcggccatgtcattcttcaactatgaagcctcgaatccgaccgggccgcgcgcggccgttatttcgttcgtgagaaatggatcgcgtggagtgctattcggcttggattctgacaacaagctgaagtggggcggatattccctaggggccgtcgcgttcgagattgccgactccaacaacctcatgagcctgtggtcatcccacgctgccgcgccgaactggaacgggcagaccatctggaggtcgggaaacttcaacccagacaccaaggcgactttggcagctcgcaatacgacgtcatcccctacaatattcagttatggggcgtccggaatcgcatcaaccggacaggtcggtgcgttggttgtggaaaacaacagagtcaccaataccgcagccgccatcacgttccattcgccgcagaaatatcaggtcaacttcggcctggatgcggacaacgtggtaaagatcggtggcggcacaatgggcggcgtagcatatcccatcatccactccggcaactacaacaactacatcaaccaggcgctggttcaggtgggtcttggcggagtcggttcctacgcgatccttgccgtatttgacacctccgcgccggcagcgtccattgcccccggaacgatcatggacagttccaagctgttctattcgtcctgcgattcgacctatcgcagcagcgcccgtccgacgggcacctggcgctgcatggggtatgtgtataaccgagactccaccaacggcgactcggcatccctattccagcgggtaacgtaacatgaaatggacgcggatcagaaaccctcgttggctggatgaaacaaacatccacgccatggtgactttcgatgggatcggggaagttcctttcaccgccaatccgcacgacgtggaggcccacggaagggccatccacgctgcgatcctatccggggcgcacggatctatcgccccggtcgatgcgaagcgggagcaggccttgcaggacgctatacgggccagggaaaagcgggctatccttcgtgatacccgctggcccatagatcgtcacgacgagcagaggcggctgggtatcgaaaccacggacggacctgggttgatagcagcccttgttcactggaggcagcagattcgcgattggaatagcggggatcggccgcgacttcccatggctctgaaaacgatgttcaaaaatcaggagtattgatgaaaatcacgaaggatgttctgatcaccgggaccgggtgcaccacggatcgggcgatcaagtggctggatgatgtacaggcggccatggacaagttccacatcgagtcaccgcgagccatcgcggcctacctcgccaacatcggcgtcgagtccggcggactggtaagtctggtggagaatctcaactacagcgcccaagggttggccaacacctggccgcgccggtacgcagtagacccgcgagtccgcccgtatgtcccgaatgctctggcgaaccgcctggcccgtaacccggttgccatcgccaacaacgtgtacgcggatcgtatgggcaatggctgtgagcaggatggtgacggttggaagtatcgcgggcgcggcctgatccagctgaccgggaagtcgaactattcactgttcgccgaagactccggcatggacgttctggagaaaccggagcttctggaaactccggccggcgcgtcgatgtcttcggcctggttcttctggcgcaatcgctgtatccccatggcggagtccaacaacttctccctggtcgtgaaaaccatcaacggcgccgcgcctaacgatgcgaaccacggccagctccggatcaaccgctatatgaagaccatcgccgcgatcaatcaaggctcctgacattccacccaaagaaaaggccgcttattcagcggcctttttgctttctggctttgcctcttcaaccatcttgatctcgaccggcgcggcggactcctcctgagttaccgaatccacatagttccctagtgaactcagaacgccgattaacagcgctcttactaccttgtccttgactgtctcgcctatgatcttggtcagaacggatatcaactcttcccggagtcttgggctgattcttggccgaaagcgcttgcgatgctctttgcgtttcatgtttagtcctctgtctgcggtcttctcctcaccccgataatggcttggggatgcgctgtgttagtcggaagggtcgggcgctattataacccgtcgaaaatgctcgcgcttaactgtttaacgatacgcaccgcgatactaaatcgccttctttctggccaaggaactctggcggcctggtccggtctaaggcctaatttgtcgacattaaaacgagaaaacccggatcgcctgtaggacaaggcgtccgggtttatttcgatctagtgtacgctagaatcagtggcttccgccccaaccgtccagccagcaatcgaagacggcgtgtctcggcttgtccttggcgccatgggagaagtgcttgaaccggatgacctggcccttgagatactccctgtcattccagcggcgctgtttctcgtcgtgggtcaggctggaggccgacacgttgaaggtgactccaggccacagacgttcgttgcggcagacgaacgcaccgaccattccggacggcgacaggttttctgcgtggctggagcgggccgtgtggccaagttcattgatgaaagcttcattgttgttgtgcatcaactcttccacgtcgatgatctcagcttcatcgtagtcgtatcgcttgactttcacacagtgcccttccttggcagtcgagcgaccgaacttgtacagtccatcagcgcgcttgcccatggacccttcgaatcccagcatcgtgtggcggcgctcgacttcgctgaactgttcgatggaagtcaccagttcctgctctaccaggtgaatcctctcatagccgaggcagttacgcaggaagttcacgcgctcggccgccctggctaggcgatcttcggtcggtgcgcgaggatcggtgaaatcatcgaacacatggaaagaccagtccggctcaccgctgtggcggcgaagatcgccggacgacttctggaaaactttcgggtcgctgatgtcgccgcagaccagctcgccgtccaggccgttgaacagtttatcgctgaggtattcgtagatcgattgattgttctgccgcttgagttgacgagtcagcgcctcgccttcgaatacgaagcagcgaaatccatcgatcttcggtgagaaatacatcggcagttggccttcaagcagcttcgggtcaaaattcgatgcgagcatgggtttcatacagttctccagaaaagaagcccggcgaaccgggctaaatggcggtaagccggctcagatggtttcgttggcgtggttcagttcggccacgatcgacgcatagcgctcgtccgactccttgatgaacacgccgtcgtacatgacgcctttgcgatccttgatggtgtcgtaggccgcagcgtagcaggcgagcatggtagtgtcgtgctcttccgtcacatcgaacagagtcatgacggccaagaccaggctcttgatggctaatccatgatttccgcgtgccagcgcgccggccagatgtccgaggtgctgcaaatcgtcgccgtaggtgggatgaacttcgacagtctcgctgaagaccgatagatgatcgaacagattttcaccgagttgcgcggccatgaccgtggcaaccaccattacgtcgccgatgccgtctttcacctcgactggtttgttataaacccaggcttcgcaaacttctgcgaactcttcgaccaacttcaggaattgatccttggccgaagagcctttgatcaggttccggtcggaaccccatttaacaaccaggtcgtgaagttcgcgactcatgatttgttcgatattcattctttcgattccttttggatttgggatttgactgcgttgattatggacgccgtgctctggcgcgatccatccttggtggtgccgaagtagaaggccatgaccgacttcagctcggcgaaccaatagccgatgatggtgccgatggcgacagaggatgtcgggtccatcagagcctcgcggccgaaggtgaagattgcgatgatgatgagaatggagcccgtcagaagagcgaatgtaatcgccgggcgaacgaaatcgttctgctgcgcggcaagcctcctcgccgaatccctgtctgccgcctctgcggcgaactggctaagctcggcctggagctgattctgctcagactgaaggcgattttgttcggcttgaatcgcaagctcctggagacgaacgcgctcggcgctctggagttcggcgaggcgcgctagagcttccggattcgcgtctagagcgctagcgaccgaggctgggtcggccttcgaccccagcgccgtcgcgacgatagcgccaacggcggcgcctgcaggcccacccaggagcgaccccagagccggggcagccgcgccgatcttactacctatgtctttccagtccatttcgactcctcaaaagaaaggcgccattacagcgcctttctctggccgttgacgttagaactcttcggcttcggtcgcatcgccgacgccaccggcgtcactgcgaggctgttcctgcttgctgtagtccaccttcacctcgccgccgacgaacgacttgtacaggtcggccgcagccttgaagtgatccgggttcttcaccaggccttccagctcgaactggacgccggaccagctgcccttgtcgttcgacatgcctacggtggtcatacggaccaggttggcgaaagtcggcggggtgcgcaggccctgcggggtctgaacctttttctgggacagcgcggtcatgagcttcttcgaggccttgatctgcgaagacgacagggagatcagagcctggccgaaatcgccggtgtccggatcgatgacgatgacgtaatgaccacgggtgtcggcgaagtagtcagacttcttgtcgctgaccgaaccgtcttcgttcggcgcgtacaggcgtccttcgacttccttcaccttggtcgggtctttcatcatttccttgaagtcttcgacgctgatggcgcccttgaaaccgccctcggcctcgcgaccggcccagcggatgaactcgcggcggtacgcggccggaatgatcagcaggccggtcttgccgtcgtaaaccttgccggtgacggtgttcaggaacatgccggccttcgcgccttcgatgtacttcgggtcatcttcatcgacctggggagacatcttctgcaaaacctggatgaaggggatggcataggactcggcatcggcgccttcgaagcctgcgccgtcatacgatcccaaatccatgaagtcgggaacttcggtagtcgcgacggcgccgccaccggtggcaactgctacggccttggtttcttcggttgcttcggaagtttcggttttcttaccagccatgttaggctccttgtttgtcgaatttcagttatcgctaactgtgggtttataataacggaagttgcaactaagtaaagcaaattacatattaagatttgctctttttcaccttcggtttcgtgatcttggcctctttgtattcgtgtacgccgatgaaatctggcagctcttcgcccttctccaggtactcgcgaccgaacgcctggagggtctggtaatggacatcgcggttgatggtggcgtcatagccggcttcgatgatggcctcggccgccttcttcgcatcttccatttcgccgcgaccgaattcggccagaaccttggtcttgatgatgccgtcgttgtcggtgtcttccagccacttccagaacttcgatttgttctcttccttgacggaaatgatggccttcggctctacttttaccgtgcgaccgtccgccagagtagtggtcttctgaccaagctcctccaacagctccggaatggtgttacgcttgagggtcttcagctcctcttccttttcggccagcgccttttgaagatcgaggatttcgccgtccagctgcgaagccttgtccaccaagttcagcagtcgatggccgatgtcggtggcttcaaccgccatttcatccatgacgccaaaatagtcgatttcgcccggcgcgttctctttcaagtattccgggatttcaagctcttgctctttcatgtccgcctccaacttattgatgttcccttacttgaaccaagtattgagtagatattatgccgcatcttccttgatacggctactgatttacatattaaatttcgtcgcgagtgctaacgtcagcctcaaacacgccatcaacgacataacttgccaggttgcgtttccactccaagctgacctggattttctcgtcgatggaatccagacagatcaggtcgaagtacagaaccgagttgacggtgccgattcgatgatttcggtcttcggactgcatccgcaactcgttgtcttcgtcggtcgtgtagtaaatggccacgtctgcggcggtgagcgtgatcccgatccctgctgcggccgggttgcccaggaacacctggacgcgcttggcctggaaatcgtcgatcaatttttcccgctcggcctctttggtctcgccgtagtaggtgccaaacgaaatcccttgggcctccaaatacgccttgatctggtcgatttcctgaatgcgcatggcccagacgatgatggaacgctccgggtcttcctccagcagaccctccagaagatcagtaaacacggcgaatcgcgggttgtcttcgggcggcaggatcaccggctcaccatagacgttgatatagccggacgccacttgcttgagcttcgagcgcgctgccgcagcatcgaaagatacatcaagcatgaaatcttcgttctggagaacaaagtggtagtcttcttccacgcgctggtaaacctttcgttgctcaggcgacatttcgaagtatatgcgcttgtacactttgtccggcaggaatgggagtgcttctttcttcgttacacggaaactgtgcggctcgatcagggaccgcagcttgtccaggttccggaataccgggcgcccacactcgtctttttcgaccagttgcggcggcatggtttgcttcccttccagcttgcgcatgatagcgatcattcgaggatcgtcactgggcaccaagacggaaaattcggccacaaacgcccgataggatttagtccccagaattccattccgcaagaattggaactgcatgaacaaatcggtcggtgcccgcgtcagaggagttccggaaaggatgcgacgggccacggccttctcgcccagctttacgatctttttcgcacgcttggcttgtgggtttttgatcctcgttgactcgtccacaattgcgcaaactttgaatgtatcaaggaatcgctcgacctcatcatagccagcctggtggttgattgcgtcaacgttgatggcgaagacgcgaagaactttttcatctgcgaacgtctcggaatacagacggtccaagcgcgccctggcctttttggaagtcggtcggccgcgccaatccacgctcaaagtcttgatcgcgacgtgggtgggaatctcgcgcagaatccagttggtgtggacgcctttgggggcgacgatgagcagcgcgtccacgcgcccctgtaggaagaggcgaacggcatcggccaaagtcgtccaagtcttcccggtgccctgctccatcaggtatgcgaagttccgtttgttcagggacgctgccagggcattgaattggtgctgcatggcctcggtcttcatgcccttgacgggatatgttttggctttcatttgttctccaaatcggcgaggaactgaacaatgttatccagtccttctgcatagctcgcaacttccaccaagtcgcggctgttaagctcgaacaaatcgagcataggattcagcagcagccaatcggttccgatcttggccaggacgaagccccggccaccccagccgatccgctcccgaagaaaagggatttgcccaggttcgaaacatctggccattgggcaggtggaagcgcgtttcggccactcctccaaagccttgaactcgacccagaactggacacctcgacgattcaggcagatcgaatcggacatgccagaccgccgcgtctccagaaagtcgatcaggattcggccgagcgagcgctgcttaaacgcattcgccgctttcgtttcgcgatcattcatcaccttcgccctctttggaaactttctctgcttgcgctgccagctttgctttttcgcgttcggtcaaaatccgcttgacggccttcacgatgaacatatcgattccgctgagcttccagcctttgatgaggaaccaagaacctgtcggcgtcccttcagcaatctgctttccgtattgcagatatttttcaggcctaattctgaaacgtatcggctgatcaaccgagtcatcaacacacatgatgtcgagaaactgcgactggcccttgtacaccgggtttttcccttgatcagccctcttcttctggcgaatcggttcgttctcatcagacagaacttttttcaccatcttgacaatgaccagaccatcatctccatcgcggatatcccgaatgttctgaatggggtttccggaagttactccaaccagctccggattgtcataagcatgaccccagagcgtgtgagcttcgttcaaatctgcgaattgaacttcagaattcgacagactcgcggcgactttctcccaatcctgaagcgtcttcaggtgggtgcctgccagctctttatattgagccttcaactccttcagatcggccttcaactccttcagatcggccttcaacagtttctccagttctttgtcttggctgattttcgccgaaagaatctgggcttccagagctgctacatcagcagccttgtcctcaacatcctgtgccgatatcgggcaattggccagggcgatcctcgcggccttgacttcctcacgaagacgcaggaaccgctcggccttcgccgggccgaagcctttggcgttcatgatgccgccgatcaggcgcccgtccgccaccacccagttgagttcggaatgctccgggtccagggccgtatattctacgccttctttggccaattcgcgaaggatagacacagtttgctggtcgtccttcgccgcccgaaggcacgcggccgcgtattccaggcgatgataccgcttcatgtagcaagtccagtatgtcaccacggcatagcttaccgagtgggagcggttgaatccccaggcgccgaatgtcaccatttcctgccaaactcggtgagcgtcttccggggcgacgcctatggtcttggcgccctcgatgaacaattctcggcgcttgttgaagaactcttcgcccttccgcgccgacatcgctttccggatcgccgacgtttgttcccagtcgaactgaccaatgtccttaacaattgacatgatctgttcttggtacaggaacacgccatacgtccccgacaaatactgctcgacctgcggaatggtataggtcacaggctcgcggccggccacgcgctcgatatacttggttgccataccagaagacaacggacccggacgggcgagcgccgtgatgtggtcgatgttctcgaacgcggtgatgttgatcgcgtttgctaccgagcgaacggcctgcccttcgaactggaagatgccggacattttgtcttcattgagaacgtccagaaccgccttgtcgttcaaaggcaagtcgtacaactcttgcgcggtcacgcagttcgcgtcctggatgactcccaaagttcgaagtccaagcgcgtcaattttgaggagattcagatattccgaatcgggcttgtcgagctgcgcaacgccttcggaagtcaccgtacagaagtcgatgacttcatcgttgcagaccaggatgcctgccgcgtggacgccagagtgggatgggtgaatttcgaggtcgcccatgcaggcggacgcgatctcatacttttcacggaagtcgcggccgggctgagttttttcgaaagtgtcctccaatccttttccatatcgttcgtccgctgatgtatattcgatgatcgagtttttgatgttgtcggtatcgtggaaggggatgccgaagcgctttccgacgtgagcgataaccgacgcggccttgagtgtgttgatgttacccaacttcacaacgttccaagtgccatacttctgctggagatattcgaacactagatagcgatgggtatcggcgaagtcgatatctatatcgggaagatcggaacgggaaatgtcgataaagcgctggaagagaaggcgatgcgggagcgggtcaacctcggtaatgcccaggaggtagcagaccaaagagccggctgaagagccgcgagccgggccgaccagcatatgcttcttggcgaacgcaaccagatcggcgaccaccagaaagtagctgtcgaagtctttcagctgaatctgcttgatctcttcttggaatcgatcctcatactcctgggtccattccttgatgtggccgcgactgaggcggtaggcttgcccctcgcgagccagagcgacgatatcaccatccaagtggatcatcggcgccttcgccagtttcacatccgccaactgctcgactaccgcacgagtattggcggcggcggcatcgaactcttcgcgagtcatgatgtggcgtaaacggctccacaactcctcttcggtggcgatgtggcgaaggccgaccgattcccgcaccttccaggcagacgcgaaatcagcatggtcgatggacggcatgtcgttgtaagaggtaatcaccaccggctttccgaatgctctggacgtctccatagcaccgtgcgcggcgaccatcgacgcgggattgatgtcaatgtagtcgattccggccagatccagatgggcataggcctcgccagcgaatttgatgacgccgtcagcttcctggaattcttgcggagtcaatccttgattctggaccgacttggaagtcaagcggtagaacttcttagtttccttggcaagcacccaggctttgagcttcagctctttttcgccgtcgtcggcgcatttgatcggaatttccatgccgaatccgcgaggcagttctgctttggtagcagcctgctcccaacggacgtgaccccaggttccatcatcgacgatggcgacgaatggggattcgatctctttggcgcgctcgatgatctccgggaatcgcccatatgcggcgccgtaggagtagccagagcgaacgcggagttgagggaaagacattatgcggcctccattgcttgatatgcccgatatacgcccatgcgcttgcaaacttcgtggagcagccgcacgtcgtcgagcgcccggtgtttctgtacatatgggccgcagtagtgctcataaagatgctgcagccgcatgcggtggccgaacaacggcgccgactcttccacagtacagatatcgagcgatgggaaattgacttcgtccaggccgagcttgccgcgagccagatcgcaggtaagcatgaacttatcgaatggaaggttgtgagcaatattcgcgtcggctctggaaaagaagtcgcgaactttctgacgctgatcgaggaaagatgggtgcttgatcagatcttcgttcttcaaccctgtgatcttggtgatgatttcctcgataacgattccaggattgcagatgaactctacttcatccaaaatcttttcaccgtcagttatcacgccggcgaattcgatgatcctcggctgcttcctcaaactcaccctctggtggaacgggagtcctgtggtctcagtatcccacacggcgaatatcatgtttgttccctcttatgtcgaaagggccggctgctttcgcgaccggcctgaggagtataccgcgacggctgaagatttacgccttctgtccgtctttcggcgtgatacggccggagcgcatggtggcgtggacaaacgccgaatagttgatcgagtccaaggccgaatcggcatccttgaacccgctattcgccaggcgagtgagtttgcccaccatgtgcatcacgaacagggcgagtcgatggtcatcggcggttttcgccaccaggccgttcgggaagaggatttccatgatctttccgtacatcagatcattgcgaccataggtgctctggcggtcgcggaagacttctgctgcggcgtacagattgttgagaacatcttccgcgaaatcatctggatgggaatcatcttcgcccggccagacggattccatggcgaacggcgcggcgtcttcggtcgggtcttcggactgagccgtttcagcgagcggagacggggctttcgcaaacgcctcgtcgagggtaggggcggagttcggggcggccgggaacggctcgcctgccatgtcgttgggcgcgctatcggggtcgctatcggccgcgacggcgaagaacggcgcatcgcaaccttccaggttcaggatgtaggagtcgatccccaggctattgtaggcatcgatgatgtcctggcgatcatcgaacgccgcgacgatcttggtgacgccttcgattttcttcagtatgtcgagcgcgactgcccgcttgaactgaggcgccggctcggtgttaccatacggccgcatgatgagttcatactcgcgatgttcggcgatgccgagttcgcggtggagcttggccctggtctggaaaaagtggttgtcggttcggccggtgacgaagaaaatcatgaggtcggcgtcgatggcattcctgatgcgacctacagcgtgcgggttgagagtgtccttgtcgagacgagaatgatactcgtcccattgccgttccaaggcgaagctcttgcggtggctatcgtcgaatacgcagccgtccaggtcgaagatgatgatgccattctttggtttgcgttccatattcagatttccttactggttgctttctgggtgacggttttatcgatgaacgtcccatcagaagtgaggcggaaaacttcgccattctggatgaaatcgaacgattgcacgttcatcgtgatgcgaatggattcgctgccgttggtcacttcgacttgtgcgatgtcgccaactttctcgacaatgatcttcatgttacatggacttcccattgacggccacagggttggcctcttgtttttccgatccccagaaatcgcggcgcagttcttcctgctcggccgagcgatccatccaggggcgatagaacttgcactggtagataggttccaacggaacatcaatcacaggaatctgacctggctttgtctccagagcggccatgaaccggtcataggatttctgctggatttcctcttcattcatcaccttcgacccatagcgcgggaaggcgcaggagccggtggcgacgcagtgcggctggagcaggctgtcgaacataggatagacttccagaaccagccggcgcatttcgcggaatacttcctgatattcaccctgggtccgaacgcacaggcgaaccttcgccatgtcgctgagagtccgcagattgaacttggccgcgatcttcgtttccatgttggaagggatgatggcacgagcgtcctggagcgacgcgccggcctccagaagcttctggtagctggtttgcgcgtcggcaatggcgtcatgccacagacggttcagctcttcgcggacatggtaggtcgggtcaggctcgccatttaccgtagccggttcgtcgaattcccagcggaaggcttccggctgaacgacggcgctgatttccagagcgcgactggtttcctgctggtaagccccggtacgagtccgaacgagttgatgggtgaagttcttgctgacaccctcgatctggaaaatgaagtccacgaactcgaacggcgagcggatggtgtccagcatgtacttccagtggtcaagcttttcggcctcggtcatggtcgccgggtcttggccgcgcatgcgagtggatttcgtccccaggagaagttcccaggcgttctgggtgtaactgatcagagaaattttcatcagaaatcttccggaattggcgtgaagtggaattttttggttagagccagggccaggccttgggcttgctctttacgaatgccatactgctctatctcttccttgagcagttcgcaggcctccagacgcgactcatactcttcagcctcctgaacggatgagaaaacggttccatcagaggttctgtacacaagttcaatcgacatgatgacctcagtagcagcggatgatttcggcgcggatatctcgacggtcgaggtagtgctcacgaatcttatcgcgggcgcgctcggcctcttctcgactgccgaacgacaggttgaacgaagtgaaaggcttatcgtccaggcgcccatcgccaatcaggtacaggatgcctaccagcacgaaagacggcgctgtctgtcgcgtttgcggcgggtcgatttgcatttcgaggaaagacatgggaacctcttcaggatgatctggtgcgtacattaatagcgctcctgctgagcagctacggtttccggctcatagatgagcatgtcaacgatttccgggcactggcctttcacccagtcgatggccgcgaccagtgtggtggaagcggagaaagagaaagtgcggtaagactcatggatgtacggcgaccccatcgaatcgcgctcggtcgtgcgagaaatgactgctttgatattaacgatccggcccatcttcggcctccactttagcgattatatctgacaggctcagtttctcgccattcaggaaataactggcgcgaaacttcctgtcaccctctggcccgacgatccgggccgttatggtgagactcccgccgccaagggcatcggtgtccctgaagaaagccagcagcgcccgcttgagcgctgcctcgcgaggatcgacggccattaacctaccacgttccagccgtgctgagcgcaccaaaccgcaccggcccctgcaggaaggctattcagaaggaacacaggagtcaggcgaccgtcctcggtcatatgtatgaagtagcgggcgccttcaccgagccactcggccttggcgatagcgcgttcgagattggccttggtggcgtaggttttggtgtggttcttgtcggtggagaaggttacttcgcgggccatttgtagattccttttggttgaagggtttcgcgtttcgatgagggaatattacgcccacctgatccagaagtaaagcacttttgtaaattacttcacgaacattttcttggccttctgataagacgaagaagtcatcaggcgctcgatgacgtccatgtccgaaaccagatcatccagaaggacgttgcgccaggtagcgaaccggccgagcgagaagatgccagcctcatgggtgagattccagatcatggattcgcgctcgtcgcgaccgagcggaatgattttgcctttggtctggatggtcggctcgccatcttcgatgagctgtttccttctgatgccgaaggccgcgcaaacgtaatccatatcccagtcgctgtcccattcgatggtttcgattttaccatctaaagtctccactatccctttagtgatggattcgacgatcagagtatcaccggtgatggacgctcgaaacgttcccactttaggaccagggaaatacacggtctggaagacatcacaggggatggagagcttgtatcgactcacgatgatggaggttccttcaccgaatgacgggtcgattcccaggtccagccctgccgcagccagattggcgcggaacggcgcggtgctgatgatattcacgtggtcatcttgccggcgaagatactggaagaaagaggcgtcgaaaggacggctccaagtgatacgattcgcaagcttagccaccagctgctcatagtagtcggccggtgcgatccaacgcttttcagtcgccagattccagatggaccggtccgacaggccgcccgttactttcctggagtacatgttgcagtggtcgatgcgcggctgggaaatgaactcgccatcaatgtagatggccttgtgtacggtgacttcgcggaatgggatgccggtgagttggccgatgactggtgagcggaaccgcaagagcgcgttgtggcgttccttgctcgtcggcgtcgccgcgtcgatgatttgggcttgaggaaagcgatgcgcggcgatcaggccggcgagtccggctcctacgatgattactttctgatcaggaatcatgatgtgtcccttatgagtgtacaaaacttgagaggataaaaaagggacccattttcatgagtcccttgaagagctagacgattcaggctcagaggagcggcggcttactcctcctcaccttcggaaccatcggcgccctgatcttcaccgccgtgctcctggccttcgtcatcggccttctcgtcatcgccctggccagcttcgtcttccttcgaagcgatggcaaccagatcgacccagcccatgatttccagcttgctcaggtagctgcggaccgaggtgccatagagaagatgggccaccttatcgccgaaggattcgatttcgaccggctcaccaacggtgcagtgctcgttgatgtgtgcgaacaccttgccgcgagtcgagaaggcctgcggagtgccatggccgtcgccggtcgggatgaagtgagttgcgcgggggcgacgcgagccgttggacttcaggtcttcgcggcgggcttcggccttcttgcggcgctcttcctgctcttccttgcggcgctgcttctcggcttcgcgctctgccttcttctgctcggccaggcgcttgcgctcttcttcgcgtgcggctttctgggcttcctgcgcggccttcttctcttcggccttcttggcgcgctcggcttccttctcggccttcttctgctcgcgctcggcttccttcgccttcgccttctcggcctgctcagcttccttcgccttggccttttcagcgcgctcggcttccttggcggcggccttttccttcgccttctcggcgcgctcggcttctttcttctcgcgctcggctttgcgcttctcttcgcgctcggctttcttctgctcggcttccttggccttggcttcggccttctcggcgcgctcgcgctctttacgttggcgctcagcggccttctcggccttgcgcagggcagcggcttgttccttggtcagctcttcgccttgggcctgttcgttctggttcttctgttccatgttcttactccgggaatgtttaaagggatggcttattggcctgtgaggggattatctctaaactaattgaagaagggaatacccttagcctgaactttcctaaatattttctttcgggaaagtccaaactctagggaacttatttatgttcgagaagttcctagcttttacgcaagaacagtaagtattcaattgcacgagtgatcccagtatacatcaactgactataagggatggacggcaagttctcttccaacatggcgactcgtttccactccgacccctgcgacttgtggaacgtcatcgcccatccgaagtcgaatccgccaatagccttctgcgcctccagccgcacgtcttcctcggccgaaaaactcagaggattgaacttcacccagcgttcatagttcgtgccgataatacgaactttggcgaacaacatctcatcaggctcgtcatcatcttcttgcccttcaggaaccggcttgaagtccagcagaatggcttgttcgccgttcataataccatattcgtgctggttcccagtgcacaccagcttctcgccgattcccggctgcgcacctttgtagccgaggattcggcgagcgcgtgcgttcaagcgacggcgagtattgttgtaagcgcaaagaattacaccatcgttgtccaggaacgtccgcatttcatcatccgacatatcgaagccggcccggaccactatgtcatcatactcgcggcatggcaagcgcttgccctggcgaacaaacatcgacgcccgaacgatattgccggcgttgcgctcgatttcggtcatgatggtatcacaactgttctcgtggaagatctggacgccgcgcacaggaggaacttggccaaagtcaccaatctccagaaccggaattcgatgcgacaacaggcgctcttcatcccactcgccgatcatagacgactcgtcgagcactaccaacttcggtttctcgtcgagcgagtctttgttggcaaacatgatttcgccgtcttcatcttcaccgatgggtcgatagataaagctgtgaagagtccgggcattggtgcagcctttctcacgaagacgcgctgctgcttttccggtcggtgcgatgaagactgtccagtccatcgagcagcaaagctcagcgatgatcttcgcgatggaagtcttaccagttccggcaaaaccggcgagtcgatagacctggcggcggtgtgctcgatcacaccaaccgcgataccagtcaacgacggaatttatcgcgtcgatctgctggctattgggtcggaatccgaatcgctcttcgatctgatcgacggtgaagttagatgctgacatatttgcgttctccaacgctaggtttaattgaattgaggctaagtttaagcaagccgtccacagaccatccagtatcacgacgatacttgcggccgtgcggatcgacatagaagtttttcgtgcggcgcaacagaacataatgccaagcggcgccgagtgcgtggacccttcctttatacgggaaagccttcgcctgctctgcggcctctttggccccagggagccagcggacggtagaaaggaccaggaccgcacccttaatagcctgggaagcggcgcggccgtcctgtgggctatagcgatgtctatcgaagtctacccagtggtggttgccgcgccggagcttcaccgtccgggaccggccctcaaacaccacagtgccttcgtgagtaaaaatatgttccgccatggaatgttccttataacgtacagttctgctttacctctgcgcaagaagagtatactatcagctgactcgtcaaagcgagcgaatttaatccaactttacttcggcaggaaagtggccgatactagcgccgccgcctgtactgccctccaaaacagaggatacattaaatgcaagaatgcaagatttcccgcgaccaactcccggtcggtaatccgaatcccaatgtcgacaagacccgcgacccgaaccttaagcccggtttcctgcgtcgcagccgcgagctggacccggcgctggccgttcgcatccgtcgcgagctgatccacgccgaagcatccgacttggccaaggccggatgggtcaattcacagtccagcctctatggatcgaaagccttcccgcgccattccgtcgttcgcgtgaccggagttccggaagatggagctttcatcggcatgctgatcggcttcatcgagcatcgcgagcatggcgaatgggcggtcatggaagccggaacgaaagaaggcggcgccgtcattattccagtcgatcacatcatgcgagcgtcattcgccgaagccgaagagttcgccgaaaagtgggagcggaacttggggtggcgtctcctgcgccaactccgcgagtgcggcgccctggccgggactgaagacgagttcctgcggcggatcatcaatcgatacgttcgtgatcgcacgatcctcgatcaccacaaagtcggcgcggacaaaacctatactgatgcagtactcaaaagcatcggcgaaacatggccgaagattccttcggggaaattcgtcggacaccgagtcgcgcagctcctgatcggccacaagctaggtcgagcggggaccatcctgaatgacctggtggacttcctggagaagttcgcggccgggcgcgataaagttctcaacatcgccatctgtaattgaggtgaatgaaatggttgacttggaaaagctgagtccaaagctgagtcctcggcagcatgccgttctactggagatgtacaggcatcctgagcatccagttcacagatcgccaacgaatttaactcttaaggctttgagacgaagggggcttgtcgagctatcctggaaggattccgtggctggatatatgttcggtcgccaaccttgctggaaaataactgatgccggcataaggcgaatcctgggagtgctggggaataatatggaaaaagaacaaagcgaagatcgcccaagcatccctgagtttgagaagaccgacgccaacaaactctatgatgctctggagacgatttcgctgctggagaagaagttggacgaatccgaaaagcgcgggagcgagctggccgcgagctattgtgacggcgtagtcggcgatgaatacggccatccttattgtcgttataaagtggaacgcgacgccgccttggccgaagtagagcgcctgctagaaccaaaaggcgatccctctggcagcttcgacaggtgtatgaagatgatgtacgagcgcgacgagaatgcaaaacgactcgacgccgccttggccagggtcgcggagctggaagggaagttgacggactgggtgcacgaagggttccggctcaacgaggcgctagcggtcgccaaggctcaacccagcgtgccggaaatatctggcatcggtcgcgatgccgaacatcccagagctgtagtgctgtatctgcgtaacgaacccagcgatgaagatatgcgagcaattcagaactttttgcgcgccatggccgcccccgctcagcacagcgtgccgaaagcatggctcgacgttcaggcagagcgccgccggcaggtcgaggcccaggcgctaaggcaggaagtcgcagcactgcgcgcaagggcggatgttgtgccggaggtgttcgggcttgagcggtaccgcgtagaaaaaactgggaagggtttctggccatactgcgtgcgtgcgggggatggaacgcgtgaactgttcgtcggccacttgaagcagtgtcagcgggtagcgaccgaattggctacggcgtttgaagatgggaagtttatcgccgcgcccggcagctcggctcagcacagcgtgccggaggggtggaagctcgtaccgatggacccgacatcgcagatgacctatgtcggtcagtccctgcgttgtgacgcggtaaacagcatcggcgagatttaccggcaaatgctcgccgtagctccctcacccatcgatccggccgcgcatcctcagccgtgccagcaaccacaggcccatcctgcccgctgcgggtgcgagcggtaagtgccaagtaaggaattcatgtaatggaacagaagaaaccttcaccagtagatggagtcatcatgaccagcctcgacgttctccggaaagcacagcccgaagcccaggacgagtatgccgtgtccatgttcgcaacggcgatccgccagaaaatgcagcgctcccgcgataaaggccgaggcggctggatcgactgcgacgaagatattctgatcaacggattcgccgaacatgcgctgaagggaaatgagaacaacctcttggacctggcgacgttcctgatgttcatgtgggtgcgcggcatcgacgatgcgaagattcccccggcgctcgaaaaggcgcggcagcacaagatcatggaagcatggagtcgggtccacgaagatggactaaactccgccagaaaggcgagtgctgcgcgacagttcgtggaagtgcctcgacgcaaggggcgcccggagcgacttgcatgaagcctcacgaaataagactggcacaggccgaagagttcctgcgcgaactcggccgagggattccggacgacgaacgggtaatggtcggctacgctgaagaggccacagtccaaaccgacgagaacggccgcaagctcaacgcaggctggtggcccgtgccctggaaggaaggcaagtacatcaattccaggtcaaacgcctacgcctgtatctcgtcttccatcaagacgcccaacccgaagaccggccagatgcgatactggcgcggcgaggcctctttcggccacggcctggcgttaatggtcgatgacatcggctccggcaaaggttccaaaggcgacttcgaccgcgacgagttccgagaacgcctggagccgaccgcgattgtggagacttcgccgaacaactaccagttctggtatttcttcaaagagccgatgtcccacatgcttcagtttaaggcattgctctattcgttcgtggaccaggtgctaaagaaaggcggtgacaacaccgtcaaagacgtcagccgttacggccggatgccattcggcttcaacaacaagcgcgggaaagacggcaagttcaaatatgccgacgaaaacggcaaacccgaactcgtgcgcctgtacagcgccgactattccaagcgctactcgccagaggaaatcgcgcaggccttcggcgtccgcatcattatgccacagatgaagaaggtggagataaaccgcgacgattgggtgtatgaccaagtatggctgaagtatgccgagcacatctgcacgaaatacaagatgggagaagcggcaggcggccaggtccagcagaatatgtccggcaaataccgcatccgctgtccctggggcgacgagcacaccaacggcgatcctttcggcgcatactttcgcggaccgatacctggcgccgagcacgaatatgtgttcggatgcgggcacgatacttgccgcaaagagcatcgacggacgtgggcggccttcactgatgaagtcgtcctgccctatatcgtcgaacaattggaacgcatcaaccgccgtcatatcggcgaggagtagtaactatgcaaaacgatcctggaatcctgattaccgccatcggcttgctgttcctcggccttatcatcttcttcgaaggcctaaaggggtggaaaatacaagtcgcaaacttcctcgcgtcgcttctgtgcttcttcttcggtctttccgctttgacgttctggttcgtcgttgcgtttgacgtattttaatcgacgaacggtacagaaattttcggatggggacggaacttattagctatgccggtttaggtaggagataatagccgtccctttcgcctcaatatgtagaggcaatgttgaatccgatcatgtaaagcagaaggcggcaaacctaacatgattatcgacgaagataatgtttttgatgatggcgaatcagggtccagtgagtttgatctcacacagatagaagatgctggaatggaccctttgatgaccgccgcgagcaaggcggccgatgatgcgattgcgaggaacgaaacgcatcgcgcgcaaaaggcggcaagatacgccgaggcgtatgcggaaccagacttgagaaagcgagcgcgattgttgatgctcgaccaggcgttcgatcttccggtcagccgggtcgtgaaagggccgttcgatgacttcatcacgaaatacagctcgacttccgacagcaactatctcgcggtgtacgatactttgttctgtaagggcgacggaaccgtcccacacccgcacttcgacgagtttcgcggccggctggtggaccatcgcggcgtggcgttcaacaacaagaccctcgatccgattgacctgatgggcgccctcgcggctgcggccttggacgatccctcgattaagaagacgattgagacttgctgcgtgtgggcgcgtcgatatcgccgcaactcgctgatcgagacgtttgagaagaagataccggagtgggatggagaagagcgaattggcacgctgctgatcgatctttttaagccattcgacaccgaattgaaccggatggtcagcaagtatttctggctgagcctgtactgccgcatcaactatcctggaatctcggcgccgatctcgctggcgttgattggtgggcaggatgcggggaagacttacttttcaatcttgatatgtaaagagttgtcgagcgaccgaaagttatcgccggtccagcttgacctgagccgtcatgaccagacgccatttttgcgcaatatcactggcaactcggtgatcgcgaacgtcggcgaaatgtccggcttcaaaaagggcgacatggaacgcattaaagagttcctggtgcgatccgatgatactttcgatcagaagtttgaaccaggcgaaactatcagccgacaatggatcaccatcatggacggcaacggctatgatggtcttcaacgggatgagtcaggaaaccgtcgattttatccaatgttcgtggcgcaacttcccgacgaggatggcaagccgaattgggttaaaccgggcgatggaaatgaaactttccgcgttgacttcaccgacttcggccgcaaattctggcaagccatggctgagtgccgcgcctggattaaggcgaatggcgtggagggatatctcgatctagttcgggcgaccaacaacgaagtccagaaattctctatttcggaaatggagaatgcgcgtggcgtggttcgtgacgatacgattgacatgtatctgatcaatgttctgatcagttgtgagttcgaagagatcaagcctggcaggaattcaaagaatcctggatggagagtcaacaccatcgaaatcctgaaatggttcgatattctcgccaggaagaagccgatttctcgccacttgactccgcacctgaaggcgctaggatttgttccgaataagaatggcttgaatggctggtgcctgcctgtagataaggttgcgcctggatggaccagagatatgcacacgacgttgccgccgttcaatgatgtgcttgtatacttgctgaggaaggttgattctgaggtgactgatgaagaggcaatgattcaaatccgcaaagttaaggccgagcgcgcaaggatattgggtgaggatttctgatgtagtgatggagtgtacttggactaggccgccttcgggcggtcttttctttggtgcggagtacattcgatttcggttgtggccgagtgagattcggaagctatctggtaattagggtttggtggcgatggcggattgtggaaagttcgtgaacgttggatcaaggattttgtgcggtgattggatgaattgtggaaaatcgacgattctgactggatttttggggtcggccgcgccggtcttactggtaattaccgaaaccgggaatttgggtcgagccttagtgccgcgtgggcttgaagcgcttattcggatacttcccggtttcggatgcagccgcaaaagtatactacagcgaaaatcgattgcccaatcctaatagaaaaaatctatcacggacgttacctatctttaaaattaataaaattaat

SEQ ID NO: 52 - DNA, 44383 bp, synthetic construct
  source 1..44383: mol_type = other DNA
tctaattttggtatcgtcgtgtgagaaccctcccgactctgatcagcccacccttcccccgtaggccctccgcctggtgggccactgcctcgcattgcctgggtgttgcctgggtcatccctgggagcttccagctacgctgggtggtggtgggcttccctgccctgtcgctgtcctgtcgccgcccattctacgcatcctggcgggagtgtcaacccctgggtggtcggtgccttgctcggctacgctccagcgcttccgcgtggtcggctaggcggttggctcgccagcgcttcgcccactctacacctcgctccacctcggaccacttgtccgccagcatcatgcgctgccatgccgcgtcctgctgtagccatgccctgctggctctgtcctgtctgctcagcatcctctgtctcctctgtctggctccctggggcttccctggggcgctgctgtggtcctgtcgggtgatggtgcgggagtggctggccttgcctcttgtgcctctgtacctgtggcattgccctggctctacctggctgctccctgggtattccctggggctgcctgggtggccctggccactccctctaggccacgtactctactcgcctccacctgtcctgtctagtcctgctctgctccctggagcttccctggatgctacctgggtgctggtctatctccctggctctgcctggcgctgtgctgtgctaccgctggtcctgctgtcttgcctcgccgctccctcgcctgctcggtcgcacctgcggcgctgatggactcctgtttgtccattgtgtgtgacataaccgcagccttagtgccatgcgggttccagggcgatgggtctggctggttggctgctccctgggtgggggctgtcgctccctggtaacgcaaatcctggctagctagactaagcctcgcgcatggggtctctatacgcgtgggaaggctccagggagcgcctggggaggggttgacacgttggcggtaggtctgtagagttcgccctgtcttcacgcaataccgccttcacaggcagcctggagacagggttgacacactacccgggcatcggtagagtacgcagccagaacgacgggagattgcaaccttccaagcgcggcacaagccataggcgcaagggacacggcaagctcttagggcaggaaccgcagtgtgtaaggccggcaggcatcactggggggattgacaaggtaatagatgcggtaagatgtgcggcgtcaagtggtcccgatgtacacactgtgaagggattacggcgcggtcagacagatgaccggcaccgcttgacactgtaaagctcagtcggtacgatgggcacccatagcggacgtgatggtccggggcgatgcggataggacgccttgtttataacctgaccgcaaagctgtgactccagccgataggactgacccaccacgtaaatacagacgggttgacacgacaaggccaagtcgataacatggccgccacaaagggaagcgatagcttcctggcggtagaggttcgaagcttcaccagcggtacatggactggtgcggtaggttgaccgaagctgcaactggttaggcagggtcccagggaatacctgtcgggtgctgaagactcacccaaaagagtctgagcgggaagcctccccgtccacggttaagcaaaggcacgttagtgccggtgggaacgaatagagtgtcagtgggatcgagaactagaaacctcggttaatcgcgactgacagtatgctgggtagtatcggtgggccgattgaacaaggccaggcagatagcgcaaagggtacgggggatgagtgaagacgatcccgaagagtatgcgcaggacaagccagaaccgctgatactacagggactatgccaatgccaaggtttgtcccttgaggcccttccaccgaggggattcaagagacagacctagttgaggaatgccgatggcacacttcaaggctaaggctcccaagtcgcccttcgctacccaggtagcgtactggcgggattgggaagccaaacgtactaagctcatcgcacaggataacgtcgaggggcgcaaagagcttcgcaagatgcgtgacgtgcgctacgctaccgacccggagccagcgccaggacgctaccataaccctgaacagaaagcgttcgtgaagggtagcgaaggcaaggcgcggaacatcctgaagggatggaacgctaagaagtcgcaagggaagggtttgtaatgccacgtgtgaatgaactgacgccgcgtcaacgcaaggccgccaaggctcgccgcgacaaggcacgccggattgatctagcgcacaagatgccgaaaggcgccgactgcccgatcttccgcaaggctgaacaggcgcaagctaagcagccccgcgtcgataccctgaccactccccgcagtgccggctacctggccgccgctgcttacctgaacaaatccatctgaggtacataccatgaccaacgcaatctccaaaaccgtaatcgcattccgtggcaccgaagagatcaatcgcgctatcgacgccatccgtgtccgtggcaaggaactcgacgaagccatccaactgaccggcctgtcgatcatccatcacatcgaccagtgtggtgacgtgaccgtggtcaaggcgctgtatgaagccatgccgaagggcagccgccgcaatgcgctggtcgagtggctggtgctgcacggcaaggtacaggtgaataccgacaagaagtcgaacaaggacctgcccttcctgtacaacaagttcggcaagaccgatctcgtaggcgccaccgacaacccgtggtacagcttcaagcctgagaaagcgctggaccaggagtttaacctggccgctgccctggccacgatcaaaaagcaggtgctccaggctcagaccaagggcaaggtgatcgtcggcatggaactgctgggtgatctggaagcgctggccgccaaggctgcacccatcgccgagcagagcaagcgcgctgccgcccattgactcaagtcgaacgcctgctaagcgggcgttccgctggaatcaatgacaactggagaaacacgatgagctttaagcaacgtctgcaacgtcaaatcgccctggcccaatacagccgcccggctcagttcccgtacggcgagcaggccgtccaggcgaagggagagtgaccatggacttctggattgccctccccttcctcgaactcggcctcaacctcggcgaggatgaactgcgcatgttgtggttcagcggcctgacggtattcttcatccacctcctgaagcggtgactcaagtcatggccctggcgggcgaccctcgcctactccggggccatcgctggactcatcacaagcgagaactaaaccatgcaagctttgaatactctgttgatcgcaatccccaaggacccgtcgaacgcattcaatgcagccgacaaggtgctgtgcgcccatggcttccgtatgggtgacctgaataccgcgcacgtgctgacccctggcgggttcgtagtagtgggcgccggcgtgaccgtcaaccgctacgacgaagcgtatcgtatgagccggaacctcgattccgaaggcttcgacgttctgctggtccagggcagtccactgtccgggcacgtcacctgccaggcgtacggctggatcaatgcggaataccgcaagggctgcgcgaacgggcgcccgatcttcgacattgcaggaacctcgtaccatgtcctcgcgtgatccctaccgtatcggccaccgcgtggggctggtgaactacagcgaccgctacctaggtgccgacgcggcaggcaccaagggcgtcattgaagccataacccgaccgtcccgctgtatgacgatctatcacgtacgctgtgagcggaccctgcgcttgatcgaggccgaggcccgtaacgtgcgattcatcagacagctaccgacccgcaaatgacgtggcgcataatcgtcgtcagcccatcaagcggctgcgccttcgtgtggagtctcaagcggcctgtgcggccagtgcgattctactcccgcaaggcagctaaacgctggctccgcaagcaccgccgacagggcttgcctggccactactacctcatcgtgaactggagcaaacgcctatgaatcctacttacgtcgtccgcctcaaggacggaaccacccgccaggtagtcgccgacagcatcgtcaccggccacgccttcgtcgaactctggttcctcggcggggcggtcgctatctacccggcctgcgaagtacaggaggtccaccgcactgacctcgtaaaggagggtggtgatgaatacccgcactgtatacgtcaagccgcacagttcgaggtgcccgccggtattgtccgcaggacgcctgaccccgggtgaactctaccacgtgatcgcacctgccgaggtcgaaggcgtcattgtgctggcaacttcaggcccgtggcacatccggtccgtggtggtgcatagcatgcacccctcggtatatcccgtagggatggctgtcactgacgattcctggcggttccgccgcctgggtgtgagcgagtacgtccaactaattcaagggtacgaacaatgatcgccatcctgttcgtactcggtctgtactgctgcctcggcctgctggcaggcgcctgctactgcatcgcagtggccccgccattcgagaacccgacggaagtgcagttccaggacgcatgcgtgatcgggtgcatctggccactcgtgatcctcgtcggcatattcctggcactccgtgcagtaggccggggcctgctgaccgggctgaagcgtcacctgaacatccaataacctaccggaggtaacatgatccgcacccatacccacaacaccgaccgcgaacagcgccgcatctacaagctcactgagctgacgtcgggtgagatgtacagtgtagtgcagcccgagtccaagcgtggcacgctggtggtcggagtagcaacctgggatagccagagccgacctgtagtgctgcccgtggtcattcacgatgtgggtgcgcatccctcgccctgtcccaccgtgctgcgcaacgacggctggcgcatggtgcttgccgccaagggcacccaggtaacactcaccgccgagtgaccaaggcgaaggctggtgcgccagccttccaccgtggccattccttgccgcgaaccaactcaaccgaggagctacaacatgaccaacgtcaacaccgccaccaccgagaccaccaccgctgctgccctgggcgccaagctcatcaagaagccggctaccgtggaagacttccgcaacaacgtggtcttccatcacaccgccctggccaagctgaccgaagtctacaacgaggcggtcgttgccctgcaaaccgccgagcgcctgtccagcctcgtcgccggtgacgtgatcaccttcgaccacggcaagggcgagaaagccgaagtgctgagcggcgaagtcatcagcgtggttgccggcgtttaccaggtgctggtccgcttcagcgacagcgcacctgccaagctgctggacgtgaaggccagcgccatccgcgccgtccagtcgtcggcagcccaggctgctaccctcgacgaagccatcgcccagggcgagtaaggcccgcacgtaataggcccggccctccgggcctattgcgagctagccataccataggaggagtcaccatgagcaagcgtaaccccgagcacatcagcggcgccgtgcgtagcgtcagcgtccagaagtcggcagccgtccaggaactggaggatcgtctggagtctgccctggccgtgtgccagcagcgggcggaagacatcgatctgctgagccgccgtctccaggccgccgagcgcgcccgccgctgggagatcgacgagattcgcaaccaccaggcgaccatccgcctgttgcagaacgacctgaacgctgcgcatgatgcccacgaggcacaagagcgccgcgctcgcaaggcaaccatcatggcctgggtatgcctgctgaccgcaggtttggccgtcaccctgaaactggcaggagtctgaccatgcagtgcaacgacctttacactaagctcgcagcgagcatgttcaacgtgccgtgctcccaggtgaccgccgagatgcgccgcgtagccaagagccgggcattcgcgtatgcttacactcccaagcgacaggcgtcgggtgggacgtacaccgcccgcgtgagcggcgtcacctgtgacggtggcaaggtggaggtacgtctggacaacgtggagcgcgccgacacctgtggctatgccaagctggaggcgctggaagcggtcagcctgtaccagggtgccgcgaagcgcgccgatgagtatgaaaagctactgctccaggcattcccggtggtggctaagcgtcgtgagcgcttgcgtatctccgggccgctgtcggcggaagacttccgggcaaacctgctcgggacgtgttccgcatatcggaatgccctcgacgccatacggggcgagattacctcgaccggcccgttgcggaaccgcatatgggcgctggtcgaacgtatgcaccgggccgagacgaagctcaggaatgctcagtcggagatcaaccgcctgcgggagcaggaactggaccgcctccgcaaggacatgtccagctactgcgccaacgacgttacctctacggtgagtgcagcatccgcgaaggataccctacgggtggcaaccttcgccgccgccctcgccggtggcgtcgtaggtagcgccctgatgttcctgctcagctagggcgaccagggcctactccggggtcaaatctgagggcgttcctagagcgccctctcgtgtgagtctggaggatcacgaacatgcaataccatttcacgcattacaacggataccgcttcggcgtcgagctggaagacgaggctgtcttcccgtgcatcgacggtaagcgggcgacctgggacaaggtggcggcgtgtgccggtagccttgtgcattacatggcgcaggacctgattgacttcggccagcgcaagttaagggagatcgaagatgagcaagacgagcctgtacccgctgagcctgcatcccggcctgattcaaatcaggacgattcacgtattcagcattcaagctccgagcaacgccgagaactggtggcaatggttcctctggcagcggaagtaccacccgctccgggagagcctgagtccagccggggaactgagtgcgagtatcgccgagtgtgtccaccgcctccgccagagtggctggcaagatagcgacatctggcgcaagaagggaggcgtgctggccctcggtgccttcgacctgtccggcctgatggtgggttcctgcctcgtagtaggcggtgagctgaaggccctgtgcgttgatgaccggcacagcaggcagggtatcggcgctgagctggtacgagctgccgagctggccggtgctgagcacctgacctgcttcgagttcctggagccgttctacgccggcttgggctggcgcaccgagcgccgtgaggcaaactggactgaaggcgagccggatgtgctgtacatgagggcacctggccatgacgcatgaggtgatggtatggcttatcgcgaacaaaccgctggtcatcggagtcgccttcagcctggtggccctgggcgtgctgctcacacagaacaacggcggcccgcctatggcgcccgcatgacctggcacctccaggacatgttcgaggcccgaggtgggctgaggcccttgtgggaggagtggtatcaatggcactgcgccgcgactcctggctaaagcaagcgcaatccctggcagtcggccaggcgggtcgattccgccacgtcctgggatgccagagcatgagccggggcgggaccaacatgacctgcaagaacctgcctgaccgctgggtggcatactgctactcctgtcaggaaggtggcgtggtcgagaaaacgcacgtgcggagggtgcaatgcgcggatcaagaacgcttcatgccctggcccgaggatgcctcggactggacgcaagccgactgctatcaatcgctatatggtttgctgctgtccaagggcatcgactacaacgtgatgacgccggggctgccgctgctctacagcgaaaggcagcatcggcttatcttccctaccgacgcgggctggattgggcgcgctactgccgaccaaaatcccaagtgggtgggctacgggtatcctgccccggactaccatggatggccccaggaatcatcaatgggcaggccatgggtgctgacggaagactacttgtcggcgctgaaggtgcggtgggcatgtcccgaagtcttcgctgtcggtctgaacggtacaaggctgcgcgacaggctggcggcgatcatgttgcagcagacctgcaagcgcgccttcatcttcttggatggcgaccgggcaggtgtccgtggtagtgcaggcgtgatgcgccggctccggtccctgcttatcgaaggccaagtcataccaacgccggacgggttcgaccccaaggacctgacccgcgagcagataaggagcctagtaattggacgtattgacgcttcacgcactgagtgaccgggaccgcttccgcacgttgcggagtgtggtgcccgaaggaatgatggggccggagacgtgcttcgtcatcgactggatcgagcagtattggaaggtctacccggtgcatcagaaggtagacccgcaggcactgcgcgaactgatcaagctgcgaggtggctaccagccagagcaactagcggtggtcctgaacctcgtcaaccaactggacaagccggtggacccggactcgctacagggcgttgtgtcccagctcaacgaactggatttctcagggcgggtggatgccctcctggcgcagtacaaccagggcgaggacatcgacctggcgtatgagctgcgccggctgagcgacgaggccctgcgccgcgagggggtcagcacgccgaccgactacgtgacggacgacgtgtttgatatcctcgcggaggagcagggtgaccacggcatcaagctgccggggctggtgctgccggcgtacatgaagggcctccacgccggggcctcggtgctggtggcggcgccgcctgatgcgggcaagacctcgttcatggcctggatcgctgtccatatcgcgccgcagctcaagcggtacttcgacccggggcggcccatcctgtggctgaacaacgagggcaagggtcggcggatcaagccgcgcctgtactcggcagccttgggcatgaccgtgggcgagattcttgccctggacccggaggaagttcgcaggatgtacgccgagaaaatcggcggcgactctgagctgatccgcatcaaggacttccacggtgggtcgctggctcaggctgaacaggtcatcgacgcgatgaagccagcggtggtgttttgggacatgatggcccacgtcaagggcggccagcgcaaggaccagaaccgtaccgacgagatggagtacaaggtggctgaggtccgcgagatggcggtacggcacgacttcatcagcttcatgacgtggcagattagcaacgacggccacgaccagttgttcccgccgcagtcctgcctcaaggattcgaagacagcggtacagggtgctgtggacgtgcaaatccacctgggccgtctcaacggcgcggatcaacaggtcatgcgtggcctgtccctgccgaagaacaagttccagatggacgggaagccttcgaacgtggaggcaatgattaacttcgacgccgcacggtgtcgtttctttgagagtgtggatcatgcaagctaagcatagccgggtgctcgaaggcaccaaagaaattccgctgggtagcatcgcactgttaccgggcaccgtcgcgggcctgctgctgtgcctgtactccgacgcaactcacgaggagggcgtcgccttggccggtgggttccctcgcgacttgctgcacggcgccactcccaaggacgtggatgttgccctgtacagcatgacctgggggcgggcagagcacctgatccagaaggcactcccggtcctgaaccccatcttcgtccgggatggtgggtggcgctcggactacgccgatggcggcgacggtggtatcttcaagggcgtgatgtccctcgtgggctgccgtgggttgaatggcatggacttggactttaactactacgacgccgacagcctcggtcgagtgatggagtcgttcgacttcaccatcaaccaggtaggcatcgcgtacaactggcccgaccccgaaggcggtccgcgcctgggtgcgtacctgcacaaggacgttacctggggcgtgaacagggaagtcggtaacggctcgcgactgccggagcgatgcgagaagatgcgggccaaggccgcgtattacggatgggagaacgtgtgatgagcaagcgcgacgtggtactggatatcgagaaaggcatctggcgcggcgtagaccagaacgacaaggccgtcgaggccatcatcaagaagcacgggtacgtgatcgtcgagcctaagatcgacgggtgccgtgccatcgtcggtgcgcatggcgtggtgtcccgaagcgggcgccgcttcccggccctggatagcttggaagaccgcatcatcgatcgactggcccgccccgggctggactccggcctggtgctggactgcgagatgtacctggccggcatgcccttcagcgaggcgactggccgcatgtcgcgcaagaccccactgaccgaggaagagctggggtgcctgcacttcgcggtgttcgacgccacccatatagacgtgctccgcaaggcgcgcacctcccacctggtatacgaagagcgccgcgccatggccagcagcctcctggcagcttgccgcctcagcgacactccgacgttcttccaggtaggctcgcaggtgtgtcggtcgatggaggaagtcttaggccggtactccctccaccgcgccatgggcttcgaagggtcgatggagaaagacccgagcatggtctaccgcaacggcaaggtcgccggctgctacaagcgcaagccggagatcaccgtagacgggcgcatcgtaggctacgtgccgggcaggaccggcaagaacgctggccgcatcgtgggctactatgtcgagttggaagacggctcgggcaccgtggccgccaccggtctgaccgaggagcacatcgagttcctgacccgtagccaatactactcgaccgtcaacgacacgatgccaaacttcggtcgcatcgtcgaggtctctgcgatggaacgctcggccaacaccctgcgccatcccagcttcagtcgcttccgcgaccttcccagcaatccaggagtcaaggtatgaagattcgaaagtcccgtaaccgcaactacccggaagatatggtgtaccacgccaccaaccgggattcactgctgtatccgaagtacgtcatgggttccgtgttcatcagccaggacggaacattccgcatctgcgtcatggcagggacctgggaccacgttgggtccgaagttctgcatcatgcacgggacatccaatcccttggcgccggtcgccgtaagttgcaccgggtcatgcgacggctgcgccgcaatctgcaacaggtaggagtcaaggtatgagaatgccaaccgaagaagaacgcacgatccgctgcctgctggcagatatccacgaacccttgaacctgctgttccccggtatccgtgtaaaggccgagacaatgcccttgggctggggagatagtatctgtgccctggtactccgggtgagctacgaacatcgcacgctgggtcgcctggagtacctgcacgaggtccccatcctgcacctgacgcagtggggccgggacggcatgctccagcacctgatgaacgagattccccgtcgggtgctggatggcatgctgcgccaggcacagaaatacagccagagcaactggtacagcaaatgacgactatccgaatcctcgacctcgaaaccgagagctacgagcacaaagggcgcaaagcgtcgccctttgacccccgcaactatatcgtcatggccggctggcgtgacgatgttgacggcaaggtcggccagaaggtggagcatcgcttccgcagccgggccgaagccgaagatccgaacaaccgctggttcaacctcgacggcgtggacgtgatcgtagcgcacaacgccatgttcgaatcgaactggttcttcacccgctaccgggacgagtacctggccttcctgcgacgtggtggccgggtctggtgtacccagcaggccgagtatctgctgagccatcagacgtggctgtacccggcactcgacgaactggccccgaagtacggcggcacccacaaggtggacggcatcaagctgctgtgggaccagggcgtgctcacctcggagatggaccaggacctgctgagcgagtacctgtccggcccgtgcggcgacatcgagaataccgccctcgtattctacggtcagttgatgaagctccaggcccgtggaatgtgggctggctacctggagcgctgcgaggccctgatcggtttctcggcgatggagtgcgccggcctgaaggtggacctcgaagtcgcccgggtgaaccacgccaagcaactggaagaggtggccgggatcgaggctgagctgaagaagctgatgcccgacttcccggaatacttcgagttcaagtataccagcctctaccatatgagcgcatggctctacggcggcgaggtgcggtacaagggccgggtgccctacgaagatggccggatggagaaagccgacttcgtgcgcttcggcacggccaagcgggggactcctatcgagagtacctcggtgcgggtcccgatccacgaagtgaccaaccagggtgagtggcactggcccaccatcaccgagctggcgaccaagcacggcccggtcatcacgttctccgccggcaagaacaagggcagcgtcaaggtgttccgtgaggatacggacatcccggcgaccaagtgggacgatgaccagcgattccgattccccgggctgatcaacctgaacaacctgccggaagtggtgcgcgagaaattcctaggcaagcgcccggagttccagtgcgccctcaccctggcggatggatcgcccgtgttcagcaccagcggcgacgccctccaggctctggagaaacagggcttcgaggcagccaagctgttgatgcgcctggccgagttgcacaaggacaactcctcgttctacatcacccacacctacaacaaggatgggacgatcaaggacacgaaggggatgcttcagtacgtggacgatgatggtatcatccaccactcgctgaatacgaccgcgacggccacgacccgactgtcgtccagccgcccgaacctccagcagctcccgtcaaaggacgaagacgacccggaagccggcagccgcgtgaaggagatgttcgtgtctcgcttcggcgcggacgggatgatcggcgagaccgactataccgccctggaggtggtgatgttggcggccctgtcgaaggaccggaacctcctggcgaagctgatggccggcacggacatgcacttgtaccgcctggcagggaagcacaacaactggaacgggttcgattacgaccagctcgtggccatcaagaaggaccccaaccatccgtggcacggtcgcatgatgcaggctcgaaagaacatcaagcccaaggcattctcggcgcagtacggtgcgagcgcggctggtatcgcattcaacaccggctgtaccgtggaagaggcccaggaattcctggacaacgaggcggccctgttccccgagtccatcgcattccggcagatcgtccgcgacagtgcagaggccaccagcctcgtgatgtacaaggccgaggaccagatgccggcgggcgccttcagcgagatggggtcggatggtaactggcgccagtaccgccgaggattctggcaagcgccgggaggcacctgctacagcttccgccaacaggaacgctgggacaaggaacagcgcaagacggtcatggacttcaaggacacgcagatcgccaactactggaaccagggcgaggctgggttcatgatgaccgtgagcgtggggcgcatcttccgttggatgctgcatcgcccgggattcatggtcaccgagttcctgatcaacaacgtacacgatgccgtgtacaccgactgccacaaggacaccgccgccgaggtcaacaagggcgtgcgcgacatcatggccgacgcggcccgctacatgagcgagcggctgggctacgacatcgccgacgttccattcccggcagtggctgagatggggccgaacatgttcaatatggaggtgatccagtgaaagaactgcatccgctgcacacgcccgagttcgtcaaaacattcctggaccagaccgggtgcctgcctggggtacgccgtacgggccgcaccaccggcattgctctacaggccatcggcatggcgctgtcccatccgagggaaaccctgacgttcgtggaccacccggacggcagctcggcagcactggtggccagcattgaaaccatactggcgaccctgggctaccggaacgtcctcgttcgacccacaacccgtgcggacgggcgcagcgtgaacatcgtcttcaagacgctgccgaacgcctgacgaccttccctactccggccttaaatcttccttcgacacaagagagaccacgtatgactcagcaactcaacgctctgcaagctgcactcgccctggccaacaaggctgccgagaccgcaaccatcgacatgtctgaaacctccaccggcggtggcggcggtcgaatcttcccggctggcaccgccatgggccgattctgcatctacatcgagctgggtgaccacgccaaggaattccagggcaagctcaagaacccggcgcctcaaatccgcctgggcttcgcactgtggggcgacgtgaacccgcaggccggtaatccgcagagccgcccggacgacctgttccacacctacgaggccgacggctcgatcaagcccggcctgttccgtaccttcgagatgaccctcggcaacaacgagaaatcgaagaccaagctcgccttcgacaagatgaactggagcgggcagcatacccacttcgctcagatgctcggccaggcgttcatcatcccgatcaagcgcaccaagatcaccaagggcaacaacgccggcaaggaacgcaacgacatcgattggggcggcatcatgaagccctacaatccggtcgatggcagcccgtacaacgtgccggaactgccgatggacctgttgcagtatttcttcttcgacgcgccgaccaaggagacctgggacgccctgcacatcgaaggcacctcggacaatggcaagtccaagaacttcctgcaagagaccattcgctcggccaccaacttccctggctcggccctgcacatcatgctgggcggcggcgacgatctgatcatcaagccgacgacccaggccgcaggcagcaacctgccggcagtgcccaacgtggccgccgatgcaggcgtagcagcagcccctgctgtcccggcagttccgcaggcagtgccgcagacggcccctagcgtgccccaggtggcgaatgtagctgcccctgtggtaggtactgccgaggcacagaacgtgctgcctgacgtaccgcaggtggctcaggtggcagctccggcggcggtcgaagtcccgtcggtcccggtagtgccggcagtaccgcaggtctaatgcgcctgccatcggaagagttcctggcaggactatccgcgcagttcgaccgcagcatggcaggcgggacgttggtgtgtgacgccgacggacccgcctacgtggctgcggccactgctaagaccttggacactgcactccggagattctggaagctcattttggagcagcagttcctagcgcactgcacggggacacgggttcacctcacggcagcaggtggggcgaaggcgtaccgggacacgtatccgaccatgaaaccctaccagggccagcgcaagggtaaggcaaagcccgcgctgctggagcctctgcgacgggccgtggcggacgtgcatgagcgcggcggcgcacccgaagggatcgatgtcatcctgcacacgttcttcgaggcggacgacggcatgatgatggacgcctacgccatgcaggacaaggccatcatccggtccgacgacaaagacctgcggatgacgatctacccgtattgggagatcgacacggcgtgtgtgagcaggatcgaaggcggcttcggctacctcaaggaggcatacacgccttccggccagttcaagctcaagggccacggacggaagttcttccttgcgcagtggctcggcggcgataccgctgacaacatccgagggatcgatcgattcaacgggaagctctgcgggatgaagacggccttcgatatcctccacccgatcacggacgaggatgaagccatcgacatgatcctggaggcgtacgccaagatcaagcaaaacccgctggcagaggccgaggtgctgtggatgcgccgaacgcctaccgacaacgcagcgcagtacctgttaagccgcgaccttcgtccggccttccgccagtggatcatcgagctggacgcctaccacgaggcgctgctccagaagcggagggagagtgactatgacgagtgagccgaaggtctaccagataccgcgcagccaacagcgcaccttcaccctgaagctgtgggccgagcagggcaagctatgcccgctctgcggtaagcccatcgatatcagcgtgaagggcgaggcggtgatggaccacgaccacgagacggggctggtgcggggcgtcctgcatcgatcctgtaacaccgcagaaggcaagatcacgaacgcggcgggttcctggggatgcaagtcgatgaagtacaccgacatcatcccctaccttcgtgccctcctgacgtacctggaggggccgaagcatccgctgatctaccccctgcacaagaccgacgaggagaaacacgaagcgaagctggccaagcgccggcaggcagccgccaaacgcaaggcggcgatggccgtcgcaaagcacaacgcgaggaacgtatgagcaaactccgcaagcaattcaccaatgagtacctgcgcaacgtctatgtcgagctgggtctcaagaagggcgccgagcatctgaccaggcattcgcgcttcggcgaagtgagccgccagtgcttccgcaactggtgcatcaagctgggcttccacgacagcaggacacgcggcacgtacgccaagaagggtgcgctgcactggctgggccgaaaggcggccgaggtagtgcgcaagttccctggcgccgtgggcaacgtggtcggccaagggccgaaggtgttgagcctggacatcgagacctcgcctatcgagggctgggtctggtcgctctggaagcagaacgtgggcctcaaccagatcaagcgggactggaccatcctgtcgttctgcgcgaagtggatgcacagcgacgaggtgatctacatggactgccagggcgaccccctggacgacatgcacctgctggtcgccctgcacaagctgttggacgaggccgacatcatcatcgtccagaacggcaagcgcttcgacgtgcccaagatcaacgcccggttcttcctgaacaagatgccgccgccacgaccgttcaaggtgatcgacaccttgatcatcgccaagcagcaattcgcgttcaccagccgcaagctggagtacatgacccacaaggcatgcaccatcaagaagcgcctccacggcaagttccccggattcgacctgtgggcagcctgcctccaggacaacccggaagcctgggaggagatgcgcctgtacaacatcgacgacgtacgatcgatggaggagctgtacatcctgatgcgcccgtggttcgtcggccatcccaacgtggccgtgtacttcaacgacgctgagccgactatccgatgcccgaagtgtggcgacacggatgtcaagcaagaaggctgggtgcatacgcagaccggcaagtacgagcactatcactgcggtggctgtggtggctggagccgagggcggtatacccgcaacacctcggaacagcgcaaggccctgctgagcaactaaggaggctatatgagcctggcgttctccgatccctacgaatctacgggcacccagcccggccagtaccgcaaaggcgcggccccggacgagcgaaaggccggcaagctcccgatgcacctggtggttgaaggcttcccgctgctaaagcgggagcttgcccgcatgatgcagtgggccgccgaggtcaagggctacaagccccacgactggaagaagatgtcggtgggcgagttcaaggccgcccaacaccggcacgaatcccaccgcctgctggacgggccgctggatgacgagtcgaacctgatgcacctcgtgcatgaggcattcaacgcaatggccgccgccgagcgtgccttgatggaccgggagaaaggcaatgagtaaaatctgttggtgtacccgaccgcacgagaccgacgaaggtgtacgtgtcatctgggccttcaacgagcggggcatcggggtaaactacgtcacggcgtacgtcacgccggcgatgatccaccacccggactggcgcgataccatcctcccggacatcctccaggagatggcggagcgcctggaccgcgaggttaagctggtggaattgcgctggttccgcgctgagattctgagctgcggggaatggcgtgactaccgagcaatgacgctggacggggcggtcagcctggccgaggccgagtggggtcccgaggatatcgggcgcgtaatcgaaagacgataggagacggaatggacctgatacagcagcagatcgcccacgaagaggcccttgtcggggcggcgcagaacgacgcccgcattgccttggaaaaggcgatagcccaagggtccatcgaccgcatcccgagggcacgcatcatgttgatgcggatgctccccatcgtgaccgaagcgatcttcgcccaccaggaagcgaaggcggcgggaccggcagcgaagctgcgacacctgctgcggatcatcgacgcccaggacctcgcggtcatggcgctacgggccgggctgtcgatgctcatcaactacccaacgatcaccgcgacgaagtattacacccatatgggcaagatgctctgccgcgagatcgaagtgcggttggccttcaaggtcaaccaaccctattacgaccggacgctggactacctcaagaccagcaggactcgcagcgtccggcacatccagaagacgatggacgcccttctggacgcggtactgcccgaggaggcacgtatcgacctgccggatggcgactacctgcgtctcggcaagttcatcggtgacccgctgatccaatgcggcctgttcgagccgaaccgcttcacaggccggggcggtacgagcgtccacctggagccgtcgccggaggccaaggagttcctgcaagacccgtcggcggcgatgacctggggaggcccaggccgtagcgtaatgctggcaccaccgagaccctggaacgactggtgcgatggcgggtactacagcgccaaggcgcagaagcatcacgtattggtgcgtcgtaccaaacaccagaccaagcgggcacgtcagatgcagctccgccacctgggccgggacaagatgcccaaggtatacgcggcggtcaacgcactgcaatcggtggcctacgagatcaaccacgacgtgtacgagatcatcgagcgcatcttcacttccggcggcggcgtgctgggtatcccgcagcgtacctacccggacaaacctgagttcccgctcggcgacgagtgggccaaggagaacgccagtgaacaagagctggaagccttcaaccgatggaagcgatccgtccaccgatggtacaccggggagcgggagcataccgccaagcttcgcgaatttgctgcactctaccgagttgttcgagagcatcatggcaaggcagtgtacttcccgatgcacgttgactcccgtggccgcatgtactattggggcacaccgaatccccaagggtccgacatcgccaaggcatgccttcagttccacgaaaagcgcgccctcggcaagcgcggcctgtactggctcaaggtccacgtcgccaactccctcggatgtgacaaggtgtacttcgacgaccgggcagcctgggtcgatgagcgatgggacgacttccagcgagcactcgacgaaggcccggagaactatccgaatctcttccccgaagacgagtcgcccctgtgcgccatcgccggtctgctggagctgcgggcggcctacgcatcaggccagccggagaattaccgaagtgggttcatcgtccatatggatgcaacctgctccggcctccagcactactcagccatcctccgagacgagatcggcggagcatacgtcaacctgttgccacctggacttgccaaagctgacatctactcccgagttctcggtctcgttgcagagtctctggcacgagacatcgagagtgctgaaggcgaggctcggggctacgctgtactgtgggataaggccggtcttgccaggagcctgacgaagaaaccctgcatgacgctggtgtacggaaccacgttcaagggtgttgtggaccactgcctggactacctggacgagtccggcctggagattcccgagggtatcccgtcataccgcctgggaagctacatggcaacgctcatactggacgcaattcgcgagacagtaccatcggcagtcttcgccatggaatggctccagcggctcgctaaggcccttcctgacgcatccaaggatttgcactggaccacgccactcggcatgcaggtcttccagtcctacccgaagaccgaggaggtccgggtgcggctgcgggccgaggctgtcgagtacgtcaccctgtacgaggccaaggacgagctggacccggtacgcaacgccaacggcatcgccccgaacttcgtccacgggctggatagcagccacctgggcctgacagccctggcatgcgcggcggagggaatcccgatccaggccatccacgacagcatgggcacctatgcggcagacgtggatcggatgcacgtccacatacgggagcagttcatcgccatgtacagtggcccctgtgtgctcgtagagctggcaaatcagcttggggtagaggctaccccgccccggaggggatcgttgaatctggaggctgtacgggactcctgggcgttcttctgctgaggtggattatgtcacccacataggagcaagtgcatccgtccaaggccctcgtagagggagcggggagagaggagaggtcagggaagacctggtagaggagaggtggagatgagaatggatgactacgaaggattctagatagaatagactaaccagcataggagatatgatagatggctactatgaagacccaccgccctacggttatgtcacccacagtggaaggatcgagaacaggcaagggtacggcccgtcctgtcacgttcacctctcagcagatcgagtggttagaacagaccttccccgaacatcagatcggtcctggaaccacgatggaagacatccagttccaggccggcaggcgagacgttgtgcgagcagtacgactgcgccgacgtgatgccatcgcagtggagctgaagtgatgagtaagtccatctggcgagtacacgcaaaggccggcactccctcggaactccagggcctgtgctggctggcaatacaggagctggaggagttcaccctcttccgctcgaaggacgacgccctgaatgcgatgctggacagtatcgagggcaacgatcgaaccgagctgttggtattccgcgatggtcagttggccggcggtgcctgcatcgtgttcgaggacgacccccacgtcggcccgtgcgtcacagcacagtggcagtacgtcctaccgcgctaccgcaatacaggcgtggtccgggagttcatccgcgaactccaccgtcaggccggctggggtcaaatccccctcgtgtgctggagccatcgtgaaagcgatagccggtacacgatccactaccggagagccaagccttatgggcaagaaagtcaagaaggtgctaggcaagaccatcatcggcaaactcgctgatggcctgctgggcaccgaccttagcggcgcacaatccgatgcccgcaagatggaagagcagaaccgcctaatgcagcagcaggcggaccagctcgcacgaaaccagcaggttgacctcaccgccgagaacgtggcgcaggttgacctaggagcgatggccgatgccactggcaccggcactcgacgacgccggaatcaggcgggcacaggcgtatcgcaaaccctcggtatcaactactgacgaggtacgccatgaaaaccaccgcagctatgctgtgggagaaacttcgggatgggagcgtggagagtcgagccatcgagttcgccaagaccacgctgccctacctgatggtcgatcccatgtccggcagtcggggagtcgtagagcatgacttccagtccgccggcgccctcctggtgaacaacctcgccgccaagctggcgagatcgctgttccccacggggattccgttcttccgatccgaactcactgatgcgatccgccgcgaggccgacagccgggacacagacattaccgaagtgaccgctgccttggctcgggtggatcgcaaagcaacacagcgcctgttccagaacgcctccctggcggtcctgacgcaggtgatcaagctactgatcgtgactggcaatgctctgctgtaccgagacagcgccgccgctacggtggtcgcatggtcgctccgctcttacgcggtgcgccgggatgcgactggccgctggatggatatcgtcctcaagcagcgctacaagtccaaggacctggatgaagagtacaagcaggacctgatgcgcgcaggccgcaacctgtccggttcgggcagcgtggacctgtacacccacgtacagcgcaagaagggcacggcgatggaatacgccgagctgtaccacgagatcgacggcgtgcgtgtgggcaaggagggccgctggcctatccacctgtgcccgtacatcgtgccgacctggaacctcgcccctggcgagcactacggtcgcggccacgtcgaggactacatcggcgacttcgccaagctgtccctgctgagtgagaaactcggcctgtacgagctggagtcgctggaggtcctgaacctcgtggacgaggccaagggtgcggtagtcgatgactaccaagacgccgagatgggcgattacgtgccaggcggtgcggaagccgtccgtgcttacgagcgtggcgactacaacaagatggctgctatccagcagagcttgcaagccgtggtcgtccgcctgaaccaggcgttcatgtacggtgccaaccagcgcgacgccgagcgcgtcactgccgaggaagtccgcatcactgcggaggaggcggagaacacgctgggcggtacttactcgctcctggccgagaaccttcagtcgccgctggcgtacgtctgcctgtccgaggtggacgatgcgctcctccagggcttgatcaccaagcagcacaagccggctatcgagacgggccttcccgccctgtcccgctccgccgctgtgcagagcatgctcaacgcttcccaggtcatcgctggcctggccccgattgctcagctcgatccccgcatctcgctaccgaagatgatggatacgatttgggcagccttcagtgtcgatacctcgcagttctacaagagcgaggcggagctacaggccgaggcagaacagcagcgccagcaggccgcacaggcccaggcagcgcaggaaaccttgctggaaggcgcttccgacatgaccaacgcactcgcaggagtctgatagatgacccaaccgaacgaacagcaactgccgccgggcctcgctaacctggttgccaacgtaccgcctgccgccgcaccgaccccgagtcatgtgcaggtgatgccgaacccggtgatccaaccgcaggccccggtccagcccggccaggtaggtgcgccgcagcaactggccatcccgacccagcagccgcaacccgttccgaccagcgccatgacgccgcactaccaaccggtagcggcacctgccgtgggtcaacccgttgttccgcaagcacccgctcagccggccccggtagctccgccggctgcgggtgcagttcttcccgagaacctggaagtcccgccgccgccggccttcactcccaacggggagatcgtgggcaccttggcagggaacctcgaaggcgacccgcagttggcgccctccatcagctatctggaggcgttctctgacaaactggataccgtccgagccttcggcaaggccgccgagaaccgcgatcctcggttcatcgacgagcactatctgaaggaagttctcggcccggcccaggcgcagcacgtcatcaacgtggccaagggcgtcctgacctatgtcgatgcgcaaaccaaggctgtcctgaaccagacctatgccgccgtcggtggcgaggccgtgctgaagcaggccgcaggcgtcttcaaccaacacgctgacccggccaccaaggccgccatcggtcggctgatggactctggcgatgcccaggccatgcagtacgcagcgaagcagatcattgccttcgcacaaggctccggtgccgttgtacaggctaccggccaacccctgggtgctgcggcacctgcactagcagccctgaccgctgagcagtaccgcgcagaagtgtcgaagctgccgctgaacgcatccgaagccgacatggctgcactgcgagagcgccgtaaggcaggcatggcgcagggtatctaacgaccctgccctactccggccttaaactcacatccaaaagagagagaatcgcatgagctttctgaacgacctgacccgtccgaactacgctggcaaggacgcggacgttgacatccacctggaagagcacctcggcatcgtcgacaagcacttcgcctacacctccaagttcgcaccgctgatgaacatccgcgacctgcgtggctcgaacgtggtccgcctggatcgcctgggtaacgtcaaggtcaagggtcgtcgcgccggtgaagagctggagcgcagccgagtcgtgaacgacaagtggaacctgaccgttgacaccctgctgtacctccgccaccagttcgaccaccaggacgagtggacccaatccttcgacatgcgcaaggaagtcgccgagctggacggccaggaactggctcgcaagttcgaccaagcctgcctgatccaggtgatcaaggctgccgcgatggacgcaccggtggacctggaagacgccttctcgccgggcgtgctggagaagctggacctgaccggcctgaccgccaagcaggctgccgagaagatcgtccgcatgcaccgccgcgtagtcgagaccttcatcgaccgcgacctgggcgatgcggtctactccgagggcctgaccccgatgtcgccacgtgtgttcagcctgctgctggaacacgacaagctgatgaacgtcgagtaccaggcaaccggcgcgaccaacgattacgtgaagtcgcgtgtggccgtcctcaacggcgtcaaggtgctggagactccgcgcttcgccaccgacgcaaacgcagcgcatccgctgggccgccacttcaacgtgagcgccgaggaggctgagcgtcagatcgccctgttcctcccgagcaagaccctgatcaccgcccaggtggcgccggttcaggccaagctgtgggaagaccacgataagttctcgtgggttctggataccttccagatgtacaacatcggtgcccgtcgcccggacaccgctggtgccatcgagctgaagggtatcggcgccttcgacatcaccgcgtgacggctaaggatttaaggtaaggaggtttatttatgcaggataaaaagtctaaaagtaagactgccaagattgattggtctcactggacagtgacggtccctgaggagaacccggacaagccaggtaagccgtattcactgggttatccggagattctcaattatgcagaggacaaaatcgcgtcaaaatacatgtacgacgatccaaaggacaaaagtgtcgtgttctacgcattcccgtccggcgtgactaccgctaacacccattacagccggtcagagttacgggaaactatggagaccgggtcaaacaaagttaactggaccttcgctaagggtggcaaaatgcgtggtacttacgctatcgacgacatcagcaaagagccggatggtaagtattcccgcgtaattatcgcccaaatccacggcgtactgaccgacgagcaacgtgatcttattgggcaaaaggacaataatgcccctccgattctcaaggtgtactgggataaaggtaaaattcgggtaaaaacgaaagttttaaaggacctgaacgccccttacaaagagatgcttctggaacacgcttggggtgatgacgaaggccggaactttaaagagaagattgacttaaatacacggttcacattggaggttaaagtgagcgatgggcggatggaagtcattcttaacgacaccgaaagtttggtctatgacgacattcacatgaaaaaatggggcattttcgaaaactactttaaagcagggaactacttccagtctaaaactccgggcacttttgcaaaagttaaaatttattcacttcaggttacccactgaatgctactactcgacgcagtgaatgtcatcctgcgcaagatcggcgagctgccgatcccgagcatggatgagacgtatcccaccatggccattgccctccctgagctggaggaccagcgcatccagttgctgacgcaaggctggtggttcaacacctggtggaagcacaagctgacacctgatcccacgggccgcatcaacctgcccaagggcaccttggcattctacccggattccccggacctccagtgggacggcctgggagtgcgcgacgccaacaccggcgacgaccgcatcggtaagtcggtcgagggccggctggtgctgtcccgcgagtgggaccgtatccccgagatcgcacagcgcgtcattgcgcaccaggccgcactcgcggtgtacacccacgagattggcccggacgagaccgcccaggtcatcgcccaggaattgcaggcgtatcagaacgaactgtcccgcatgcacacccgatcccgtccgctgaacacccaggccaagcgtagcttcagccggtggcggcgcagcttgaggacctgagcatgagctacaagcaatccgcgtatcccaatctgctgatgggtgtgagccagcaggtgcccttcgagcgcctacctggccagctcagcgagcagatcaacatggtatcagaccccgtgtcggggctgcggcggcgcagcggtatcgagctgatggcccacctgcataccgaccaaccctggccgaggccgttcctctaccacacgaaccttggtggccgcagcattgcgatgctggtggcgcagcaccgtggcgagctgtacctgttcgacgagcgggacggtcgcctgctgatgggtcagcccctggtgcatgactacctcaaggccaacgattacaggcagctacgggccgccacggtggccgatgacctattcatcgccaacctgagcgtgaagcccgaggccgaccgcaccgacatcaagggcgtggaccccaacaaggccggctggctgtacatcaaggcgggccagtattcgaaggcattctccatgaccatcaaggtcaaggacaacgccaccggcaccacctacagccacacggctacctacgtgacgccggacaacgccagcacgaaccccaaccttgcggaagcgcccttccaaacgagcgtaggctacatcgcctggcagctctacggcaagttcttcggtgcgccagagtacaccctgccgaactccacgaagaaatacccgaaggttaaccaggatgccgatgcggcaaccatagccggatacctcaaccagcgtggggtgcaggacgggtacatcgcattccggggagatgccgacatcaacgtcgaagtgtccacggacatgggcaacaactacggcatcgcgtcgggcggtatgagcctcaacgcaacggcggacctgccggccttgctgcctggtgcgggcgcacccggtgtgggtgttcagttcatggatggtgccgtcatggccaccggctcgaccaaggccccggtgtacttcgagtgggactccgctaaccgccgatgggcagagcgggccgcctacgggaccgattgggtcctgaagaagatgcccttggcgctacgctgggatgaggctaccgacacctacagcttgaacgagctggactatgatcggcgcggctccggcgacgaggacacgaaccccacgttcaacttcgtcacccgaggcatcaccggcatgacgaccttccagggtcgcctcgttctcctgtcgcaggagtacgtctgcatgtcagccagcaacaatccgcaccgctggttcaagaagtcggcagccgcgctgaacgacgacgatcctatcgagatcgccgctcagggcagcctgaccgagccgtacgagcatgcggtcaccttcaacaaggacttgatcgtcttcgccaagaagtatcaggccgtggtcccgggtggcggcatcgtgaccccgcgaacagcagtcatcagcatcaccacgcagtacgacctcgatacccgggcggcacctgctgtgactggacgcagcgtgtacttcgctgccgagcgtgccctgggtttcatgggcctgcacgagatggccccgtcgccgtccacggacagccactacgtcgccgaggacgttaccagccacatcccgagctacatgccggggccggctgagtacatccaggcggcggcctccagcggctacctggtgtttggcaccagcacggcggacgagatgatctgccaccagtacctctggcagggcaacgagaaagtccagaacgccttccaccgatggacgctgcggcatcagatcatcggcgcgtacttcaccggcgacaacctgatggtcctaatccagaagggccaggagatcgccttgggccggatgcacctgaatagcctgccagcccgcgagggtctgcaatatccgaagtacgactactggcggcgtatcgaggcgaccgtcgatggtgagctggagctgaccaagcagcactgggacctgatcaaggatgcctctgccgtataccagctccagcccgtggccggtgcctacatggaacgtacccatctcggcgtgaagcgcgagacgaatacgaaggtgttcctcgacgtgcccgaggccgtggtcgggtcggtgtacgtggtcggctgtgagttctggtccaaggtggagttcactccgccagtgctccgagaccacaatggcctgcccatgacctcgacccgcgcagtgcttcatcggtacaacgtaaacttcggctggaccggcgagttcctgtggcgcatcagcgacacagcccgacccaatcagccgtggtacgacacgacgcctctgcggttgttcagtcggcagctcaacgccggggaacctctggtggacagcgccgtggtgccgctgccggctcgggtcgatatggctacgtccaagttcgagttgagctgccatagtccgtacgacatgaacgtccgggctgtcgagtacaacttcaagtccaaccaaatctacaggagggtgtgatggctttctggctaccactattggccgctggcggcatgtccgcccttcagcagggattggccaacaaggaagagcgcaacaagatcaaggccgagaacaaggctcgactgaagacggacctcgacaacctgggcgccgccgcccgcgacatcgccaacctcggagtcatggccgctagctaccgcaagcaggccgtggcctcgcaggtggaggccaaacgccaggggatgctcgccggcggcagtgccgaggctcaggccggagcgttcggcgtcaagggcgcatccgttgatgcggtggccctggatatcgagcgggaggtcggcgaggctctgttccagattgacgacaacctggacaatcagatgtggaacctcgccgagcaggcgcactccatccaggcccaagctaaggccggcctgctgggacagaagagcaccactgcggggcaacgatccccgctggtggctggcctgatgtcggcgggttccctgtatgcaagtcaatacttcaagttcggcgccacgcctaaaggaggcaactgatggcggaatcgcaacgtgcttcccaagagcttgggatcaacgtcgggcagacgcaactccagccgggccagagtgcccggcgtggggtgcgcgactccgaagtcaactacagcgggccgagtgtaggctcacagattctcgacggcatcctcggcgccggtcagcaaatcgcaggcaagtggttcgagcacaacgtgcagcaggaagtgctgcgcggtgagcgtgcccgcatggccggcgaggccgaggaggcggtagacagcaacatcctggccaagcccttcgtgaagggcggctggcgtaagcaggactaccgtatcgctcaggcggacttcagcctgaagatgcagcagttcatcgccaacaagggccgggagatgactcccgaggagttccgcaaatacctgtcccaggaggctacgcacgtcctggactcgacaaagggcatgaaccccaacgacgccctacaggcgctggcgcagcagcagaaggccgaggagcagctcttcggcatgcaggccaaggcgtacatggactggtccatcgaccaggccgcacgaggcttccgcacccagggtaacagcatcctggccaaggctgtacaggcccaggccaccggcgacgaactgtcccgacaactcagcctggaagaggctggcctgttctataccaacatcatgacctccgaggatatcccgctggaggtgcgtgacaaggtgggcatgcagttcctggcagccagcctggacatgaaccagcggggcatctacgagagtctgcgcgatgccggcttcctggacagcatgtccttcgacgaccggcgtgcgctcaacggcctctatgaaaagtcgaaggcacagacccgggccaaggaatcgatggctaccctgcgggccgatgcggacttccagcagcgggtggctaacggggccatcacagaccttgccgaggtcgaggcgtactcccggggcatggtcgaggagggccgctggagcgacgcccaggccatctcgttcatgaccaaggccatgaccggcctgggcaacgctcagcgcatgcagggcatcatggcggccctggaggctggggacatcaacgccctgcacacgctggggacgaacgtctccgaggcactggagcagtgggacaagatgcaggcggccaacggctcaagcctgaccgatcgactcgtacagggcacgcagctcggcctgcgcctggggaccttccccaagacctacggcgagtccgtgggcagcgccgtgcggatgatccaggcggccaaggaaggcgaggcgaacccggagctggtcaatacgttgaacagcatcttcgagcaggtggcctcggcccaggagatcaacccctccgccggcaacgtgatgctatccggcatcccggaagccgagcagggcgctgtggcctgggcactcaagcagatgaagatgggcatcgccccagctcaagcactgcgcgagttcagtgccaacgccgaagtcgtgaagcagatggacgagttcgagaaaggacagaacaccaaggcattcaaggacaacctcggcaagcaggtcaacgacaagttcgtgaacaacatcttcggtcgggcctggaacatgctgaccggtgagagcgacctgagcaacaacgaggccgttctcagcatgtaccgtcgagcaaccatcgacgaggcgaactggctggccagcgaccgcaagcatgcgggtctgcttaccagtgacacgggccgcgaggccctgctggagatcgccgccgccaacgtgcgtaaccgcaccatccaggtaggcgaaggtcggaacctgaaggaaggggacctgttcagccgccgcgacagcgcgccactgatcctaccccgtggaaccaccgccgagcagctattcgggaccaacgataccgagaccatcgggaccgtcctggccgagcagcacaagccgcatgtcgaaggactcctcggttacaagtcggtagtcgccttcgagtacgaccgcaccagtggcagcctcctcgccgtcgagtacgatgagaacggtgtggccctggaccgcacgcgggtcgatccccaggcagtcggtaacgaggtgctcaagcgcaactcggacaagctgaacgcgatgcgaggtgccgagtacggtgccaacgtcaaggtcagcggcacggacattcgcatgaacggtggcaacagtgccggcatgctgaagcaggacgtgttcaactggcggaaggaactggctcagttcgaggcttaccgaggggaggcgtacaaggatgccgatggttatagtgtgggcctggggcattacctgggcagtggcaatgctggggcaggtactacagtcacgcctgagcaggccgcgcagtggttcgccgaagacaccgaccgcgcactcgaccagggtgtgaggttggccgacgagctgggcgttacgaacaatgcctctatcctgggcttggccggtatggccttccagatgggcgaggggcgtgcccggcagttccgtaacaccttccaggcgatcaaggatcgtaacaaggaagccttcgaggctggcgtacggaacagcaaatggtacacgcagacgcccaaccgggctgaggcattcatcaagcgcatggcgccccacttcgatacaccgagccaaatcggggtcgattggtacagcgccgcaacagcggagtaagacatggcacagcaattcaagggccgcatgacgcccaagtacccacttgaccaagcacagctcgacgaggcccaagtacagggccaactcgacgcagtgcctaccgtggggttcgacgccctgacgggtggcgagatcggagaacggaacgtggcagcgggccaacgagccaacgcgcgggaactggaacgcatcgtagcggaccaggaactgccggcccttgaccgtgcttccgcactctggaaccagtccaccctcgtcggacgctggggcgatgcgctccagctcgacgcggaccttgcggcgaacagcaccggcgaggtggaccccaacttcgacgccgggacctacggggtccaggcgctccaggcggcgggtatccagccgactgacaactatctccagatcatggcccgtgccggcaatgccgaggacgcggcctacctcctgtcgaggattcaacggtatgagcaggacgagcaaatcgtgcgggacaacccgtactggaacttcgcggctggcatgctggaccccgccgctctggcagttgatgcggttactttcggcgctggccgtgctctgcggctcggtcgtgctggcatggctgctgctggcggcgctgggcaagtcgggtatgttgctgggctggatgccgcaggggccgacgtggatgccggaacctacatcgtggcaggtgctcttggcgctggcgtgggtgctctgctggggtctggtgcgggacgcattgccgcagaggccccaacgcaaccgcatgtgcccgaagtatcggcgcctactgtcgggctgccagaagtagccatgaccgccgaggaggccgccgcacgcggcttcaaggccggtgacgtggtagacctgctggacgagggcaccgtgctgtcccgtgtcagctcccgtgtggagcaggccgagataccggccatcccgcgccgtgacactgccttcggcgacgagctgcacagcctgtcgggccggaagctgtccgaggtcctggaccacctcaagacccacgcagaggttcccaagccgctccagggcatcgccgccaaggtggctgataccatcaggaccctggagggcctgggccagcgaaccgcgttccgagtggtgcagggtggcgacactgccagctccgcattccttaagccgggcacggcgggcatccactccacccagggcctcgacaccttggtccaggtacgcggcagcaccgcacctggtcgagttggcaccaacccggtgaccgtgctccacgaggcggtccacgctgccaccgtaggcgtgatgaacgccgccctgcgcaaccctggcgcgatgagtccgaaggtggctcaggccatgcagaccctggagaacgtccggggtaacgtgctcaacgccctgaagcaggaccgcgccgccggtcggcaactgtccgagttcgaagagacgctgctggccggcaactccaacaccctggcaaacgtcaaggagctggtggcctggggcctgacggatacccgcttccagcggaccctgaatcgcctccgctacagcgacggcgggccgggcctgtggacccgtttcgtggagggcatccgtagcctcctgggcctccggtctgatgccgacacggccctgagtcgcgtcctggccgcctctgagacgatcatggacgccatgccggggtacactaaggctcaggctaagtgggccaacaagggcgctccggtgaccgaggaggccagcctggagaccatcgtgcggaccaccagggagcgtgcccgcgagggtgcgggcttcgtgaaccggttcttcagcgaggcggacctactggcacagcccggagagggcgcacggcgcctcctgagccgtcttatcgacgaccctgtacgtcgggatgggttcagcacgaacgacaacgcagcgagctatttgcgccgttaccggaacgagttcgagggctacgtgaagtcctacgacgagatgatggccaaggcaatggctgagcagggcgtgggcctgacggcacgtgcgctgaactcccgccgcgccatggcagtccgggaccagcttaacgagcaggtcacccgcgagctgctgcgccgggaccgggagtggaccgcctacggcagcgtccgcgtagaccccaacctgccgccgaccatcaaggccctggccgaccgctcggacgagattcacggtctgatgggtcagcgtgccagggaagccggggtccggggcttcgaggacttcgctccgcgtcccggatacttccaccgctcgtggaactggtccaagatggcgcagatggatgaggccgcccctggcctggcccggcgtgctatcagcgaggccgtgttccggggcatccctgggctggagcgtgccgacgccgacaccatcgcacaggccattgtgcagcgggcacgggaccgggctaccggtatccgctccgagttcatgggcgcgatgggcgtggcggacacggcattcatccggcaggcgctggaggaggccaacgtgtcccaggccaagttcgacagcatcatggccaagatcgagcagaagcagtccgaccagggcaccgtcaaatacggcaagggccggctgtcgctggacatgaccgccgagatcaaccacaatggaaccgtgtaccgcgtgcaggacctgatcgaccgggacctagaccgcctgatggagaactacgccggcagtatgtcgggccgctcggcactggcccgcgcaggcatgcccggcgactccgaggtggaagccttcatccgtgagtaccagcgggaggccgcgcacctgggcaccgacaaggtgcaggagctgacgggccaactgcggggcgtcttcggggacttcaccggcaacgtgccgcgagagcatcagctcggccccgtcgcacagcgggccagcgggctgaccagcgccaccatgctgggattctccggcgtgtaccagcttgctgagctggccacgatggctcaccgccagggcgtcttcaacgtaatgaaggccatgctgaactcccgcctgggtgacttcgtaggtgccatgcgtcgagacccggacctcgctgatgagatgcagaccgtcctcggcctgaacctcgccaacgacattcggatgaagccctggaagcggcagttcgacaccttcctggccagccaagacaccttcatggatcgcttcctccacgcgggtaagcaggctgtcccggtgctcaacggcatgaagttcatccacaactggcaatcccgcatgaacgccaacctcaccttgaacaaggtggcgcgggcggcgcagggggatgaagcagcccttcgcgtgcttcagcagtacgggaaggacgtggactggacgccagtcctggcgcgggttcgcggttatgtcacatacagaggaaggaacgcccaatccatgaattggggcgcctggagccaagcagacgtgaacaccgtcatgaacaccgcattgcggatcatggacgactcactgctgtacggtcgagtcggtcagaactcgggctttgcccggtcacctgtcggccaaatcctggggcagttccgcagctttgtggccttcgcgcacaacaagctcctccggggaacctatgagaactccggcgtgcttggcgtggcctcgctcctcgcattccagtatccgctcaccgcgctgatgatgggtgccaaggcagcgatcaacggcaagttcgacacctctgatgaaggcatccgcaagatggccatcgacggcatcggttacactgccggcctcggcttcaccgccgacatgtggggcgtgatcaccggacactctaggatgtccgccccggtcttcggactggcggagcactccaacgaggtgttccgtggcgtcaaggacctagtaaccggcgacgaccccgcagccgccaccggcgatatcgtcaacggcgccgcaggggcactgcctttcgtcaacgtattcccggcgaccaagttgctgctggaatccatcaaaggggaataacgtggctcggttcaagaatcccgagaccatccacgttgcagatggggtcgaggctgtcttcagtctcgacttcccattcctgcggcgtgaggacgtattcgtccaggtcgataagatactcaccaccgactatacgtgggtggacaacaccaacattcaattggccgtggtgccgaagcagggccaagaggtccgcatcttccgcgacacgcctgcccaggtcccggacactcagttcagccagggcatcccattcctgccgcgctacatcgacgcgaacaacaagcagctcctgtacgctgtgcaggagggcatcaacaccgcgaacctcgccctggatggcgtactcgacgcgatccgtatcgccgaggaagctcgccgcctggcacaggaagcactcgacgccgccaatgaggcgctgcgccgtgccctgggcttcgctgagattcgcaccgtgaccgaggactcggacatcgatccgagctggcgtggttactggaaccgctgcatcaccgctgacaaacccctgaccttgaccatgcagatggaagacccggatgcaccctggatcgagttcagcgaggtccacttcgagcaggcaggcgtgcgcgacctcaacatcgtggccggccccggcgtgaccatcaaccggttgcagaacaccaccatgcagctctacggcgagaatggcgtgtgtaccctcaagcggctgggcgctaaccactggatcgtgttcggagccatggaggacgaataatgcgcggcattatcgcgggcatcatggcctcccaaatccggcgtccaaaaccaatcctggcgacgtacccgtatcccatcctagctacagacgacgcatggtcctgccggcccaacatagtggcggcgctgacacgcgacactctgcacgaggttgtgaaccagccaggagaggacacctaccacgcgacctccagcgtggtaagcgtactgctgcggtcgctgactcagctcggctacggcggtggcgatgggttcctgaccggacctgccgtcaatgcagccttgctgcgcgatacggtgaaggaatataccgcagagccttacgcattcctgtcgcagaccgcagtggccggcgcagaactgaaggttgtggttgtatactccgagtatatcgtggagccgtacgccttcgccacctcgacagcaattaaacaggcggaactgaccaatgtttgagacacgagttaagggtcgctacaccgtgacccatctgaaagccacgggtgaagtcctggcacagtacaccttcgacaacctcatcactaacgcgggtctcgactggatttgcgccatggacacctcagacctgttctcacaggccctggccgtgagtaccagcacagcagaccccaaccccgctgcaccctccctgccggaggaagtacgacggaccacctcgtacgccccgaacggggatgttacctcgggtctggatggggagtggatttactggcacaagcggtggcgcttcccgataggcacccttaccggacaggtactggccaccgtgggcatcgtggcccaatccgaagttgggttcgagagtaacaccggcgcgaagattccggcagggactccactgtcctacacccggatcaaggatgccgccggccaacccaccaccctggtggttcaggccgacgagattctcgacgtgcagtatgagctgcgcagcaaggctgtggcgatggccgaggccaagttcgtgatctctggagtcgagcgtaccatccgccttactccgctgcccttcgcgaaccggcgtaacctctacggtgagcgctacatcttctacaacgagagtcctcggattgacggtaagaatgcgtccggctcggatgtccaggatggccagtgggtgaagctgtacccgcgatatacgcggggcacctacaaggggcagctaatgctgcgggccaccgttgctaacggcaacatgccgggaggcatcaccggctgcaaggacctgaagatttacaacggtcggaactacgcactcaccatcgacccgcctgtagtcaagaacaacacgcaggaattctccatcacgatggagttctcggtagcgagggcataacccatggcactgatctacgacttcaacctggacctcgatccgaaggctaagtccaagttcgtaggtgcgcgaggccgtagggacatcagcgacgtgctagacttctgcgacgggggcgtggccatccaggacccgtcgcagggtatgatggtccgcgtgtggcgaacagagcttcgccaggacgggacctacctggggcacgaggacggctcgaacgagattcgcatcggcggaggtatcgaagaaggtatctccacgatgtccctcgacttcgacagtaacatgaactacgtgtgtgctttcgtacgagccgatcgaactggtgcaatctcctacttcaacgtgcagcagggccgccggctcctcgtggagcttgggcaggttgactatgccaaggtggccttggacgataagcgtcctggagctactgcctgggcacaggtcatcgtaccttacacccgtaacggcaacctgtacgtccgcacacagaacgagaactatacggtagagcacctggaggtggataccggcaaggtattccgaccgctggtcaaatgcggtatgggcaccaacctccgcttccaagtccaattcagagggcacatgtaatgagcaaaaagcagaccgcgagtgctgagcggctgggcctgctacacgagctggtctgcaccgctatcgagcgcaacttcaagtggtacatggacaacgacatcccgatccccgcatcggatatcgctgccgccaccaagttcctcaaggacaacgagatcacctgtgatccgtccgacaccatcaacatcgaccggctccgcgaggagatgcggcaggcgcaggccgagaaccgccgcattgccttggagggcttcatcgccggtgagaccgacgacgagatggaacgcctgtacacccactaaggaggcagcatgacgccgcaagaacgattccagatagcccacgaagtgcgggacatgtacccgcgcttccgggacttctgcctggacgccatgctgttcctcggcttcaagatgacgtggatgcagctcgacatcgccgacttcatgcaggattcgcccaacaaggcgatggtcgctgcgcagcgtggcgaggccaagtccaccatcgcctgtatctttgtggtgtggtgcatcgtccagaacccggctacccgcgccatgctggtatccggctctggtgacaaggctgaagagaacggccagttgatcacgaagctgatcatgcactgggacctgctggcgtacctgcgccccgaggcccgaatgggtgaccgtacctcggccaccagcttcgacgtgaactgggcgttgaagggcgtcgagaaatcggcctccatcaactgcatcgggatcaccgccgccctccagggttaccgtgctgacatcctaatccctgacgacatcgagaccacgaagaacggcctcaccgccaccgagcgggccaagctgacgcggcagtcgcaggagttcacctctatctgcacccacgggaagattctgtacctgggcacgccgcagagtcgcgagtcgatctacaacggcctgcccgcacggggcttcctgctgcgcatctggccgggccggttcccgaccctggaagagcaagagcgctacggcgactggctcgcaccctccatcctggcacgtatcgcccgcctggaggagaaaggccacaacccgcgcaccggcaagggcctggacggcacccgtggctggccggcggaccctcagcgctacaacgaagaagacctgatcgacaaggaactcgaccaaggccccgagggcttccagcttcagtacatgctggacaccagcctcgccgacgagcagcgtatgcagctcaagctgcgcgacctgctgttcatcgacgccacgcatgagagcgtacccgagcaagtggcctgggctgccgacgagcgcttcaagctcaagttcgacgcccaccgattcccggtcatcaagcctgagctgtacctgccggcgctgatggctggcggctgggcaccgctccagcagatgacgatgttcgtggaccctgccggcgatggtggcgacgagctgtcgtatgcagtaggcggaactctcggcccgtacatccacgtcgtgagcatcggcggctggaagggtggatttgccgaggagaacctggagaaatgtattgccctggctgcgcgttacggcgtcaaggtgatctatgtcgagaaaaacctcggcgcgggtgcagttggccagctcttccgcaaccatatgcgatccatcgacccggacaccaacaagccccgctatgaggggatcggcgtagaagaccgccagaagtccggccaaaaggaacgtcgcatcatcgacaccctgcggcccatcatgcagcggcaccgtctgatcttccacgtctcggcgatggattccgaccacgtgtcctgccagcaatacccagcggacaagcgcaacgagcgctccgtgttccaccagattcacaacatcaccaccgaccgaggctcactgccgaaggacgaccggatcgatgcccttgagggccttgtccgcgagctagcacccacgctcgtaaaggacgacgaagccgcaacccgcgctcgtgaagaggctgccaagaaggaatggctgaacaacccgatgggttacactaagtctgtccttcggtctctcggcatgggccgggagcgtcgcaagggccgcccaaaaggacgaagactatgatgctcgataccgccaccgaggcgggcaaaggcaccctcgccgtcaccggcgtggggattgccgtttactcgccctatgagatcgccagcctctgtgctgcggtactcaccgcgctctacgtgggcgctcagctcatcaccctactcccgaagatgctcgatagcatcgcggagcttcgccggaggttcaagaagtgaacaagcccctgcgcggcgcagcccttgcggctgccctcgccggccttgtcgccctggaaggcagcgagaccaccgcctaccgggacatcgccggcgtacccaccatctgctctggcaccactgccggggtcaagatgggcgacaaagccacaccggagcagtgctaccagatgacgctcaaggactaccagcgcttcgagcgcattgtcctggacgccatcaaggtgccgctgaacgtcaacgagcaaaccgccctgacgttcttctgctacaacgtgggtccagtctgtacaaccagcacagcgttcaagcgcttcaaccaaggccgcgccaccgagggctgccaagccctggctatgtggaacaaggtcacgatcaacgaccagagggtcgtatccaagggcctcgtgaatcgccgcaacgcggagatcaagcaatgcctcgaaccatcgtcgcaatactcgtccttgctgtggtagccctgggagcctcatacggcttcgtccagagctaccgagccttgggtatagcccaggaggagatcaagcgtcagacggcccgtgcggaggccctggaggtgcgttacaccaccttacagcgccacgtccaggaggtcgccgccaagaccaacacccagcgccaggaggtggaccgtgccctggaccagaaccgcccgtgggctgaccggcctgtgcctgctactgtcgttgacagcctgtgcaaccgccccggcgcccgctgtgctgtgcgaacaccctctgattgaccctaccacccaggctggcctaatccgcgctgtagcggcctatcaggacgccctggacctatgcaacgccctgaatcaaggagactgacatggcgaacacccgtgatcaatacctcgctggccgtaacaccggcctgaccttctaccaggtctgccagcccggcaccgacaaccgcatcgccctgcacgacatggacgaggccgatgtcaaggctaaggccaccgctgtgattgcagcagcctctgccctgggcggcgagggtggcgctactccaccggacccgctcaccgcctacaaggtgaagaacggtgacaccctgcccgtggacggcggtggctccgtgaaggtgaccgtagccaacggtgccatcaccaaggtcgtgtacaccgcaccggcgggctgagctacagcccgtccaacctgatccacccataacacaaggaactgaaccatggcaaccttcgccgctgcaactcagaaagacctccgcgccttcgccggcaccatcgagaacctgatccgtccgctggaggaagcggccctgggttctggctacaacgagaccaagctgcgcgctgaactggtcgcgcacctcgacgagctgatggctgctgtcgagactgccaaggcgctggtctacaagtgatcgacgagtagctcaagccgagcacctgcacagtcgggtgctccactggaactactggaatttttattgagggctggctgtgggtgggagttggtagtggtgggcgggagtagttactccgggtctaattttggtatcgtcgtgtgagaaccctcccgactctgatcagcccacccttcccccgtaggccctccgcctggtgggccactgcctcgcattgcctgggtgttgcctgggtcatccctgggagcttccagctacgctgggtggtggtgggcttccctgccctgtcgctgtcctgtcgccgcccattctacgcatcctggcgggagtgtcaacccctgggtggtcggtgccttgctcggctacgctccagcgcttccgcgtggtcggctaggcggttggctcgccagcgcttcgcccactctacacctcgctccacctcggaccacttgtccgccagcatcatgcgctgccatgccgcgtcctgctgtagccatgccctgctggctctgtcctgtctgctcagcatcctctgtctcctctgtctggctccctggggcttccctggggcgctgctgtggtcctgtcgggtgatggtg

SEQ ID NO: 53 - DNA, 44383 bp, synthetic construct
  source 1..44383: mol_type = other DNA
tctaattttggtatcgtcgtgtgagaaccctcccgactctgatcagcccacccttcccccgtaggccctccgcctggtgggccactgcctcgcattgcctgggtgttgcctgggtcatccctgggagcttccagctacgctgggtggtggtgggcttccctgccctgtcgctgtcctgtcgccgcccattctacgcatcctggcgggagtgtcaacccctgggtggtcggtgccttgctcggctacgctccagcgcttccgcgtggtcggctaggcggttggctcgccagcgcttcgcccactctacacctcgctccacctcggaccacttgtccgccagcatcatgcgctgccatgccgcgtcctgctgtagccatgccctgctggctctgtcctgtctgctcagcatcctctgtctcctctgtctggctccctggggcttccctggggcgctgctgtggtcctgtcgggtgatggtgcgggagtggctggccttgcctcttgtgcctctgtacctgtggcattgccctggctctacctggctgctccctgggtattccctggggctgcctgggtggccctggccactccctctaggccacgtactctactcgcctccacctgtcctgtctagtcctgctctgctccctggagcttccctggatgctacctgggtgctggtctatctccctggctctgcctggcgctgtgctgtgctaccgctggtcctgctgtcttgcctcgccgctccctcgcctgctcggtcgcacctgcggcgctgatggactcctgtttgtccattgtgtgtgacataaccgcagccttagtgccatgcgggttccagggcgatgggtctggctggttggctgctccctgggtgggggctgtcgctccctggtaacgcaaatcctggctagctagactaagcctcgcgcatggggtctctatacgcgtgggaaggctccagggagcgcctggggaggggttgacacgttggcggtaggtctgtagagttcgccctgtcttcacgcaataccgccttcacaggcagcctggagacagggttgacacactacccgggcatcggtagagtacgcagccagaacgacgggagattgcaaccttccaagcgcggcacaagccataggcgcaagggacacggcaagctcttagggcaggaaccgcagtgtgtaaggccggcaggcatcactggggggattgacaaggtaatagatgcggtaagatgtgcggcgtcaagtggtcccgatgtacacactgtgaagggattacggcgcggtcagacagatgaccggcaccgcttgacactgtaaagctcagtcggtacgatgggcacccatagcggacgtgatggtccggggcgatgcggataggacgccttgtttataacctgaccgcaaagctgtgactccagccgataggactgacccaccacgtaaatacagacgggttgacacgacaaggccaagtcgataacatggccgccacaaagggaagcgatagcttcctggcggtagaggttcgaagcttcaccagcggtacatggactggtgcggtaggttgaccgaagctgcaactggttaggcagggtcccagggaatacctgtcgggtgctgaagactcacccaaaagagtctgagcgggaagcctccccgtccacggttaagcaaaggcacgttagtgccggtgggaacgaatagagtgtcagtgggatcgagaactagaaacctcggttaatcgcgactgacagtatgctgggtagtatcggtgggccgattgaacaaggccaggcagatagcgcaaagggtacgggggatgagtgaagacgatcccgaagagtatgcgcaggacaagccagaaccgctgatactacagggactatgccaatgccaaggtttgtcccttgaggcccttccaccgaggggattcaagagacagacctagttgaggaatgccgatggcacacttcaaggctaaggctcccaagtcgcccttcgctacccaggtagcgtactggcgggattgggaagccaaacgtactaagctcatcgcacaggataacgtcgaggggcgcaaagagcttcgcaagatgcgtgacgtgcgctacgctaccgacccggagccagcgccaggacgctaccataaccctgaacagaaagcgttcgtgaagggtagcgaaggcaaggcgcggaacatcctgaagggatggaacgctaagaagtcgcaagggaagggtttgtaatgccacgtgtgaatgaactgacgccgcgtcaacgcaaggccgccaaggctcgccgcgacaaggcacgccggattgatctagcgcacaagatgccgaaaggcgccgactgcccgatcttccgcaaggctgaacaggcgcaagctaagcagccccgcgtcgataccctgaccactccccgcagtgccggctacctggccgccgctgcttacctgaacaaatccatctgaggtacataccatgaccaacgcaatctccaaaaccgtaatcgcattccgtggcaccgaagagatcaatcgcgctatcgacgccatccgtgtccgtggcaaggaactcgacgaagccatccaactgaccggcctgtcgatcatccatcacatcgaccagtgtggtgacgtgaccgtggtcaaggcgctgtatgaagccatgccgaagggcagccgccgcaatgcgctggtcgagtggctggtgctgcacggcaaggtacaggtgaataccgacaagaagtcgaacaaggacctgcccttcctgtacaacaagttcggcaagaccgatctcgtaggcgccaccgacaacccgtggtacagcttcaagcctgagaaagcgctggaccaggagtttaacctggccgctgccctggccacgatcaaaaagcaggtgctccaggctcagaccaagggcaaggtgatcgtcggcatggaactgctgggtgatctggaagcgctggccgccaaggctgcacccatcgccgagcagagcaagcgcgctgccgcccattgactcaagtcgaacgcctgctaagcgggcgttccgctggaatcaatgacaactggagaaacacgatgagctttaagcaacgtctgcaacgtcaaatcgccctggcccaatacagccgcccggctcagttcccgtacggcgagcaggccgtccaggcgaagggagagtgaccatggacttctggattgccctccccttcctcgaactcggcctcaacctcggcgaggatgaactgcgcatgttgtggttcagcggcctgacggtattcttcatccacctcctgaagcggtgactcaagtcatggccctggcgggcgaccctcgcctactccggggccatcgctggactcatcacaagcgagaactaaaccatgcaagctttgaatactctgttgatcgcaatccccaaggacccgtcgaacgcattcaatgcagccgacaaggtgctgtgcgcccatggcttccgtatgggtgacctgaataccgcgcacgtgctgacccctggcgggttcgtagtagtgggcgccggcgtgaccgtcaaccgctacgacgaagcgtatcgtatgagccggaacctcgattccgaaggcttcgacgttctgctggtccagggcagtccactgtccgggcacgtcacctgccaggcgtacggctggatcaatgcggaataccgcaagggctgcgcgaacgggcgcccgatcttcgacattgcaggaacctcgtaccatgtcctcgcgtgatccctaccgtatcggccaccgcgtggggctggtgaactacagcgaccgctacctaggtgccgacgcggcaggcaccaagggcgtcattgaagccataacccgaccgtcccgctgtatgacgatctatcacgtacgctgtgagcggaccctgcgcttgatcgaggccgaggcccgtaacgtgcgattcatcagacagctaccgacccgcaaatgacgtggcgcataatcgtcgtcagcccatcaagcggctgcgccttcgtgtggagtctcaagcggcctgtgcggccagtgcgattctactcccgcaaggcagctaaacgctggctccgcaagcaccgccgacagggcttgcctggccactactacctcatcgtgaactggagcaaacgcctatgaatcctacttacgtcgtccgcctcaaggacggaaccacccgccaggtagtcgccgacagcatcgtcaccggccacgccttcgtcgaactctggttcctcggcggggcggtcgctatctacccggcctgcgaagtacaggaggtccaccgcactgacctcgtaaaggagggtggtgatgaatacccgcactgtatacgtcaagccgcacagttcgaggtgcccgccggtattgtccgcaggacgcctgaccccgggtgaactctaccacgtgatcgcacctgccgaggtcgaaggcgtcattgtgctggcaacttcaggcccgtggcacatccggtccgtggtggtgcatagcatgcacccctcggtatatcccgtagggatggctgtcactgacgattcctggcggttccgccgcctgggtgtgagcgagtacgtccaactaattcaagggtacgaacaatgatcgccatcctgttcgtactcggtctgtactgctgcctcggcctgctggcaggcgcctgctactgcatcgcagtggccccgccattcgagaacccgacggaagtgcagttccaggacgcatgcgtgatcgggtgcatctggccactcgtgatcctcgtcggcatattcctggcactccgtgcagtaggccggggcctgctgaccgggctgaagcgtcacctgaacatccaataacctaccggaggtaacatgatccgcacccatacccacaacaccgaccgcgaacagcgccgcatctacaagctcactgagctgacgtcgggtgagatgtacagtgtagtgcagcccgagtccaagcgtggcacgctggtggtcggagtagcaacctgggatagccagagccgacctgtagtgctgcccgtggtcattcacgatgtgggtgcgcatccctcgccctgtcccaccgtgctgcgcaacgacggctggcgcatggtgcttgccgccaagggcacccaggtaacactcaccgccgagtgaccaaggcgaaggctggtgcgccagccttccaccgtggccattccttgccgcgaaccaactcaaccgaggagctacaacatgaccaacgtcaacaccgccaccaccgagaccaccaccgctgctgccctgggcgccaagctcatcaagaagccggctaccgtggaagacttccgcaacaacgtggtcttccatcacaccgccctggccaagctgaccgaagtctacaacgaggcggtcgttgccctgcaaaccgccgagcgcctgtccagcctcgtcgccggtgacgtgatcaccttcgaccacggcaagggcgagaaagccgaagtgctgagcggcgaagtcatcagcgtggttgccggcgtttaccaggtgctggtccgcttcagcgacagcgcacctgccaagctgctggacgtgaaggccagcgccatccgcgccgtccagtcgtcggcagcccaggctgctaccctcgacgaagccatcgcccagggcgagtaaggcccgcacgtaataggcccggccctccgggcctattgcgagctagccataccataggaggagtcaccatgagcaagcgtaaccccgagcacatcagcggcgccgtgcgtagcgtcagcgtccagaagtcggcagccgtccaggaactggaggatcgtctggagtctgccctggccgtgtgccagcagcgggcggaagacatcgatctgctgagccgccgtctccaggccgccgagcgcgcccgccgctgggagatcgacgagattcgcaaccaccaggcgaccatccgcctgttgcagaacgacctgaacgctgcgcatgatgcccacgaggcacaagagcgccgcgctcgcaaggcaaccatcatggcctgggtatgcctgctgaccgcaggtttggccgtcaccctgaaactggcaggagtctgaccatgcagtgcaacgacctttacactaagctcgcagcgagcatgttcaacgtgccgtgctcccaggtgaccgccgagatgcgccgcgtagccaagagccgggcattcgcgtatgcttacactcccaagcgacaggcgtcgggtgggacgtacaccgcccgcgtgagcggcgtcacctgtgacggtggcaaggtggaggtacgtctggacaacgtggagcgcgccgacacctgtggctatgccaagctggaggcgctggaagcggtcagcctgtaccagggtgccgcgaagcgcgccgatgagtatgaaaagctactgctccaggcattcccggtggtggctaagcgtcgtgagcgcttgcgtatctccgggccgctgtcggcggaagacttccgggcaaacctgctcgggacgtgttccgcatatcggaatgccctcgacgccatacggggcgagattacctcgaccggcccgttgcggaaccgcatatgggcgctggtcgaacgtatgcaccgggccgagacgaagctcaggaatgctcagtcggagatcaaccgcctgcgggagcaggaactggaccgcctccgcaaggacatgtccagctactgcgccaacgacgttacctctacggtgagtgcagcatccgcgaaggataccctacgggtggcaaccttcgccgccgccctcgccggtggcgtcgtaggtagcgccctgatgttcctgctcagctagggcgaccagggcctactccggggtcaaatctgagggcgttcctagagcgccctctcgtgtgagtctggaggatcacgaacatgcaataccatttcacgcattacaacggataccgcttcggcgtcgagctggaagacgaggctgtcttcccgtgcatcgacggtaagcgggcgacctgggacaaggtggcggcgtgtgccggtagccttgtgcattacatggcgcaggacctgattgacttcggccagcgcaagttaagggagatcgaagatgagcaagacgagcctgtacccgctgagcctgcatcccggcctgattcaaatcaggacgattcacgtattcagcattcaagctccgagcaacgccgagaactggtggcaatggttcctctggcagcggaagtaccacccgctccgggagagcctgagtccagccggggaactgagtgcgagtatcgccgagtgtgtccaccgcctccgccagagtggctggcaagatagcgacatctggcgcaagaagggaggcgtgctggccctcggtgccttcgacctgtccggcctgatggtgggttcctgcctcgtagtaggcggtgagctgaaggccctgtgcgttgatgaccggcacagcaggcagggtatcggcgctgagctggtacgagctgccgagctggccggtgctgagcacctgacctgcttcgagttcctggagccgttctacgccggcttgggctggcgcaccgagcgccgtgaggcaaactggactgaaggcgagccggatgtgctgtacatgagggcacctggccatgacgcatgaggtgatggtatggcttatcgcgaacaaaccgctggtcatcggagtcgccttcagcctggtggccctgggcgtgctgctcacacagaacaacggcggcccgcctatggcgcccgcatgacctggcacctccaggacatgttcgaggcccgaggtgggctgaggcccttgtgggaggagtggtatcaatggcactgcgccgcgactcctggctaaagcaagcgcaatccctggcagtcggccaggcgggtcgattccgccacgtcctgggatgccagagcatgagccggggcgggaccaacatgacctgcaagaacctgcctgaccgctgggtggcatactgctactcctgtcaggaaggtggcgtggtcgagaaaacgcacgtgcggagggtgcaatgcgcggatcaagaacgcttcatgccctggcccgaggatgcctcggactggacgcaagccgactgctatcaatcgctatatggtttgctgctgtccaagggcatcgactacaacgtgatgacgccggggctgccgctgctctacagcgaaaggcagcatcggcttatcttccctaccgacgcgggctggattgggcgcgctactgccgaccaaaatcccaagtgggtgggctacgggtatcctgccccggactaccatggatggccccaggaatcatcaatgggcaggccatgggtgctgacggaagactacttgtcggcgctgaaggtgcggtgggcatgtcccgaagtcttcgctgtcggtctgaacggtacaaggctgcgcgacaggctggcggcgatcatgttgcagcagacctgcaagcgcgccttcatcttcttggatggcgaccgggcaggtgtccgtggtagtgcaggcgtgatgcgccggctccggtccctgcttatcgaaggccaagtcataccaacgccggacgggttcgaccccaaggacctgacccgcgagcagataaggagcctagtaattggacgtattgacgcttcacgcactgagtgaccgggaccgcttccgcacgttgcggagtgtggtgcccgaaggaatgatggggccggagacgtgcttcgtcatcgactggatcgagcagtattggaaggtctacccggtgcatcagaaggtagacccgcaggcactgcgcgaactgatcaagctgcgaggtggctaccagccagagcaactagcggtggtcctgaacctcgtcaaccaactggacaagccggtggacccggactcgctacagggcgttgtgtcccagctcaacgaactggatttctcagggcgggtggatgccctcctggcgcagtacaaccagggcgaggacatcgacctggcgtatgagctgcgccggctgagcgacgaggccctgcgccgcgagggggtcagcacgccgaccgactacgtgacggacgacgtgtttgatatcctcgcggaggagcagggtgaccacggcatcaagctgccggggctggtgctgccggcgtacatgaagggcctccacgccggggcctcggtgctggtggcggcgccgcctgatgcgggcaagacctcgttcatggcctggatcgctgtccatatcgcgccgcagctcaagcggtacttcgacccggggcggcccatcctgtggctgaacaacgagggcaagggtcggcggatcaagccgcgcctgtactcggcagccttgggcatgaccgtgggcgagattcttgccctggacccggaggaagttcgcaggatgtacgccgagaaaatcggcggcgactctgagctgatccgcatcaaggacttccacggtgggtcgctggctcaggctgaacaggtcatcgacgcgatgaagccagcggtggtgttttgggacatgatggcccacgtcaagggcggccagcgcaaggaccagaaccgtaccgacgagatggagtacaaggtggctgaggtccgcgagatggcggtacggcacgacttcatcagcttcatgacgtggcagattagcaacgacggccacgaccagttgttcccgccgcagtcctgcctcaaggattcgaagacagcggtacagggtgctgtggacgtgcaaatccacctgggccgtctcaacggcgcggatcaacaggtcatgcgtggcctgtccctgccgaagaacaagttccagatggacgggaagccttcgaacgtggaggcaatgattaacttcgacgccgcacggtgtcgtttctttgagagtgtggatcatgcaagctaagcatagccgggtgctcgaaggcaccaaagaaattccgctgggtagcatcgcactgttaccgggcaccgtcgcgggcctgctgctgtgcctgtactccgacgcaactcacgaggagggcgtcgccttggccggtgggttccctcgcgacttgctgcacggcgccactcccaaggacgtggatgttgccctgtacagcatgacctgggggcgggcagagcacctgatccagaaggcactcccggtcctgaaccccatcttcgtccgggatggtgggtggcgctcggactacgccgatggcggcgacggtggtatcttcaagggcgtgatgtccctcgtgggctgccgtgggttgaatggcatggacttggactttaactactacgacgccgacagcctcggtcgagtgatggagtcgttcgacttcaccatcaaccaggtaggcatcgcgtacaactggcccgaccccgaaggcggtccgcgcctgggtgcgtacctgcacaaggacgttacctggggcgtgaacagggaagtcggtaacggctcgcgactgccggagcgatgcgagaagatgcgggccaaggccgcgtattacggatgggagaacgtgtgatgagcaagcgcgacgtggtactggatatcgagaaaggcatctggcgcggcgtagaccagaacgacaaggccgtcgaggccatcatcaagaagcacgggtacgtgatcgtcgagcctaagatcgacgggtgccgtgccatcgtcggtgcgcatggcgtggtgtcccgaagcgggcgccgcttcccggccctggatagcttggaagaccgcatcatcgatcgactggcccgccccgggctggactccggcctggtgctggactgcgagatgtacctggccggcatgcccttcagcgaggcgactggccgcatgtcgcgcaagaccccactgaccgaggaagagctggggtgcctgcacttcgcggtgttcgacgccacccatatagacgtgctccgcaaggcgcgcacctcccacctggtatacgaagagcgccgcgccatggccagcagcctcctggcagcttgccgcctcagcgacactccgacgttcttccaggtaggctcgcaggtgtgtcggtcgatggaggaagtcttaggccggtactccctccaccgcgccatgggcttcgaagggtcgatggagaaagacccgagcatggtctaccgcaacggcaaggtcgccggctgctacaagcgcaagccggagatcaccgtagacgggcgcatcgtaggctacgtgccgggcaggaccggcaagaacgctggccgcatcgtgggctactatgtcgagttggaagacggctcgggcaccgtggccgccaccggtctgaccgaggagcacatcgagttcctgacccgtagccaatactactcgaccgtcaacgacacgatgccaaacttcggtcgcatcgtcgaggtctctgcgatggaacgctcggccaacaccctgcgccatcccagcttcagtcgcttccgcgaccttcccagcaatccaggagtcaaggtatgaagattcgaaagtcccgtaaccgcaactacccggaagatatggtgtaccacgccaccaaccgggattcactgctgtatccgaagtacgtcatgggttccgtgttcatcagccaggacggaacattccgcatctgcgtcatggcagggacctgggaccacgttgggtccgaagttctgcatcatgcacgggacatccaatcccttggcgccggtcgccgtaagttgcaccgggtcatgcgacggctgcgccgcaatctgcaacaggtaggagtcaaggtatgagaatgccaaccgaagaagaacgcacgatccgctgcctgctggcagatatccacgaacccttgaacctgctgttccccggtatccgtgtaaaggccgagacaatgcccttgggctggggagatagtatctgtgccctggtactccgggtgagctacgaacatcgcacgctgggtcgcctggagtacctgcacgaggtccccatcctgcacctgacgcagtggggccgggacggcatgctccagcacctgatgaacgagattccccgtcgggtgctggatggcatgctgcgccaggcacagaaatacagccagagcaactggtacagcaaatgacgactatccgaatcctcgacctcgaaaccgagagctacgagcacaaagggcgcaaagcgtcgccctttgacccccgcaactatatcgtcatggccggctggcgtgacgatgttgacggcaaggtcggccagaaggtggagcatcgcttccgcagccgggccgaagccgaagatccgaacaaccgctggttcaacctcgacggcgtggacgtgatcgtagcgcacaacgccatgttcgaatcgaactggttcttcacccgctaccgggacgagtacctggccttcctgcgacgtggtggccgggtctggtgtacccagcaggccgagtatctgctgagccatcagacgtggctgtacccggcactcgacgaactggccccgaagtacggcggcacccacaaggtggacggcatcaagctgctgtgggaccagggcgtgctcacctcggagatggaccaggacctgctgagcgagtacctgtccggcccgtgcggcgacatcgagaataccgccctcgtattctacggtcagttgatgaagctccaggcccgtggaatgtgggctggctacctggagcgctgcgaggccctgatcggtttctcggcgatggagtgcgccggcctgaaggtggacctcgaagtcgcccgggtgaaccacgccaagcaactggaagaggtggccgggatcgaggctgagctgaagaagctgatgcccgacttcccggaatacttcgagttcaagtataccagcctctaccatatgagcgcatggctctacggcggcgaggtgcggtacaagggccgggtgccctacgaagatggccggatggagaaagccgacttcgtgcgcttcggcacggccaagcgggggactcctatcgagagtacctcggtgcgggtcccgatccacgaagtgaccaaccagggtgagtggcactggcccaccatcaccgagctggcgaccaagcacggcccggtcatcacgttctccgccggcaagaacaagggcagcgtcaaggtgttccgtgaggatacggacatcccggcgaccaagtgggacgatgaccagcgattccgattccccgggctgatcaacctgaacaacctgccggaagtggtgcgcgagaaattcctaggcaagcgcccggagttccagtgcgccctcaccctggcggatggatcgcccgtgttcagcaccagcggcgacgccctccaggctctggagaaacagggcttcgaggcagccaagctgttgatgcgcctggccgagttgcacaaggacaactcctcgttctacatcacccacacctacaacaaggatgggacgatcaaggacacgaaggggatgcttcagtacgtggacgatgatggtatcatccaccactcgctgaatacgaccgcgacggccacgacccgactgtcgtccagccgcccgaacctccagcagctcccgtcaaaggacgaagacgacccggaagccggcagccgcgtgaaggagatgttcgtgtctcgcttcggcgcggacgggatgatcggcgagaccgactataccgccctggaggtggtgatgttggcggccctgtcgaaggaccggaacctcctggcgaagctgatggccggcacggacatgcacttgtaccgcctggcagggaagcacaacaactggaacgggttcgattacgaccagctcgtggccatcaagaaggaccccaaccatccgtggcacggtcgcatgatgcaggctcgaaagaacatcaagcccaaggcattctcggcgcagtacggtgcgagcgcggctggtatcgcattcaacaccggctgtaccgtggaagaggcccaggaattcctggacaacgaggcggccctgttccccgagtccatcgcattccggcagatcgtccgcgacagtgcagaggccaccagcctcgtgatgtacaaggccgaggaccagatgccggcgggcgccttcagcgagatggggtcggatggtaactggcgccagtaccgccgaggattctggcaagcgccgggaggcacctgctacagcttccgccaacaggaacgctgggacaaggaacagcgcaagacggtcatggacttcaaggacacgcagatcgccaactactggaaccagggcgaggctgggttcatgatgaccgtgagcgtggggcgcatcttccgttggatgctgcatcgcccgggattcatggtcaccgagttcctgatcaacaacgtacacgatgccgtgtacaccgactgccacaaggacaccgccgccgaggtcaacaagggcgtgcgcgacatcatggccgacgcggcccgctacatgagcgagcggctgggctacgacatcgccgacgttccattcccggcagtggctgagatggggccgaacatgttcaatatggaggtgatccagtgaaagaactgcatccgctgcacacgcccgagttcgtcaaaacattcctggaccagaccgggtgcctgcctggggtacgccgtacgggccgcaccaccggcattgctctacaggccatcggcatggcgctgtcccatccgagggaaaccctgacgttcgtggaccacccggacggcagctcggcagcactggtggccagcattgaaaccatactggcgaccctgggctaccggaacgtcctcgttcgacccacaacccgtgcggacgggcgcagcgtgaacatcgtcttcaagacgctgccgaacgcctgacgaccttccctactccggccttaaatcttccttcgacacaagagagaccacgtatgactcagcaactcaacgctctgcaagctgcactcgccctggccaacaaggctgccgagaccgcaaccatcgacatgtctgaaacctccaccggcggtggcggcggtcgaatcttcccggctggcaccgccatgggccgattctgcatctacatcgagctgggtgaccacgccaaggaattccagggcaagctcaagaacccggcgcctcaaatccgcctgggcttcgcactgtggggcgacgtgaacccgcaggccggtaatccgcagagccgcccggacgacctgttccacacctacgaggccgacggctcgatcaagcccggcctgttccgtaccttcgagatgaccctcggcaacaacgagaaatcgaagaccaagctcgccttcgacaagatgaactggagcgggcagcatacccacttcgctcagatgctcggccaggcgttcatcatcccgatcaagcgcaccaagatcaccaagggcaacaacgccggcaaggaacgcaacgacatcgattggggcggcatcatgaagccctacaatccggtcgatggcagcccgtacaacgtgccggaactgccgatggacctgttgcagtatttcttcttcgacgcgccgaccaaggagacctgggacgccctgcacatcgaaggcacctcggacaatggcaagtccaagaacttcctgcaagagaccattcgctcggccaccaacttccctggctcggccctgcacatcatgctgggcggcggcgacgatctgatcatcaagccgacgacccaggccgcaggcagcaacctgccggcagtgcccaacgtggccgccgatgcaggcgtagcagcagcccctgctgtcccggcagttccgcaggcagtgccgcagacggcccctagcgtgccccaggtggcgaatgtagctgcccctgtggtaggtactgccgaggcacagaacgtgctgcctgacgtaccgcaggtggctcaggtggcagctccggcggcggtcgaagtcccgtcggtcccggtagtgccggcagtaccgcaggtctaatgcgcctgccatcggaagagttcctggcaggactatccgcgcagttcgaccgcagcatggcaggcgggacgttggtgtgtgacgccgacggacccgcctacgtggctgcggccactgctaagaccttggacactgcactccggagattctggaagctcattttggagcagcagttcctagcgcactgcacggggacacgggttcacctcacggcagcaggtggggcgaaggcgtaccgggacacgtatccgaccatgaaaccctaccagggccagcgcaagggtaaggcaaagcccgcgctgctggagcctctgcgacgggccgtggcggacgtgcatgagcgcggcggcgcacccgaagggatcgatgtcatcctgcacacgttcttcgaggcggacgacggcatgatgatggacgcctacgccatgcaggacaaggccatcatccggtccgacgacaaagacctgcggatgacgatctacccgtattgggagatcgacacggcgtgtgtgagcaggatcgaaggcggcttcggctacctcaaggaggcatacacgccttccggccagttcaagctcaagggccacggacggaagttcttccttgcgcagtggctcggcggcgataccgctgacaacatccgagggatcgatcgattcaacgggaagctctgcgggatgaagacggccttcgatatcctccacccgatcacggacgaggatgaagccatcgacatgatcctggaggcgtacgccaagatcaagcaaaacccgctggcagaggccgaggtgctgtggatgcgccgaacgcctaccgacaacgcagcgcagtacctgttaagccgcgaccttcgtccggccttccgccagtggatcatcgagctggacgcctaccacgaggcgctgctccagaagcggagggagagtgactatgacgagtgagccgaaggtctaccagataccgcgcagccaacagcgcaccttcaccctgaagctgtgggccgagcagggcaagctatgcccgctctgcggtaagcccatcgatatcagcgtgaagggcgaggcggtgatggaccacgaccacgagacggggctggtgcggggcgtcctgcatcgatcctgtaacaccgcagaaggcaagatcacgaacgcggcgggttcctggggatgcaagtcgatgaagtacaccgacatcatcccctaccttcgtgccctcctgacgtacctggaggggccgaagcatccgctgatctaccccctgcacaagaccgacgaggagaaacacgaagcgaagctggccaagcgccggcaggcagccgccaaacgcaaggcggcgatggccgtcgcaaagcacaacgcgaggaacgtatgagcaaactccgcaagcaattcaccaatgagtacctgcgcaacgtctatgtcgagctgggtctcaagaagggcgccgagcatctgaccaggcattcgcgcttcggcgaagtgagccgccagtgcttccgcaactggtgcatcaagctgggcttccacgacagcaggacacgcggcacgtacgccaagaagggtgcgctgcactggctgggccgaaaggcggccgaggtagtgcgcaagttccctggcgccgtgggcaacgtggtcggccaagggccgaaggtgttgagcctggacatcgagacctcgcctatcgagggctgggtctggtcgctctggaagcagaacgtgggcctcaaccagatcaagcgggactggaccatcctgtcgttctgcgcgaagtggatgcacagcgacgaggtgatctacatggactgccagggcgaccccctggacgacatgcacctgctggtcgccctgcacaagctgttggacgaggccgacatcatcatcgtccagaacggcaagcgcttcgacgtgcccaagatcaacgcccggttcttcctgaacaagatgccgccgccacgaccgttcaaggtgatcgacaccttgatcatcgccaagcagcaattcgcgttcaccagccgcaagctggagtacatgacccacaaggcatgcaccatcaagaagcgcctccacggcaagttccccggattcgacctgtgggcagcctgcctccaggacaacccggaagcctgggaggagatgcgcctgtacaacatcgacgacgtacgatcgatggaggagctgtacatcctgatgcgcccgtggttcgtcggccatcccaacgtggccgtgtacttcaacgacgctgagccgactatccgatgcccgaagtgtggcgacacggatgtcaagcaagaaggctgggtgcatacgcagaccggcaagtacgagcactatcactgcggtggctgtggtggctggagccgagggcggtatacccgcaacacctcggaacagcgcaaggccctgctgagcaactaaggaggctatatgagcctggcgttctccgatccctacgaatctacgggcacccagcccggccagtaccgcaaaggcgcggccccggacgagcgaaaggccggcaagctcccgatgcacctggtggttgaaggcttcccgctgctaaagcgggagcttgcccgcatgatgcagtgggccgccgaggtcaagggctacaagccccacgactggaagaagatgtcggtgggcgagttcaaggccgcccaacaccggcacgaatcccaccgcctgctggacgggccgctggatgacgagtcgaacctgatgcacctcgtgcatgaggcattcaacgcaatggccgccgccgagcgtgccttgatggaccgggagaaaggcaatgagtaaaatctgttggtgtacccgaccgcacgagaccgacgaaggtgtacgtgtcatctgggccttcaacgagcggggcatcggggtaaactacgtcacggcgtacgtcacgccggcgatgatccaccacccggactggcgcgataccatcctcccggacatcctccaggagatggcggagcgcctggaccgcgaggttaagctggtggaattgcgctggttccgcgctgagattctgagctgcggggaatggcgtgactaccgagcaatgacgctggacggggcggtcagcctggccgaggccgagtggggtcccgaggatatcgggcgcgtaatcgaaagacgataggagacggaatggacctgatacagcagcagatcgcccacgaagaggcccttgtcggggcggcgcagaacgacgcccgcattgccttggaaaaggcgatagcccaagggtccatcgaccgcatcccgagggcacgcatcatgttgatgcggatgctccccatcgtgaccgaagcgatcttcgcccaccaggaagcgaaggcggcgggaccggcagcgaagctgcgacacctgctgcggatcatcgacgcccaggacctcgcggtcatggcgctacgggccgggctgtcgatgctcatcaactacccaacgatcaccgcgacgaagtattacacccatatgggcaagatgctctgccgcgagatcgaagtgcggttggccttcaaggtcaaccaaccctattacgaccggacgctggactacctcaagaccagcaggactcgcagcgtccggcacatccagaagacgatggacgcccttctggacgcggtactgcccgaggaggcacgtatcgacctgccggatggcgactacctgcgtctcggcaagttcatcggtgacccgctgatccaatgcggcctgttcgagccgaaccgcttcacaggccggggcggtacgagcgtccacctggagccgtcgccggaggccaaggagttcctgcaagacccgtcggcggcgatgacctggggaggcccaggccgtagcgtaatgctggcaccaccgagaccctggaacgactggtgcgatggcgggtactacagcgccaaggcgcagaagcatcacgtattggtgcgtcgtaccaaacaccagaccaagcgggcacgtcagatgcagctccgccacctgggccgggacaagatgcccaaggtatacgcggcggtcaacgcactgcaatcggtggcctacgagatcaaccacgacgtgtacgagatcatcgagcgcatcttcacttccggcggcggcgtgctgggtatcccgcagcgtacctacccggacaaacctgagttcccgctcggcgacgagtgggccaaggagaacgccagtgaacaagagctggaagccttcaaccgatggaagcgatccgtccaccgatggtacaccggggagcgggagcataccgccaagcttcgcgaatttgctgcactctaccgagttgttcgagagcatcatggcaaggcagtgtacttcccgatgcacgttgactcccgtggccgcatgtactattggggcacaccgaatccccaagggtccgacatcgccaaggcatgccttcagttccacgaaaagcgcgccctcggcaagcgcggcctgtactggctcaaggtccacgtcgccaactccctcggatgtgacaaggtgtacttcgacgaccgggcagcctgggtcgatgagcgatgggacgacttccagcgagcactcgacgaaggcccggagaactatccgaatctcttccccgaagacgagtcgcccctgtgcgccatcgccggtctgctggagctgcgggcggcctacgcatcaggccagccggagaattaccgaagtgggttcatcgtccatatggatgcaacctgctccggcctccagcactactcagccatcctccgagacgagatcggcggagcatacgtcaacctgttgccacctggacttgccaaagctgacatctactcccgagttctcggtctcgttgcagagtctctggcacgagacatcgagagtgctgaaggcgaggctcggggctacgctgtactgtgggataaggccggtcttgccaggagcctgacgaagaaaccctgcatgacgctggtgtacggaaccacgttcaagggtgttgtggaccactgcctggactacctggacgagtccggcctggagattcccgagggtatcccgtcataccgcctgggaagctacatggcaacgctcatactggacgcaattcgcgagacagtaccatcggcagtcttcgccatggaatggctccagcggctcgctaaggcccttcctgacgcatccaaggatttgcactggaccacgccactcggcatgcaggtcttccagtcctacccgaagaccgaggaggtccgggtgcggctgcgggccgaggctgtcgagtacgtcaccctgtacgaggccaaggacgagctggacccggtacgcaacgccaacggcatcgccccgaacttcgtccacgggctggatagcagccacctgggcctgacagccctggcatgcgcggcggagggaatcccgatccaggccatccacgacagcatgggcacctatgcggcagacgtggatcggatgcacgtccacatacgggagcagttcatcgccatgtacagtggcccctgtgtgctcgtagagctggcaaatcagcttggggtagaggctaccccgccccggaggggatcgttgaatctggaggctgtacgggactcctgggcgttcttctgctgaggtggattatgtcacccacataggagcaagtgcatccgtccaaggccctcgtagagggagcggggagagaggagaggtcagggaagacctggtagaggagaggtggagatgagaatggatgactacgaaggattctagatagaatagactaaccagcataggagatatgatagatggctactatgaagacccaccgccctacggttatgtcacccacagtggaaggatcgagaacaggcaagggtacggcccgtcctgtcacgttcacctctcagcagatcgagtggttagaacagaccttccccgaacatcagatcggtcctggaaccacgatggaagacatccagttccaggccggcaggcgagacgttgtgcgagcagtacgactgcgccgacgtgatgccatcgcagtggagctgaagtgatgagtaagtccatctggcgagtacacgcaaaggccggcactccctcggaactccagggcctgtgctggctggcaatacaggagctggaggagttcaccctcttccgctcgaaggacgacgccctgaatgcgatgctggacagtatcgagggcaacgatcgaaccgagctgttggtattccgcgatggtcagttggccggcggtgcctgcatcgtgttcgaggacgacccccacgtcggcccgtgcgtcacagcacagtggcagtacgtcctaccgcgctaccgcaatacaggcgtggtccgggagttcatccgcgaactccaccgtcaggccggctggggtcaaatccccctcgtgtgctggagccatcgtgaaagcgatagccggtacacgatccactaccggagagccaagccttatgggcaagaaagtcaagaaggtgctaggcaagaccatcatcggcaaactcgctgatggcctgctgggcaccgaccttagcggcgcacaatccgatgcccgcaagatggaagagcagaaccgcctaatgcagcagcaggcggaccagctcgcacgaaaccagcaggttgacctcaccgccgagaacgtggcgcaggttgacctaggagcgatggccgatgccactggcaccggcactcgacgacgccggaatcaggcgggcacaggcgtatcgcaaaccctcggtatcaactactgacgaggtacgccatgaaaaccaccgcagctatgctgtgggagaaacttcgggatgggagcgtggagagtcgagccatcgagttcgccaagaccacgctgccctacctgatggtcgatcccatgtccggcagtcggggagtcgtagagcatgacttccagtccgccggcgccctcctggtgaacaacctcgccgccaagctggcgagatcgctgttccccacggggattccgttcttccgatccgaactcactgatgcgatccgccgcgaggccgacagccgggacacagacattaccgaagtgaccgctgccttggctcgggtggatcgcaaagcaacacagcgcctgttccagaacgcctccctggcggtcctgacgcaggtgatcaagctactgatcgtgactggcaatgctctgctgtaccgagacagcgccgccgctacggtggtcgcatggtcgctccgctcttacgcggtgcgccgggatgcgactggccgctggatggatatcgtcctcaagcagcgctacaagtccaaggacctggatgaagagtacaagcaggacctgatgcgcgcaggccgcaacctgtccggttcgggcagcgtggacctgtacacccacgtacagcgcaagaagggcacggcgatggaatacgccgagctgtaccacgagatcgacggcgtgcgtgtgggcaaggagggccgctggcctatccacctgtgcccgtacatcgtgccgacctggaacctcgcccctggcgagcactacggtcgcggccacgtcgaggactacatcggcgacttcgccaagctgtccctgctgagtgagaaactcggcctgtacgagctggagtcgctggaggtcctgaacctcgtggacgaggccaagggtgcggtagtcgatgactaccaagacgccgagatgggcgattacgtgccaggcggtgcggaagccgtccgtgcttacgagcgtggcgactacaacaagatggctgctatccagcagagcttgcaagccgtggtcgtccgcctgaaccaggcgttcatgtacggtgccaaccagcgcgacgccgagcgcgtcactgccgaggaagtccgcatcactgcggaggaggcggagaacacgctgggcggtacttactcgctcctggccgagaaccttcagtcgccgctggcgtacgtctgcctgtccgaggtggacgatgcgctcctccagggcttgatcaccaagcagcacaagccggctatcgagacgggccttcccgccctgtcccgctccgccgctgtgcagagcatgctcaacgcttcccaggtcatcgctggcctggccccgattgctcagctcgatccccgcatctcgctaccgaagatgatggatacgatttgggcagccttcagtgtcgatacctcgcagttctacaagagcgaggcggagctacaggccgaggcagaacagcagcgccagcaggccgcacaggcccaggcagcgcaggaaaccttgctggaaggcgcttccgacatgaccaacgcactcgcaggagtctgatagatgacccaaccgaacgaacagcaactgccgccgggcctcgctaacctggttgccaacgtaccgcctgccgccgcaccgaccccgagtcatgtgcaggtgatgccgaacccggtgatccaaccgcaggccccggtccagcccggccaggtaggtgcgccgcagcaactggccatcccgacccagcagccgcaacccgttccgaccagcgccatgacgccgcactaccaaccggtagcggcacctgccgtgggtcaacccgttgttccgcaagcacccgctcagccggccccggtagctccgccggctgcgggtgcagttcttcccgagaacctggaagtcccgccgccgccggccttcactcccaacggggagatcgtgggcaccttggcagggaacctcgaaggcgacccgcagttggcgccctccatcagctatctggaggcgttctctgacaaactggataccgtccgagccttcggcaaggccgccgagaaccgcgatcctcggttcatcgacgagcactatctgaaggaagttctcggcccggcccaggcgcagcacgtcatcaacgtggccaagggcgtcctgacctatgtcgatgcgcaaaccaaggctgtcctgaaccagacctatgccgccgtcggtggcgaggccgtgctgaagcaggccgcaggcgtcttcaaccaacacgctgacccggccaccaaggccgccatcggtcggctgatggactctggcgatgcccaggccatgcagtacgcagcgaagcagatcattgccttcgcacaaggctccggtgccgttgtacaggctaccggccaacccctgggtgctgcggcacctgcactagcagccctgaccgctgagcagtaccgcgcagaagtgtcgaagctgccgctgaacgcatccgaagccgacatggctgcactgcgagagcgccgtaaggcaggcatggcgcagggtatctaacgaccctgccctactccggccttaaactcacatccaaaagagagagaatcgcatgagctttctgaacgacctgacccgtccgaactacgctggcaaggacgcggacgttgacatccacctggaagagcacctcggcatcgtcgacaagcacttcgcctacacctccaagttcgcaccgctgatgaacatccgcgacctgcgtggctcgaacgtggtccgcctggatcgcctgggtaacgtcaaggtcaagggtcgtcgcgccggtgaagagctggagcgcagccgagtcgtgaacgacaagtggaacctgaccgttgacaccctgctgtacctccgccaccagttcgaccaccaggacgagtggacccaatccttcgacatgcgcaaggaagtcgccgagctggacggccaggaactggctcgcaagttcgaccaagcctgcctgatccaggtgatcaaggctgccgcgatggacgcaccggtggacctggaagacgccttctcgccgggcgtgctggagaagctggacctgaccggcctgaccgccaagcaggctgccgagaagatcgtccgcatgcaccgccgcgtagtcgagaccttcatcgaccgcgacctgggcgatgcggtctactccgagggcctgaccccgatgtcgccacgtgtgttcagcctgctgctggaacacgacaagctgatgaacgtcgagtaccaggcaaccggcgcgaccaacgattacgtgaagtcgcgtgtggccgtcctcaacggcgtcaaggtgctggagactccgcgcttcgccaccgacgcaaacgcagcgcatccgctgggccgccacttcaacgtgagcgccgaggaggctgagcgtcagatcgccctgttcctcccgagcaagaccctgatcaccgcccaggtggcgccggttcaggccaagctgtgggaagaccacgataagttctcgtgggttctggataccttccagatgtacaacatcggtgcccgtcgcccggacaccgctggtgccatcgagctgaagggtatcggcgccttcgacatcaccgcgtgacggctaaggatttaaggtaaggaggtttatttatgcaggacaaaaagtcaaaatccaaaacagccaaaattgattggtctcactggacagtcactgtgccagaagaaaacccggataagcctggcaagccatactctctgggctaccctgagatcctgaactacgctgaggataaaatcgcaagcaaatacatgtacgacgaccctaaagacaagagtgtggttttctacgcatttccaagcggtgtgactacagcgaacacgcactattctcgttccgaactgcgggagacaatggagaccggctctaacaaggtgaattggacgttcgcgaaaggggggaagatgcgcgggacatatgccattgatgatatctcgaaagaacctgacgggaagtactcgcgtgtaatcattgcacaaatccacggcgtactgacggacgagcaacgggaccttatcggtcagaaggataataacgcacctccgatcctcaaagtctattgggataagggtaagattcgcgttaagacaaaagttctgaaggatttgaacgctccttacaaagagatgctcttagaacatgcgtggggggacgacgaaggccgcaatttcaaggaaaagatcgatctcaatacccggttcaccttggaggtgaaggtgtcagatgggcgcatggaggtgattctgaacgatacggaatccctggtttacgatgatatccatatgaagaaatggggtatcttcgagaactacttcaaggctggtaactattttcaatctaagactcctggtactttcgctaaagtaaagatttattccctccaagtgacgcactaaatgctactactcgacgcagtgaatgtcatcctgcgcaagatcggcgagctgccgatcccgagcatggatgagacgtatcccaccatggccattgccctccctgagctggaggaccagcgcatccagttgctgacgcaaggctggtggttcaacacctggtggaagcacaagctgacacctgatcccacgggccgcatcaacctgcccaagggcaccttggcattctacccggattccccggacctccagtgggacggcctgggagtgcgcgacgccaacaccggcgacgaccgcatcggtaagtcggtcgagggccggctggtgctgtcccgcgagtgggaccgtatccccgagatcgcacagcgcgtcattgcgcaccaggccgcactcgcggtgtacacccacgagattggcccggacgagaccgcccaggtcatcgcccaggaattgcaggcgtatcagaacgaactgtcccgcatgcacacccgatcccgtccgctgaacacccaggccaagcgtagcttcagccggtggcggcgcagcttgaggacctgagcatgagctacaagcaatccgcgtatcccaatctgctgatgggtgtgagccagcaggtgcccttcgagcgcctacctggccagctcagcgagcagatcaacatggtatcagaccccgtgtcggggctgcggcggcgcagcggtatcgagctgatggcccacctgcataccgaccaaccctggccgaggccgttcctctaccacacgaaccttggtggccgcagcattgcgatgctggtggcgcagcaccgtggcgagctgtacctgttcgacgagcgggacggtcgcctgctgatgggtcagcccctggtgcatgactacctcaaggccaacgattacaggcagctacgggccgccacggtggccgatgacctattcatcgccaacctgagcgtgaagcccgaggccgaccgcaccgacatcaagggcgtggaccccaacaaggccggctggctgtacatcaaggcgggccagtattcgaaggcattctccatgaccatcaaggtcaaggacaacgccaccggcaccacctacagccacacggctacctacgtgacgccggacaacgccagcacgaaccccaaccttgcggaagcgcccttccaaacgagcgtaggctacatcgcctggcagctctacggcaagttcttcggtgcgccagagtacaccctgccgaactccacgaagaaatacccgaaggttaaccaggatgccgatgcggcaaccatagccggatacctcaaccagcgtggggtgcaggacgggtacatcgcattccggggagatgccgacatcaacgtcgaagtgtccacggacatgggcaacaactacggcatcgcgtcgggcggtatgagcctcaacgcaacggcggacctgccggccttgctgcctggtgcgggcgcacccggtgtgggtgttcagttcatggatggtgccgtcatggccaccggctcgaccaaggccccggtgtacttcgagtgggactccgctaaccgccgatgggcagagcgggccgcctacgggaccgattgggtcctgaagaagatgcccttggcgctacgctgggatgaggctaccgacacctacagcttgaacgagctggactatgatcggcgcggctccggcgacgaggacacgaaccccacgttcaacttcgtcacccgaggcatcaccggcatgacgaccttccagggtcgcctcgttctcctgtcgcaggagtacgtctgcatgtcagccagcaacaatccgcaccgctggttcaagaagtcggcagccgcgctgaacgacgacgatcctatcgagatcgccgctcagggcagcctgaccgagccgtacgagcatgcggtcaccttcaacaaggacttgatcgtcttcgccaagaagtatcaggccgtggtcccgggtggcggcatcgtgaccccgcgaacagcagtcatcagcatcaccacgcagtacgacctcgatacccgggcggcacctgctgtgactggacgcagcgtgtacttcgctgccgagcgtgccctgggtttcatgggcctgcacgagatggccccgtcgccgtccacggacagccactacgtcgccgaggacgttaccagccacatcccgagctacatgccggggccggctgagtacatccaggcggcggcctccagcggctacctggtgtttggcaccagcacggcggacgagatgatctgccaccagtacctctggcagggcaacgagaaagtccagaacgccttccaccgatggacgctgcggcatcagatcatcggcgcgtacttcaccggcgacaacctgatggtcctaatccagaagggccaggagatcgccttgggccggatgcacctgaatagcctgccagcccgcgagggtctgcaatatccgaagtacgactactggcggcgtatcgaggcgaccgtcgatggtgagctggagctgaccaagcagcactgggacctgatcaaggatgcctctgccgtataccagctccagcccgtggccggtgcctacatggaacgtacccatctcggcgtgaagcgcgagacgaatacgaaggtgttcctcgacgtgcccgaggccgtggtcgggtcggtgtacgtggtcggctgtgagttctggtccaaggtggagttcactccgccagtgctccgagaccacaatggcctgcccatgacctcgacccgcgcagtgcttcatcggtacaacgtaaacttcggctggaccggcgagttcctgtggcgcatcagcgacacagcccgacccaatcagccgtggtacgacacgacgcctctgcggttgttcagtcggcagctcaacgccggggaacctctggtggacagcgccgtggtgccgctgccggctcgggtcgatatggctacgtccaagttcgagttgagctgccatagtccgtacgacatgaacgtccgggctgtcgagtacaacttcaagtccaaccaaatctacaggagggtgtgatggctttctggctaccactattggccgctggcggcatgtccgcccttcagcagggattggccaacaaggaagagcgcaacaagatcaaggccgagaacaaggctcgactgaagacggacctcgacaacctgggcgccgccgcccgcgacatcgccaacctcggagtcatggccgctagctaccgcaagcaggccgtggcctcgcaggtggaggccaaacgccaggggatgctcgccggcggcagtgccgaggctcaggccggagcgttcggcgtcaagggcgcatccgttgatgcggtggccctggatatcgagcgggaggtcggcgaggctctgttccagattgacgacaacctggacaatcagatgtggaacctcgccgagcaggcgcactccatccaggcccaagctaaggccggcctgctgggacagaagagcaccactgcggggcaacgatccccgctggtggctggcctgatgtcggcgggttccctgtatgcaagtcaatacttcaagttcggcgccacgcctaaaggaggcaactgatggcggaatcgcaacgtgcttcccaagagcttgggatcaacgtcgggcagacgcaactccagccgggccagagtgcccggcgtggggtgcgcgactccgaagtcaactacagcgggccgagtgtaggctcacagattctcgacggcatcctcggcgccggtcagcaaatcgcaggcaagtggttcgagcacaacgtgcagcaggaagtgctgcgcggtgagcgtgcccgcatggccggcgaggccgaggaggcggtagacagcaacatcctggccaagcccttcgtgaagggcggctggcgtaagcaggactaccgtatcgctcaggcggacttcagcctgaagatgcagcagttcatcgccaacaagggccgggagatgactcccgaggagttccgcaaatacctgtcccaggaggctacgcacgtcctggactcgacaaagggcatgaaccccaacgacgccctacaggcgctggcgcagcagcagaaggccgaggagcagctcttcggcatgcaggccaaggcgtacatggactggtccatcgaccaggccgcacgaggcttccgcacccagggtaacagcatcctggccaaggctgtacaggcccaggccaccggcgacgaactgtcccgacaactcagcctggaagaggctggcctgttctataccaacatcatgacctccgaggatatcccgctggaggtgcgtgacaaggtgggcatgcagttcctggcagccagcctggacatgaaccagcggggcatctacgagagtctgcgcgatgccggcttcctggacagcatgtccttcgacgaccggcgtgcgctcaacggcctctatgaaaagtcgaaggcacagacccgggccaaggaatcgatggctaccctgcgggccgatgcggacttccagcagcgggtggctaacggggccatcacagaccttgccgaggtcgaggcgtactcccggggcatggtcgaggagggccgctggagcgacgcccaggccatctcgttcatgaccaaggccatgaccggcctgggcaacgctcagcgcatgcagggcatcatggcggccctggaggctggggacatcaacgccctgcacacgctggggacgaacgtctccgaggcactggagcagtgggacaagatgcaggcggccaacggctcaagcctgaccgatcgactcgtacagggcacgcagctcggcctgcgcctggggaccttccccaagacctacggcgagtccgtgggcagcgccgtgcggatgatccaggcggccaaggaaggcgaggcgaacccggagctggtcaatacgttgaacagcatcttcgagcaggtggcctcggcccaggagatcaacccctccgccggcaacgtgatgctatccggcatcccggaagccgagcagggcgctgtggcctgggcactcaagcagatgaagatgggcatcgccccagctcaagcactgcgcgagttcagtgccaacgccgaagtcgtgaagcagatggacgagttcgagaaaggacagaacaccaaggcattcaaggacaacctcggcaagcaggtcaacgacaagttcgtgaacaacatcttcggtcgggcctggaacatgctgaccggtgagagcgacctgagcaacaacgaggccgttctcagcatgtaccgtcgagcaaccatcgacgaggcgaactggctggccagcgaccgcaagcatgcgggtctgcttaccagtgacacgggccgcgaggccctgctggagatcgccgccgccaacgtgcgtaaccgcaccatccaggtaggcgaaggtcggaacctgaaggaaggggacctgttcagccgccgcgacagcgcgccactgatcctaccccgtggaaccaccgccgagcagctattcgggaccaacgataccgagaccatcgggaccgtcctggccgagcagcacaagccgcatgtcgaaggactcctcggttacaagtcggtagtcgccttcgagtacgaccgcaccagtggcagcctcctcgccgtcgagtacgatgagaacggtgtggccctggaccgcacgcgggtcgatccccaggcagtcggtaacgaggtgctcaagcgcaactcggacaagctgaacgcgatgcgaggtgccgagtacggtgccaacgtcaaggtcagcggcacggacattcgcatgaacggtggcaacagtgccggcatgctgaagcaggacgtgttcaactggcggaaggaactggctcagttcgaggcttaccgaggggaggcgtacaaggatgccgatggttatagtgtgggcctggggcattacctgggcagtggcaatgctggggcaggtactacagtcacgcctgagcaggccgcgcagtggttcgccgaagacaccgaccgcgcactcgaccagggtgtgaggttggccgacgagctgggcgttacgaacaatgcctctatcctgggcttggccggtatggccttccagatgggcgaggggcgtgcccggcagttccgtaacaccttccaggcgatcaaggatcgtaacaaggaagccttcgaggctggcgtacggaacagcaaatggtacacgcagacgcccaaccgggctgaggcattcatcaagcgcatggcgccccacttcgatacaccgagccaaatcggggtcgattggtacagcgccgcaacagcggagtaagacatggcacagcaattcaagggccgcatgacgcccaagtacccacttgaccaagcacagctcgacgaggcccaagtacagggccaactcgacgcagtgcctaccgtggggttcgacgccctgacgggtggcgagatcggagaacggaacgtggcagcgggccaacgagccaacgcgcgggaactggaacgcatcgtagcggaccaggaactgccggcccttgaccgtgcttccgcactctggaaccagtccaccctcgtcggacgctggggcgatgcgctccagctcgacgcggaccttgcggcgaacagcaccggcgaggtggaccccaacttcgacgccgggacctacggggtccaggcgctccaggcggcgggtatccagccgactgacaactatctccagatcatggcccgtgccggcaatgccgaggacgcggcctacctcctgtcgaggattcaacggtatgagcaggacgagcaaatcgtgcgggacaacccgtactggaacttcgcggctggcatgctggaccccgccgctctggcagttgatgcggttactttcggcgctggccgtgctctgcggctcggtcgtgctggcatggctgctgctggcggcgctgggcaagtcgggtatgttgctgggctggatgccgcaggggccgacgtggatgccggaacctacatcgtggcaggtgctcttggcgctggcgtgggtgctctgctggggtctggtgcgggacgcattgccgcagaggccccaacgcaaccgcatgtgcccgaagtatcggcgcctactgtcgggctgccagaagtagccatgaccgccgaggaggccgccgcacgcggcttcaaggccggtgacgtggtagacctgctggacgagggcaccgtgctgtcccgtgtcagctcccgtgtggagcaggccgagataccggccatcccgcgccgtgacactgccttcggcgacgagctgcacagcctgtcgggccggaagctgtccgaggtcctggaccacctcaagacccacgcagaggttcccaagccgctccagggcatcgccgccaaggtggctgataccatcaggaccctggagggcctgggccagcgaaccgcgttccgagtggtgcagggtggcgacactgccagctccgcattccttaagccgggcacggcgggcatccactccacccagggcctcgacaccttggtccaggtacgcggcagcaccgcacctggtcgagttggcaccaacccggtgaccgtgctccacgaggcggtccacgctgccaccgtaggcgtgatgaacgccgccctgcgcaaccctggcgcgatgagtccgaaggtggctcaggccatgcagaccctggagaacgtccggggtaacgtgctcaacgccctgaagcaggaccgcgccgccggtcggcaactgtccgagttcgaagagacgctgctggccggcaactccaacaccctggcaaacgtcaaggagctggtggcctggggcctgacggatacccgcttccagcggaccctgaatcgcctccgctacagcgacggcgggccgggcctgtggacccgtttcgtggagggcatccgtagcctcctgggcctccggtctgatgccgacacggccctgagtcgcgtcctggccgcctctgagacgatcatggacgccatgccggggtacactaaggctcaggctaagtgggccaacaagggcgctccggtgaccgaggaggccagcctggagaccatcgtgcggaccaccagggagcgtgcccgcgagggtgcgggcttcgtgaaccggttcttcagcgaggcggacctactggcacagcccggagagggcgcacggcgcctcctgagccgtcttatcgacgaccctgtacgtcgggatgggttcagcacgaacgacaacgcagcgagctatttgcgccgttaccggaacgagttcgagggctacgtgaagtcctacgacgagatgatggccaaggcaatggctgagcagggcgtgggcctgacggcacgtgcgctgaactcccgccgcgccatggcagtccgggaccagcttaacgagcaggtcacccgcgagctgctgcgccgggaccgggagtggaccgcctacggcagcgtccgcgtagaccccaacctgccgccgaccatcaaggccctggccgaccgctcggacgagattcacggtctgatgggtcagcgtgccagggaagccggggtccggggcttcgaggacttcgctccgcgtcccggatacttccaccgctcgtggaactggtccaagatggcgcagatggatgaggccgcccctggcctggcccggcgtgctatcagcgaggccgtgttccggggcatccctgggctggagcgtgccgacgccgacaccatcgcacaggccattgtgcagcgggcacgggaccgggctaccggtatccgctccgagttcatgggcgcgatgggcgtggcggacacggcattcatccggcaggcgctggaggaggccaacgtgtcccaggccaagttcgacagcatcatggccaagatcgagcagaagcagtccgaccagggcaccgtcaaatacggcaagggccggctgtcgctggacatgaccgccgagatcaaccacaatggaaccgtgtaccgcgtgcaggacctgatcgaccgggacctagaccgcctgatggagaactacgccggcagtatgtcgggccgctcggcactggcccgcgcaggcatgcccggcgactccgaggtggaagccttcatccgtgagtaccagcgggaggccgcgcacctgggcaccgacaaggtgcaggagctgacgggccaactgcggggcgtcttcggggacttcaccggcaacgtgccgcgagagcatcagctcggccccgtcgcacagcgggccagcgggctgaccagcgccaccatgctgggattctccggcgtgtaccagcttgctgagctggccacgatggctcaccgccagggcgtcttcaacgtaatgaaggccatgctgaactcccgcctgggtgacttcgtaggtgccatgcgtcgagacccggacctcgctgatgagatgcagaccgtcctcggcctgaacctcgccaacgacattcggatgaagccctggaagcggcagttcgacaccttcctggccagccaagacaccttcatggatcgcttcctccacgcgggtaagcaggctgtcccggtgctcaacggcatgaagttcatccacaactggcaatcccgcatgaacgccaacctcaccttgaacaaggtggcgcgggcggcgcagggggatgaagcagcccttcgcgtgcttcagcagtacgggaaggacgtggactggacgccagtcctggcgcgggttcgcggttatgtcacatacagaggaaggaacgcccaatccatgaattggggcgcctggagccaagcagacgtgaacaccgtcatgaacaccgcattgcggatcatggacgactcactgctgtacggtcgagtcggtcagaactcgggctttgcccggtcacctgtcggccaaatcctggggcagttccgcagctttgtggccttcgcgcacaacaagctcctccggggaacctatgagaactccggcgtgcttggcgtggcctcgctcctcgcattccagtatccgctcaccgcgctgatgatgggtgccaaggcagcgatcaacggcaagttcgacacctctgatgaaggcatccgcaagatggccatcgacggcatcggttacactgccggcctcggcttcaccgccgacatgtggggcgtgatcaccggacactctaggatgtccgccccggtcttcggactggcggagcactccaacgaggtgttccgtggcgtcaaggacctagtaaccggcgacgaccccgcagccgccaccggcgatatcgtcaacggcgccgcaggggcactgcctttcgtcaacgtattcccggcgaccaagttgctgctggaatccatcaaaggggaataacgtggctcggttcaagaatcccgagaccatccacgttgcagatggggtcgaggctgtcttcagtctcgacttcccattcctgcggcgtgaggacgtattcgtccaggtcgataagatactcaccaccgactatacgtgggtggacaacaccaacattcaattggccgtggtgccgaagcagggccaagaggtccgcatcttccgcgacacgcctgcccaggtcccggacactcagttcagccagggcatcccattcctgccgcgctacatcgacgcgaacaacaagcagctcctgtacgctgtgcaggagggcatcaacaccgcgaacctcgccctggatggcgtactcgacgcgatccgtatcgccgaggaagctcgccgcctggcacaggaagcactcgacgccgccaatgaggcgctgcgccgtgccctgggcttcgctgagattcgcaccgtgaccgaggactcggacatcgatccgagctggcgtggttactggaaccgctgcatcaccgctgacaaacccctgaccttgaccatgcagatggaagacccggatgcaccctggatcgagttcagcgaggtccacttcgagcaggcaggcgtgcgcgacctcaacatcgtggccggccccggcgtgaccatcaaccggttgcagaacaccaccatgcagctctacggcgagaatggcgtgtgtaccctcaagcggctgggcgctaaccactggatcgtgttcggagccatggaggacgaataatgcgcggcattatcgcgggcatcatggcctcccaaatccggcgtccaaaaccaatcctggcgacgtacccgtatcccatcctagctacagacgacgcatggtcctgccggcccaacatagtggcggcgctgacacgcgacactctgcacgaggttgtgaaccagccaggagaggacacctaccacgcgacctccagcgtggtaagcgtactgctgcggtcgctgactcagctcggctacggcggtggcgatgggttcctgaccggacctgccgtcaatgcagccttgctgcgcgatacggtgaaggaatataccgcagagccttacgcattcctgtcgcagaccgcagtggccggcgcagaactgaaggttgtggttgtatactccgagtatatcgtggagccgtacgccttcgccacctcgacagcaattaaacaggcggaactgaccaatgtttgagacacgagttaagggtcgctacaccgtgacccatctgaaagccacgggtgaagtcctggcacagtacaccttcgacaacctcatcactaacgcgggtctcgactggatttgcgccatggacacctcagacctgttctcacaggccctggccgtgagtaccagcacagcagaccccaaccccgctgcaccctccctgccggaggaagtacgacggaccacctcgtacgccccgaacggggatgttacctcgggtctggatggggagtggatttactggcacaagcggtggcgcttcccgataggcacccttaccggacaggtactggccaccgtgggcatcgtggcccaatccgaagttgggttcgagagtaacaccggcgcgaagattccggcagggactccactgtcctacacccggatcaaggatgccgccggccaacccaccaccctggtggttcaggccgacgagattctcgacgtgcagtatgagctgcgcagcaaggctgtggcgatggccgaggccaagttcgtgatctctggagtcgagcgtaccatccgccttactccgctgcccttcgcgaaccggcgtaacctctacggtgagcgctacatcttctacaacgagagtcctcggattgacggtaagaatgcgtccggctcggatgtccaggatggccagtgggtgaagctgtacccgcgatatacgcggggcacctacaaggggcagctaatgctgcgggccaccgttgataacggcaacatgccgggaggcatcaccggctgcaaggacctgaagatttacaacggtcggaactacgcactcaccatcgacccgcctgtagtcaagaacaacacgcaggaattctccatcacgatggagttctcggtagcgagggcataacccatggcactgatctacgacttcaacctggacctcgatccgaaggctaagtccaagttcgtaggtgcgcgaggccgtagggacatcagcgacgtgctagacttctgcgacgggggcgtggccatccaggacccgtcgcagggtatgatggtccgcgtgtggcgaacagagcttcgccaggacgggacctacctggggcacgaggacggctcgaacgagattcgcatcggcggaggtatcgaagaaggtatctccacgatgtccctcgacttcgacagtaacatgaactacgtgtgtgctttcgtacgagccgatcgaactggtgcaatctcctacttcaacgtgcagcagggccgccggctcctcgtggagcttgggcaggttgactatgccaaggtggccttggacgataagcgtcctggagctactgcctgggcacaggtcatcgtaccttacacccgtaacggcaacctgtacgtccgcacacagaacgagaactatacggtagagcacctggaggtggataccggcaaggtattccgaccgctggtcaaatgcggtatgggcaccaacctccgcttccaagtccaattcagagggcacatgtaatgagcaaaaagcagaccgcgagtgctgagcggctgggcctgctacacgagctggtctgcaccgctatcgagcgcaacttcaagtggtacatggacaacgacatcccgatccccgcatcggatatcgctgccgccaccaagttcctcaaggacaacgagatcacctgtgatccgtccgacaccatcaacatcgaccggctccgcgaggagatgcggcaggcgcaggccgagaaccgccgcattgccttggagggcttcatcgccggtgagaccgacgacgagatggaacgcctgtacacccactaaggaggcagcatgacgccgcaagaacgattccagatagcccacgaagtgcgggacatgtacccgcgcttccgggacttctgcctggacgccatgctgttcctcggcttcaagatgacgtggatgcagctcgacatcgccgacttcatgcaggattcgcccaacaaggcgatggtcgctgcgcagcgtggcgaggccaagtccaccatcgcctgtatctttgtggtgtggtgcatcgtccagaacccggctacccgcgccatgctggtatccggctctggtgacaaggctgaagagaacggccagttgatcacgaagctgatcatgcactgggacctgctggcgtacctgcgccccgaggcccgaatgggtgaccgtacctcggccaccagcttcgacgtgaactgggcgttgaagggcgtcgagaaatcggcctccatcaactgcatcgggatcaccgccgccctccagggttaccgtgctgacatcctaatccctgacgacatcgagaccacgaagaacggcctcaccgccaccgagcgggccaagctgacgcggcagtcgcaggagttcacctctatctgcacccacgggaagattctgtacctgggcacgccgcagagtcgcgagtcgatctacaacggcctgcccgcacggggcttcctgctgcgcatctggccgggccggttcccgaccctggaagagcaagagcgctacggcgactggctcgcaccctccatcctggcacgtatcgcccgcctggaggagaaaggccacaacccgcgcaccggcaagggcctggacggcacccgtggctggccggcggaccctcagcgctacaacgaagaagacctgatcgacaaggaactcgaccaaggccccgagggcttccagcttcagtacatgctggacaccagcctcgccgacgagcagcgtatgcagctcaagctgcgcgacctgctgttcatcgacgccacgcatgagagcgtacccgagcaagtggcctgggctgccgacgagcgcttcaagctcaagttcgacgcccaccgattcccggtcatcaagcctgagctgtacctgccggcgctgatggctggcggctgggcaccgctccagcagatgacgatgttcgtggaccctgccggcgatggtggcgacgagctgtcgtatgcagtaggcggaactctcggcccgtacatccacgtcgtgagcatcggcggctggaagggtggatttgccgaggagaacctggagaaatgtattgccctggctgcgcgttacggcgtcaaggtgatctatgtcgagaaaaacctcggcgcgggtgcagttggccagctcttccgcaaccatatgcgatccatcgacccggacaccaacaagccccgctatgaggggatcggcgtagaagaccgccagaagtccggccaaaaggaacgtcgcatcatcgacaccctgcggcccatcatgcagcggcaccgtctgatcttccacgtctcggcgatggattccgaccacgtgtcctgccagcaatacccagcggacaagcgcaacgagcgctccgtgttccaccagattcacaacatcaccaccgaccgaggctcactgccgaaggacgaccggatcgatgcccttgagggccttgtccgcgagctagcacccacgctcgtaaaggacgacgaagccgcaacccgcgctcgtgaagaggctgccaagaaggaatggctgaacaacccgatgggttacactaagtctgtccttcggtctctcggcatgggccgggagcgtcgcaagggccgcccaaaaggacgaagactatgatgctcgataccgccaccgaggcgggcaaaggcaccctcgccgtcaccggcgtggggattgccgtttactcgccctatgagatcgccagcctctgtgctgcggtactcaccgcgctctacgtgggcgctcagctcatcaccctactcccgaagatgctcgatagcatcgcggagcttcgccggaggttcaagaagtgaacaagcccctgcgcggcgcagcccttgcggctgccctcgccggccttgtcgccctggaaggcagcgagaccaccgcctaccgggacatcgccggcgtacccaccatctgctctggcaccactgccggggtcaagatgggcgacaaagccacaccggagcagtgctaccagatgacgctcaaggactaccagcgcttcgagcgcattgtcctggacgccatcaaggtgccgctgaacgtcaacgagcaaaccgccctgacgttcttctgctacaacgtgggtccagtctgtacaaccagcacagcgttcaagcgcttcaaccaaggccgcgccaccgagggctgccaagccctggctatgtggaacaaggtcacgatcaacgaccagagggtcgtatccaagggcctcgtgaatcgccgcaacgcggagatcaagcaatgcctcgaaccatcgtcgcaatactcgtccttgctgtggtagccctgggagcctcatacggcttcgtccagagctaccgagccttgggtatagcccaggaggagatcaagcgtcagacggcccgtgcggaggccctggaggtgcgttacaccaccttacagcgccacgtccaggaggtcgccgccaagaccaacacccagcgccaggaggtggaccgtgccctggaccagaaccgcccgtgggctgaccggcctgtgcctgctactgtcgttgacagcctgtgcaaccgccccggcgcccgctgtgctgtgcgaacaccctctgattgaccctaccacccaggctggcctaatccgcgctgtagcggcctatcaggacgccctggacctatgcaacgccctgaatcaaggagactgacatggcgaacacccgtgatcaatacctcgctggccgtaacaccggcctgaccttctaccaggtctgccagcccggcaccgacaaccgcatcgccctgcacgacatggacgaggccgatgtcaaggctaaggccaccgctgtgattgcagcagcctctgccctgggcggcgagggtggcgctactccaccggacccgctcaccgcctacaaggtgaagaacggtgacaccctgcccgtggacggcggtggctccgtgaaggtgaccgtagccaacggtgccatcaccaaggtcgtgtacaccgcaccggcgggctgagctacagcccgtccaacctgatccacccataacacaaggaactgaaccatggcaaccttcgccgctgcaactcagaaagacctccgcgccttcgccggcaccatcgagaacctgatccgtccgctggaggaagcggccctgggttctggctacaacgagaccaagctgcgcgctgaactggtcgcgcacctcgacgagctgatggctgctgtcgagactgccaaggcgctggtctacaagtgatcgacgagtagctcaagccgagcacctgcacagtcgggtgctccactggaactactggaatttttattgagggctggctgtgggtgggagttggtagtggtgggcgggagtagttactccgggtctaattttggtatcgtcgtgtgagaaccctcccgactctgatcagcccacccttcccccgtaggccctccgcctggtgggccactgcctcgcattgcctgggtgttgcctgggtcatccctgggagcttccagctacgctgggtggtggtgggcttccctgccctgtcgctgtcctgtcgccgcccattctacgcatcctggcgggagtgtcaacccctgggtggtcggtgccttgctcggctacgctccagcgcttccgcgtggtcggctaggcggttggctcgccagcgcttcgcccactctacacctcgctccacctcggaccacttgtccgccagcatcatgcgctgccatgccgcgtcctgctgtagccatgccctgctggctctgtcctgtctgctcagcatcctctgtctcctctgtctggctccctggggcttccctggggcgctgctgtggtcctgtcgggtgatggtg

SEQ ID NO: 54 - DNA, 44383 bp, synthetic construct
  source 1..44383: mol_type = other DNA
tctaattttggtatcgtcgtgtgagaaccctcccgactctgatcagcccacccttcccccgtaggccctccgcctggtgggccactgcctcgcattgcctgggtgttgcctgggtcatccctgggagcttccagctacgctgggtggtggtgggcttccctgccctgtcgctgtcctgtcgccgcccattctacgcatcctggcgggagtgtcaacccctgggtggtcggtgccttgctcggctacgctccagcgcttccgcgtggtcggctaggcggttggctcgccagcgcttcgcccactctacacctcgctccacctcggaccacttgtccgccagcatcatgcgctgccatgccgcgtcctgctgtagccatgccctgctggctctgtcctgtctgctcagcatcctctgtctcctctgtctggctccctggggcttccctggggcgctgctgtggtcctgtcgggtgatggtgcgggagtggctggccttgcctcttgtgcctctgtacctgtggcattgccctggctctacctggctgctccctgggtattccctggggctgcctgggtggccctggccactccctctaggccacgtactctactcgcctccacctgtcctgtctagtcctgctctgctccctggagcttccctggatgctacctgggtgctggtctatctccctggctctgcctggcgctgtgctgtgctaccgctggtcctgctgtcttgcctcgccgctccctcgcctgctcggtcgcacctgcggcgctgatggactcctgtttgtccattgtgtgtgacataaccgcagccttagtgccatgcgggttccagggcgatgggtctggctggttggctgctccctgggtgggggctgtcgctccctggtaacgcaaatcctggctagctagactaagcctcgcgcatggggtctctatacgcgtgggaaggctccagggagcgcctggggaggggttgacacgttggcggtaggtctgtagagttcgccctgtcttcacgcaataccgccttcacaggcagcctggagacagggttgacacactacccgggcatcggtagagtacgcagccagaacgacgggagattgcaaccttccaagcgcggcacaagccataggcgcaagggacacggcaagctcttagggcaggaaccgcagtgtgtaaggccggcaggcatcactggggggattgacaaggtaatagatgcggtaagatgtgcggcgtcaagtggtcccgatgtacacactgtgaagggattacggcgcggtcagacagatgaccggcaccgcttgacactgtaaagctcagtcggtacgatgggcacccatagcggacgtgatggtccggggcgatgcggataggacgccttgtttataacctgaccgcaaagctgtgactccagccgataggactgacccaccacgtaaatacagacgggttgacacgacaaggccaagtcgataacatggccgccacaaagggaagcgatagcttcctggcggtagaggttcgaagcttcaccagcggtacatggactggtgcggtaggttgaccgaagctgcaactggttaggcagggtcccagggaatacctgtcgggtgctgaagactcacccaaaagagtctgagcgggaagcctccccgtccacggttaagcaaaggcacgttagtgccggtgggaacgaatagagtgtcagtgggatcgagaactagaaacctcggttaatcgcgactgacagtatgctgggtagtatcggtgggccgattgaacaaggccaggcagatagcgcaaagggtacgggggatgagtgaagacgatcccgaagagtatgcgcaggacaagccagaaccgctgatactacagggactatgccaatgccaaggtttgtcccttgaggcccttccaccgaggggattcaagagacagacctagttgaggaatgccgatggcacacttcaaggctaaggctcccaagtcgcccttcgctacccaggtagcgtactggcgggattgggaagccaaacgtactaagctcatcgcacaggataacgtcgaggggcgcaaagagcttcgcaagatgcgtgacgtgcgctacgctaccgacccggagccagcgccaggacgctaccataaccctgaacagaaagcgttcgtgaagggtagcgaaggcaaggcgcggaacatcctgaagggatggaacgctaagaagtcgcaagggaagggtttgtaatgccacgtgtgaatgaactgacgccgcgtcaacgcaaggccgccaaggctcgccgcgacaaggcacgccggattgatctagcgcacaagatgccgaaaggcgccgactgcccgatcttccgcaaggctgaacaggcgcaagctaagcagccccgcgtcgataccctgaccactccccgcagtgccggctacctggccgccgctgcttacctgaacaaatccatctgaggtacataccatgaccaacgcaatctccaaaaccgtaatcgcattccgtggcaccgaagagatcaatcgcgctatcgacgccatccgtgtccgtggcaaggaactcgacgaagccatccaactgaccggcctgtcgatcatccatcacatcgaccagtgtggtgacgtgaccgtggtcaaggcgctgtatgaagccatgccgaagggcagccgccgcaatgcgctggtcgagtggctggtgctgcacggcaaggtacaggtgaataccgacaagaagtcgaacaaggacctgcccttcctgtacaacaagttcggcaagaccgatctcgtaggcgccaccgacaacccgtggtacagcttcaagcctgagaaagcgctggaccaggagtttaacctggccgctgccctggccacgatcaaaaagcaggtgctccaggctcagaccaagggcaaggtgatcgtcggcatggaactgctgggtgatctggaagcgctggccgccaaggctgcacccatcgccgagcagagcaagcgcgctgccgcccattgactcaagtcgaacgcctgctaagcgggcgttccgctggaatcaatgacaactggagaaacacgatgagctttaagcaacgtctgcaacgtcaaatcgccctggcccaatacagccgcccggctcagttcccgtacggcgagcaggccgtccaggcgaagggagagtgaccatggacttctggattgccctccccttcctcgaactcggcctcaacctcggcgaggatgaactgcgcatgttgtggttcagcggcctgacggtattcttcatccacctcctgaagcggtgactcaagtcatggccctggcgggcgaccctcgcctactccggggccatcgctggactcatcacaagcgagaactaaaccatgcaagctttgaatactctgttgatcgcaatccccaaggacccgtcgaacgcattcaatgcagccgacaaggtgctgtgcgcccatggcttccgtatgggtgacctgaataccgcgcacgtgctgacccctggcgggttcgtagtagtgggcgccggcgtgaccgtcaaccgctacgacgaagcgtatcgtatgagccggaacctcgattccgaaggcttcgacgttctgctggtccagggcagtccactgtccgggcacgtcacctgccaggcgtacggctggatcaatgcggaataccgcaagggctgcgcgaacgggcgcccgatcttcgacattgcaggaacctcgtaccatgtcctcgcgtgatccctaccgtatcggccaccgcgtggggctggtgaactacagcgaccgctacctaggtgccgacgcggcaggcaccaagggcgtcattgaagccataacccgaccgtcccgctgtatgacgatctatcacgtacgctgtgagcggaccctgcgcttgatcgaggccgaggcccgtaacgtgcgattcatcagacagctaccgacccgcaaatgacgtggcgcataatcgtcgtcagcccatcaagcggctgcgccttcgtgtggagtctcaagcggcctgtgcggccagtgcgattctactcccgcaaggcagctaaacgctggctccgcaagcaccgccgacagggcttgcctggccactactacctcatcgtgaactggagcaaacgcctatgaatcctacttacgtcgtccgcctcaaggacggaaccacccgccaggtagtcgccgacagcatcgtcaccggccacgccttcgtcgaactctggttcctcggcggggcggtcgctatctacccggcctgcgaagtacaggaggtccaccgcactgacctcgtaaaggagggtggtgatgaatacccgcactgtatacgtcaagccgcacagttcgaggtgcccgccggtattgtccgcaggacgcctgaccccgggtgaactctaccacgtgatcgcacctgccgaggtcgaaggcgtcattgtgctggcaacttcaggcccgtggcacatccggtccgtggtggtgcatagcatgcacccctcggtatatcccgtagggatggctgtcactgacgattcctggcggttccgccgcctgggtgtgagcgagtacgtccaactaattcaagggtacgaacaatgatcgccatcctgttcgtactcggtctgtactgctgcctcggcctgctggcaggcgcctgctactgcatcgcagtggccccgccattcgagaacccgacggaagtgcagttccaggacgcatgcgtgatcgggtgcatctggccactcgtgatcctcgtcggcatattcctggcactccgtgcagtaggccggggcctgctgaccgggctgaagcgtcacctgaacatccaataacctaccggaggtaacatgatccgcacccatacccacaacaccgaccgcgaacagcgccgcatctacaagctcactgagctgacgtcgggtgagatgtacagtgtagtgcagcccgagtccaagcgtggcacgctggtggtcggagtagcaacctgggatagccagagccgacctgtagtgctgcccgtggtcattcacgatgtgggtgcgcatccctcgccctgtcccaccgtgctgcgcaacgacggctggcgcatggtgcttgccgccaagggcacccaggtaacactcaccgccgagtgaccaaggcgaaggctggtgcgccagccttccaccgtggccattccttgccgcgaaccaactcaaccgaggagctacaacatgaccaacgtcaacaccgccaccaccgagaccaccaccgctgctgccctgggcgccaagctcatcaagaagccggctaccgtggaagacttccgcaacaacgtggtcttccatcacaccgccctggccaagctgaccgaagtctacaacgaggcggtcgttgccctgcaaaccgccgagcgcctgtccagcctcgtcgccggtgacgtgatcaccttcgaccacggcaagggcgagaaagccgaagtgctgagcggcgaagtcatcagcgtggttgccggcgtttaccaggtgctggtccgcttcagcgacagcgcacctgccaagctgctggacgtgaaggccagcgccatccgcgccgtccagtcgtcggcagcccaggctgctaccctcgacgaagccatcgcccagggcgagtaaggcccgcacgtaataggcccggccctccgggcctattgcgagctagccataccataggaggagtcaccatgagcaagcgtaaccccgagcacatcagcggcgccgtgcgtagcgtcagcgtccagaagtcggcagccgtccaggaactggaggatcgtctggagtctgccctggccgtgtgccagcagcgggcggaagacatcgatctgctgagccgccgtctccaggccgccgagcgcgcccgccgctgggagatcgacgagattcgcaaccaccaggcgaccatccgcctgttgcagaacgacctgaacgctgcgcatgatgcccacgaggcacaagagcgccgcgctcgcaaggcaaccatcatggcctgggtatgcctgctgaccgcaggtttggccgtcaccctgaaactggcaggagtctgaccatgcagtgcaacgacctttacactaagctcgcagcgagcatgttcaacgtgccgtgctcccaggtgaccgccgagatgcgccgcgtagccaagagccgggcattcgcgtatgcttacactcccaagcgacaggcgtcgggtgggacgtacaccgcccgcgtgagcggcgtcacctgtgacggtggcaaggtggaggtacgtctggacaacgtggagcgcgccgacacctgtggctatgccaagctggaggcgctggaagcggtcagcctgtaccagggtgccgcgaagcgcgccgatgagtatgaaaagctactgctccaggcattcccggtggtggctaagcgtcgtgagcgcttgcgtatctccgggccgctgtcggcggaagacttccgggcaaacctgctcgggacgtgttccgcatatcggaatgccctcgacgccatacggggcgagattacctcgaccggcccgttgcggaaccgcatatgggcgctggtcgaacgtatgcaccgggccgagacgaagctcaggaatgctcagtcggagatcaaccgcctgcgggagcaggaactggaccgcctccgcaaggacatgtccagctactgcgccaacgacgttacctctacggtgagtgcagcatccgcgaaggataccctacgggtggcaaccttcgccgccgccctcgccggtggcgtcgtaggtagcgccctgatgttcctgctcagctagggcgaccagggcctactccggggtcaaatctgagggcgttcctagagcgccctctcgtgtgagtctggaggatcacgaacatgcaataccatttcacgcattacaacggataccgcttcggcgtcgagctggaagacgaggctgtcttcccgtgcatcgacggtaagcgggcgacctgggacaaggtggcggcgtgtgccggtagccttgtgcattacatggcgcaggacctgattgacttcggccagcgcaagttaagggagatcgaagatgagcaagacgagcctgtacccgctgagcctgcatcccggcctgattcaaatcaggacgattcacgtattcagcattcaagctccgagcaacgccgagaactggtggcaatggttcctctggcagcggaagtaccacccgctccgggagagcctgagtccagccggggaactgagtgcgagtatcgccgagtgtgtccaccgcctccgccagagtggctggcaagatagcgacatctggcgcaagaagggaggcgtgctggccctcggtgccttcgacctgtccggcctgatggtgggttcctgcctcgtagtaggcggtgagctgaaggccctgtgcgttgatgaccggcacagcaggcagggtatcggcgctgagctggtacgagctgccgagctggccggtgctgagcacctgacctgcttcgagttcctggagccgttctacgccggcttgggctggcgcaccgagcgccgtgaggcaaactggactgaaggcgagccggatgtgctgtacatgagggcacctggccatgacgcatgaggtgatggtatggcttatcgcgaacaaaccgctggtcatcggagtcgccttcagcctggtggccctgggcgtgctgctcacacagaacaacggcggcccgcctatggcgcccgcatgacctggcacctccaggacatgttcgaggcccgaggtgggctgaggcccttgtgggaggagtggtatcaatggcactgcgccgcgactcctggctaaagcaagcgcaatccctggcagtcggccaggcgggtcgattccgccacgtcctgggatgccagagcatgagccggggcgggaccaacatgacctgcaagaacctgcctgaccgctgggtggcatactgctactcctgtcaggaaggtggcgtggtcgagaaaacgcacgtgcggagggtgcaatgcgcggatcaagaacgcttcatgccctggcccgaggatgcctcggactggacgcaagccgactgctatcaatcgctatatggtttgctgctgtccaagggcatcgactacaacgtgatgacgccggggctgccgctgctctacagcgaaaggcagcatcggcttatcttccctaccgacgcgggctggattgggcgcgctactgccgaccaaaatcccaagtgggtgggctacgggtatcctgccccggactaccatggatggccccaggaatcatcaatgggcaggccatgggtgctgacggaagactacttgtcggcgctgaaggtgcggtgggcatgtcccgaagtcttcgctgtcggtctgaacggtacaaggctgcgcgacaggctggcggcgatcatgttgcagcagacctgcaagcgcgccttcatcttcttggatggcgaccgggcaggtgtccgtggtagtgcaggcgtgatgcgccggctccggtccctgcttatcgaaggccaagtcataccaacgccggacgggttcgaccccaaggacctgacccgcgagcagataaggagcctagtaattggacgtattgacgcttcacgcactgagtgaccgggaccgcttccgcacgttgcggagtgtggtgcccgaaggaatgatggggccggagacgtgcttcgtcatcgactggatcgagcagtattggaaggtctacccggtgcatcagaaggtagacccgcaggcactgcgcgaactgatcaagctgcgaggtggctaccagccagagcaactagcggtggtcctgaacctcgtcaaccaactggacaagccggtggacccggactcgctacagggcgttgtgtcccagctcaacgaactggatttctcagggcgggtggatgccctcctggcgcagtacaaccagggcgaggacatcgacctggcgtatgagctgcgccggctgagcgacgaggccctgcgccgcgagggggtcagcacgccgaccgactacgtgacggacgacgtgtttgatatcctcgcggaggagcagggtgaccacggcatcaagctgccggggctggtgctgccggcgtacatgaagggcctccacgccggggcctcggtgctggtggcggcgccgcctgatgcgggcaagacctcgttcatggcctggatcgctgtccatatcgcgccgcagctcaagcggtacttcgacccggggcggcccatcctgtggctgaacaacgagggcaagggtcggcggatcaagccgcgcctgtactcggcagccttgggcatgaccgtgggcgagattcttgccctggacccggaggaagttcgcaggatgtacgccgagaaaatcggcggcgactctgagctgatccgcatcaaggacttccacggtgggtcgctggctcaggctgaacaggtcatcgacgcgatgaagccagcggtggtgttttgggacatgatggcccacgtcaagggcggccagcgcaaggaccagaaccgtaccgacgagatggagtacaaggtggctgaggtccgcgagatggcggtacggcacgacttcatcagcttcatgacgtggcagattagcaacgacggccacgaccagttgttcccgccgcagtcctgcctcaaggattcgaagacagcggtacagggtgctgtggacgtgcaaatccacctgggccgtctcaacggcgcggatcaacaggtcatgcgtggcctgtccctgccgaagaacaagttccagatggacgggaagccttcgaacgtggaggcaatgattaacttcgacgccgcacggtgtcgtttctttgagagtgtggatcatgcaagctaagcatagccgggtgctcgaaggcaccaaagaaattccgctgggtagcatcgcactgttaccgggcaccgtcgcgggcctgctgctgtgcctgtactccgacgcaactcacgaggagggcgtcgccttggccggtgggttccctcgcgacttgctgcacggcgccactcccaaggacgtggatgttgccctgtacagcatgacctgggggcgggcagagcacctgatccagaaggcactcccggtcctgaaccccatcttcgtccgggatggtgggtggcgctcggactacgccgatggcggcgacggtggtatcttcaagggcgtgatgtccctcgtgggctgccgtgggttgaatggcatggacttggactttaactactacgacgccgacagcctcggtcgagtgatggagtcgttcgacttcaccatcaaccaggtaggcatcgcgtacaactggcccgaccccgaaggcggtccgcgcctgggtgcgtacctgcacaaggacgttacctggggcgtgaacagggaagtcggtaacggctcgcgactgccggagcgatgcgagaagatgcgggccaaggccgcgtattacggatgggagaacgtgtgatgagcaagcgcgacgtggtactggatatcgagaaaggcatctggcgcggcgtagaccagaacgacaaggccgtcgaggccatcatcaagaagcacgggtacgtgatcgtcgagcctaagatcgacgggtgccgtgccatcgtcggtgcgcatggcgtggtgtcccgaagcgggcgccgcttcccggccctggatagcttggaagaccgcatcatcgatcgactggcccgccccgggctggactccggcctggtgctggactgcgagatgtacctggccggcatgcccttcagcgaggcgactggccgcatgtcgcgcaagaccccactgaccgaggaagagctggggtgcctgcacttcgcggtgttcgacgccacccatatagacgtgctccgcaaggcgcgcacctcccacctggtatacgaagagcgccgcgccatggccagcagcctcctggcagcttgccgcctcagcgacactccgacgttcttccaggtaggctcgcaggtgtgtcggtcgatggaggaagtcttaggccggtactccctccaccgcgccatgggcttcgaagggtcgatggagaaagacccgagcatggtctaccgcaacggcaaggtcgccggctgctacaagcgcaagccggagatcaccgtagacgggcgcatcgtaggctacgtgccgggcaggaccggcaagaacgctggccgcatcgtgggctactatgtcgagttggaagacggctcgggcaccgtggccgccaccggtctgaccgaggagcacatcgagttcctgacccgtagccaatactactcgaccgtcaacgacacgatgccaaacttcggtcgcatcgtcgaggtctctgcgatggaacgctcggccaacaccctgcgccatcccagcttcagtcgcttccgcgaccttcccagcaatccaggagtcaaggtatgaagattcgaaagtcccgtaaccgcaactacccggaagatatggtgtaccacgccaccaaccgggattcactgctgtatccgaagtacgtcatgggttccgtgttcatcagccaggacggaacattccgcatctgcgtcatggcagggacctgggaccacgttgggtccgaagttctgcatcatgcacgggacatccaatcccttggcgccggtcgccgtaagttgcaccgggtcatgcgacggctgcgccgcaatctgcaacaggtaggagtcaaggtatgagaatgccaaccgaagaagaacgcacgatccgctgcctgctggcagatatccacgaacccttgaacctgctgttccccggtatccgtgtaaaggccgagacaatgcccttgggctggggagatagtatctgtgccctggtactccgggtgagctacgaacatcgcacgctgggtcgcctggagtacctgcacgaggtccccatcctgcacctgacgcagtggggccgggacggcatgctccagcacctgatgaacgagattccccgtcgggtgctggatggcatgctgcgccaggcacagaaatacagccagagcaactggtacagcaaatgacgactatccgaatcctcgacctcgaaaccgagagctacgagcacaaagggcgcaaagcgtcgccctttgacccccgcaactatatcgtcatggccggctggcgtgacgatgttgacggcaaggtcggccagaaggtggagcatcgcttccgcagccgggccgaagccgaagatccgaacaaccgctggttcaacctcgacggcgtggacgtgatcgtagcgcacaacgccatgttcgaatcgaactggttcttcacccgctaccgggacgagtacctggccttcctgcgacgtggtggccgggtctggtgtacccagcaggccgagtatctgctgagccatcagacgtggctgtacccggcactcgacgaactggccccgaagtacggcggcacccacaaggtggacggcatcaagctgctgtgggaccagggcgtgctcacctcggagatggaccaggacctgctgagcgagtacctgtccggcccgtgcggcgacatcgagaataccgccctcgtattctacggtcagttgatgaagctccaggcccgtggaatgtgggctggctacctggagcgctgcgaggccctgatcggtttctcggcgatggagtgcgccggcctgaaggtggacctcgaagtcgcccgggtgaaccacgccaagcaactggaagaggtggccgggatcgaggctgagctgaagaagctgatgcccgacttcccggaatacttcgagttcaagtataccagcctctaccatatgagcgcatggctctacggcggcgaggtgcggtacaagggccgggtgccctacgaagatggccggatggagaaagccgacttcgtgcgcttcggcacggccaagcgggggactcctatcgagagtacctcggtgcgggtcccgatccacgaagtgaccaaccagggtgagtggcactggcccaccatcaccgagctggcgaccaagcacggcccggtcatcacgttctccgccggcaagaacaagggcagcgtcaaggtgttccgtgaggatacggacatcccggcgaccaagtgggacgatgaccagcgattccgattccccgggctgatcaacctgaacaacctgccggaagtggtgcgcgagaaattcctaggcaagcgcccggagttccagtgcgccctcaccctggcggatggatcgcccgtgttcagcaccagcggcgacgccctccaggctctggagaaacagggcttcgaggcagccaagctgttgatgcgcctggccgagttgcacaaggacaactcctcgttctacatcacccacacctacaacaaggatgggacgatcaaggacacgaaggggatgcttcagtacgtggacgatgatggtatcatccaccactcgctgaatacgaccgcgacggccacgacccgactgtcgtccagccgcccgaacctccagcagctcccgtcaaaggacgaagacgacccggaagccggcagccgcgtgaaggagatgttcgtgtctcgcttcggcgcggacgggatgatcggcgagaccgactataccgccctggaggtggtgatgttggcggccctgtcgaaggaccggaacctcctggcgaagctgatggccggcacggacatgcacttgtaccgcctggcagggaagcacaacaactggaacgggttcgattacgaccagctcgtggccatcaagaaggaccccaaccatccgtggcacggtcgcatgatgcaggctcgaaagaacatcaagcccaaggcattctcggcgcagtacggtgcgagcgcggctggtatcgcattcaacaccggctgtaccgtggaagaggcccaggaattcctggacaacgaggcggccctgttccccgagtccatcgcattccggcagatcgtccgcgacagtgcagaggccaccagcctcgtgatgtacaaggccgaggaccagatgccggcgggcgccttcagcgagatggggtcggatggtaactggcgccagtaccgccgaggattctggcaagcgccgggaggcacctgctacagcttccgccaacaggaacgctgggacaaggaacagcgcaagacggtcatggacttcaaggacacgcagatcgccaactactggaaccagggcgaggctgggttcatgatgaccgtgagcgtggggcgcatcttccgttggatgctgcatcgcccgggattcatggtcaccgagttcctgatcaacaacgtacacgatgccgtgtacaccgactgccacaaggacaccgccgccgaggtcaacaagggcgtgcgcgacatcatggccgacgcggcccgctacatgagcgagcggctgggctacgacatcgccgacgttccattcccggcagtggctgagatggggccgaacatgttcaatatggaggtgatccagtgaaagaactgcatccgctgcacacgcccgagttcgtcaaaacattcctggaccagaccgggtgcctgcctggggtacgccgtacgggccgcaccaccggcattgctctacaggccatcggcatggcgctgtcccatccgagggaaaccctgacgttcgtggaccacccggacggcagctcggcagcactggtggccagcattgaaaccatactggcgaccctgggctaccggaacgtcctcgttcgacccacaacccgtgcggacgggcgcagcgtgaacatcgtcttcaagacgctgccgaacgcctgacgaccttccctactccggccttaaatcttccttcgacacaagagagaccacgtatgactcagcaactcaacgctctgcaagctgcactcgccctggccaacaaggctgccgagaccgcaaccatcgacatgtctgaaacctccaccggcggtggcggcggtcgaatcttcccggctggcaccgccatgggccgattctgcatctacatcgagctgggtgaccacgccaaggaattccagggcaagctcaagaacccggcgcctcaaatccgcctgggcttcgcactgtggggcgacgtgaacccgcaggccggtaatccgcagagccgcccggacgacctgttccacacctacgaggccgacggctcgatcaagcccggcctgttccgtaccttcgagatgaccctcggcaacaacgagaaatcgaagaccaagctcgccttcgacaagatgaactggagcgggcagcatacccacttcgctcagatgctcggccaggcgttcatcatcccgatcaagcgcaccaagatcaccaagggcaacaacgccggcaaggaacgcaacgacatcgattggggcggcatcatgaagccctacaatccggtcgatggcagcccgtacaacgtgccggaactgccgatggacctgttgcagtatttcttcttcgacgcgccgaccaaggagacctgggacgccctgcacatcgaaggcacctcggacaatggcaagtccaagaacttcctgcaagagaccattcgctcggccaccaacttccctggctcggccctgcacatcatgctgggcggcggcgacgatctgatcatcaagccgacgacccaggccgcaggcagcaacctgccggcagtgcccaacgtggccgccgatgcaggcgtagcagcagcccctgctgtcccggcagttccgcaggcagtgccgcagacggcccctagcgtgccccaggtggcgaatgtagctgcccctgtggtaggtactgccgaggcacagaacgtgctgcctgacgtaccgcaggtggctcaggtggcagctccggcggcggtcgaagtcccgtcggtcccggtagtgccggcagtaccgcaggtctaatgcgcctgccatcggaagagttcctggcaggactatccgcgcagttcgaccgcagcatggcaggcgggacgttggtgtgtgacgccgacggacccgcctacgtggctgcggccactgctaagaccttggacactgcactccggagattctggaagctcattttggagcagcagttcctagcgcactgcacggggacacgggttcacctcacggcagcaggtggggcgaaggcgtaccgggacacgtatccgaccatgaaaccctaccagggccagcgcaagggtaaggcaaagcccgcgctgctggagcctctgcgacgggccgtggcggacgtgcatgagcgcggcggcgcacccgaagggatcgatgtcatcctgcacacgttcttcgaggcggacgacggcatgatgatggacgcctacgccatgcaggacaaggccatcatccggtccgacgacaaagacctgcggatgacgatctacccgtattgggagatcgacacggcgtgtgtgagcaggatcgaaggcggcttcggctacctcaaggaggcatacacgccttccggccagttcaagctcaagggccacggacggaagttcttccttgcgcagtggctcggcggcgataccgctgacaacatccgagggatcgatcgattcaacgggaagctctgcgggatgaagacggccttcgatatcctccacccgatcacggacgaggatgaagccatcgacatgatcctggaggcgtacgccaagatcaagcaaaacccgctggcagaggccgaggtgctgtggatgcgccgaacgcctaccgacaacgcagcgcagtacctgttaagccgcgaccttcgtccggccttccgccagtggatcatcgagctggacgcctaccacgaggcgctgctccagaagcggagggagagtgactatgacgagtgagccgaaggtctaccagataccgcgcagccaacagcgcaccttcaccctgaagctgtgggccgagcagggcaagctatgcccgctctgcggtaagcccatcgatatcagcgtgaagggcgaggcggtgatggaccacgaccacgagacggggctggtgcggggcgtcctgcatcgatcctgtaacaccgcagaaggcaagatcacgaacgcggcgggttcctggggatgcaagtcgatgaagtacaccgacatcatcccctaccttcgtgccctcctgacgtacctggaggggccgaagcatccgctgatctaccccctgcacaagaccgacgaggagaaacacgaagcgaagctggccaagcgccggcaggcagccgccaaacgcaaggcggcgatggccgtcgcaaagcacaacgcgaggaacgtatgagcaaactccgcaagcaattcaccaatgagtacctgcgcaacgtctatgtcgagctgggtctcaagaagggcgccgagcatctgaccaggcattcgcgcttcggcgaagtgagccgccagtgcttccgcaactggtgcatcaagctgggcttccacgacagcaggacacgcggcacgtacgccaagaagggtgcgctgcactggctgggccgaaaggcggccgaggtagtgcgcaagttccctggcgccgtgggcaacgtggtcggccaagggccgaaggtgttgagcctggacatcgagacctcgcctatcgagggctgggtctggtcgctctggaagcagaacgtgggcctcaaccagatcaagcgggactggaccatcctgtcgttctgcgcgaagtggatgcacagcgacgaggtgatctacatggactgccagggcgaccccctggacgacatgcacctgctggtcgccctgcacaagctgttggacgaggccgacatcatcatcgtccagaacggcaagcgcttcgacgtgcccaagatcaacgcccggttcttcctgaacaagatgccgccgccacgaccgttcaaggtgatcgacaccttgatcatcgccaagcagcaattcgcgttcaccagccgcaagctggagtacatgacccacaaggcatgcaccatcaagaagcgcctccacggcaagttccccggattcgacctgtgggcagcctgcctccaggacaacccggaagcctgggaggagatgcgcctgtacaacatcgacgacgtacgatcgatggaggagctgtacatcctgatgcgcccgtggttcgtcggccatcccaacgtggccgtgtacttcaacgacgctgagccgactatccgatgcccgaagtgtggcgacacggatgtcaagcaagaaggctgggtgcatacgcagaccggcaagtacgagcactatcactgcggtggctgtggtggctggagccgagggcggtatacccgcaacacctcggaacagcgcaaggccctgctgagcaactaaggaggctatatgagcctggcgttctccgatccctacgaatctacgggcacccagcccggccagtaccgcaaaggcgcggccccggacgagcgaaaggccggcaagctcccgatgcacctggtggttgaaggcttcccgctgctaaagcgggagcttgcccgcatgatgcagtgggccgccgaggtcaagggctacaagccccacgactggaagaagatgtcggtgggcgagttcaaggccgcccaacaccggcacgaatcccaccgcctgctggacgggccgctggatgacgagtcgaacctgatgcacctcgtgcatgaggcattcaacgcaatggccgccgccgagcgtgccttgatggaccgggagaaaggcaatgagtaaaatctgttggtgtacccgaccgcacgagaccgacgaaggtgtacgtgtcatctgggccttcaacgagcggggcatcggggtaaactacgtcacggcgtacgtcacgccggcgatgatccaccacccggactggcgcgataccatcctcccggacatcctccaggagatggcggagcgcctggaccgcgaggttaagctggtggaattgcgctggttccgcgctgagattctgagctgcggggaatggcgtgactaccgagcaatgacgctggacggggcggtcagcctggccgaggccgagtggggtcccgaggatatcgggcgcgtaatcgaaagacgataggagacggaatggacctgatacagcagcagatcgcccacgaagaggcccttgtcggggcggcgcagaacgacgcccgcattgccttggaaaaggcgatagcccaagggtccatcgaccgcatcccgagggcacgcatcatgttgatgcggatgctccccatcgtgaccgaagcgatcttcgcccaccaggaagcgaaggcggcgggaccggcagcgaagctgcgacacctgctgcggatcatcgacgcccaggacctcgcggtcatggcgctacgggccgggctgtcgatgctcatcaactacccaacgatcaccgcgacgaagtattacacccatatgggcaagatgctctgccgcgagatcgaagtgcggttggccttcaaggtcaaccaaccctattacgaccggacgctggactacctcaagaccagcaggactcgcagcgtccggcacatccagaagacgatggacgcccttctggacgcggtactgcccgaggaggcacgtatcgacctgccggatggcgactacctgcgtctcggcaagttcatcggtgacccgctgatccaatgcggcctgttcgagccgaaccgcttcacaggccggggcggtacgagcgtccacctggagccgtcgccggaggccaaggagttcctgcaagacccgtcggcggcgatgacctggggaggcccaggccgtagcgtaatgctggcaccaccgagaccctggaacgactggtgcgatggcgggtactacagcgccaaggcgcagaagcatcacgtattggtgcgtcgtaccaaacaccagaccaagcgggcacgtcagatgcagctccgccacctgggccgggacaagatgcccaaggtatacgcggcggtcaacgcactgcaatcggtggcctacgagatcaaccacgacgtgtacgagatcatcgagcgcatcttcacttccggcggcggcgtgctgggtatcccgcagcgtacctacccggacaaacctgagttcccgctcggcgacgagtgggccaaggagaacgccagtgaacaagagctggaagccttcaaccgatggaagcgatccgtccaccgatggtacaccggggagcgggagcataccgccaagcttcgcgaatttgctgcactctaccgagttgttcgagagcatcatggcaaggcagtgtacttcccgatgcacgttgactcccgtggccgcatgtactattggggcacaccgaatccccaagggtccgacatcgccaaggcatgccttcagttccacgaaaagcgcgccctcggcaagcgcggcctgtactggctcaaggtccacgtcgccaactccctcggatgtgacaaggtgtacttcgacgaccgggcagcctgggtcgatgagcgatgggacgacttccagcgagcactcgacgaaggcccggagaactatccgaatctcttccccgaagacgagtcgcccctgtgcgccatcgccggtctgctggagctgcgggcggcctacgcatcaggccagccggagaattaccgaagtgggttcatcgtccatatggatgcaacctgctccggcctccagcactactcagccatcctccgagacgagatcggcggagcatacgtcaacctgttgccacctggacttgccaaagctgacatctactcccgagttctcggtctcgttgcagagtctctggcacgagacatcgagagtgctgaaggcgaggctcggggctacgctgtactgtgggataaggccggtcttgccaggagcctgacgaagaaaccctgcatgacgctggtgtacggaaccacgttcaagggtgttgtggaccactgcctggactacctggacgagtccggcctggagattcccgagggtatcccgtcataccgcctgggaagctacatggcaacgctcatactggacgcaattcgcgagacagtaccatcggcagtcttcgccatggaatggctccagcggctcgctaaggcccttcctgacgcatccaaggatttgcactggaccacgccactcggcatgcaggtcttccagtcctacccgaagaccgaggaggtccgggtgcggctgcgggccgaggctgtcgagtacgtcaccctgtacgaggccaaggacgagctggacccggtacgcaacgccaacggcatcgccccgaacttcgtccacgggctggatagcagccacctgggcctgacagccctggcatgcgcggcggagggaatcccgatccaggccatccacgacagcatgggcacctatgcggcagacgtggatcggatgcacgtccacatacgggagcagttcatcgccatgtacagtggcccctgtgtgctcgtagagctggcaaatcagcttggggtagaggctaccccgccccggaggggatcgttgaatctggaggctgtacgggactcctgggcgttcttctgctgaggtggattatgtcacccacataggagcaagtgcatccgtccaaggccctcgtagagggagcggggagagaggagaggtcagggaagacctggtagaggagaggtggagatgagaatggatgactacgaaggattctagatagaatagactaaccagcataggagatatgatagatggctactatgaagacccaccgccctacggttatgtcacccacagtggaaggatcgagaacaggcaagggtacggcccgtcctgtcacgttcacctctcagcagatcgagtggttagaacagaccttccccgaacatcagatcggtcctggaaccacgatggaagacatccagttccaggccggcaggcgagacgttgtgcgagcagtacgactgcgccgacgtgatgccatcgcagtggagctgaagtgatgagtaagtccatctggcgagtacacgcaaaggccggcactccctcggaactccagggcctgtgctggctggcaatacaggagctggaggagttcaccctcttccgctcgaaggacgacgccctgaatgcgatgctggacagtatcgagggcaacgatcgaaccgagctgttggtattccgcgatggtcagttggccggcggtgcctgcatcgtgttcgaggacgacccccacgtcggcccgtgcgtcacagcacagtggcagtacgtcctaccgcgctaccgcaatacaggcgtggtccgggagttcatccgcgaactccaccgtcaggccggctggggtcaaatccccctcgtgtgctggagccatcgtgaaagcgatagccggtacacgatccactaccggagagccaagccttatgggcaagaaagtcaagaaggtgctaggcaagaccatcatcggcaaactcgctgatggcctgctgggcaccgaccttagcggcgcacaatccgatgcccgcaagatggaagagcagaaccgcctaatgcagcagcaggcggaccagctcgcacgaaaccagcaggttgacctcaccgccgagaacgtggcgcaggttgacctaggagcgatggccgatgccactggcaccggcactcgacgacgccggaatcaggcgggcacaggcgtatcgcaaaccctcggtatcaactactgacgaggtacgccatgaaaaccaccgcagctatgctgtgggagaaacttcgggatgggagcgtggagagtcgagccatcgagttcgccaagaccacgctgccctacctgatggtcgatcccatgtccggcagtcggggagtcgtagagcatgacttccagtccgccggcgccctcctggtgaacaacctcgccgccaagctggcgagatcgctgttccccacggggattccgttcttccgatccgaactcactgatgcgatccgccgcgaggccgacagccgggacacagacattaccgaagtgaccgctgccttggctcgggtggatcgcaaagcaacacagcgcctgttccagaacgcctccctggcggtcctgacgcaggtgatcaagctactgatcgtgactggcaatgctctgctgtaccgagacagcgccgccgctacggtggtcgcatggtcgctccgctcttacgcggtgcgccgggatgcgactggccgctggatggatatcgtcctcaagcagcgctacaagtccaaggacctggatgaagagtacaagcaggacctgatgcgcgcaggccgcaacctgtccggttcgggcagcgtggacctgtacacccacgtacagcgcaagaagggcacggcgatggaatacgccgagctgtaccacgagatcgacggcgtgcgtgtgggcaaggagggccgctggcctatccacctgtgcccgtacatcgtgccgacctggaacctcgcccctggcgagcactacggtcgcggccacgtcgaggactacatcggcgacttcgccaagctgtccctgctgagtgagaaactcggcctgtacgagctggagtcgctggaggtcctgaacctcgtggacgaggccaagggtgcggtagtcgatgactaccaagacgccgagatgggcgattacgtgccaggcggtgcggaagccgtccgtgcttacgagcgtggcgactacaacaagatggctgctatccagcagagcttgcaagccgtggtcgtccgcctgaaccaggcgttcatgtacggtgccaaccagcgcgacgccgagcgcgtcactgccgaggaagtccgcatcactgcggaggaggcggagaacacgctgggcggtacttactcgctcctggccgagaaccttcagtcgccgctggcgtacgtctgcctgtccgaggtggacgatgcgctcctccagggcttgatcaccaagcagcacaagccggctatcgagacgggccttcccgccctgtcccgctccgccgctgtgcagagcatgctcaacgcttcccaggtcatcgctggcctggccccgattgctcagctcgatccccgcatctcgctaccgaagatgatggatacgatttgggcagccttcagtgtcgatacctcgcagttctacaagagcgaggcggagctacaggccgaggcagaacagcagcgccagcaggccgcacaggcccaggcagcgcaggaaaccttgctggaaggcgcttccgacatgaccaacgcactcgcaggagtctgatagatgacccaaccgaacgaacagcaactgccgccgggcctcgctaacctggttgccaacgtaccgcctgccgccgcaccgaccccgagtcatgtgcaggtgatgccgaacccggtgatccaaccgcaggccccggtccagcccggccaggtaggtgcgccgcagcaactggccatcccgacccagcagccgcaacccgttccgaccagcgccatgacgccgcactaccaaccggtagcggcacctgccgtgggtcaacccgttgttccgcaagcacccgctcagccggccccggtagctccgccggctgcgggtgcagttcttcccgagaacctggaagtcccgccgccgccggccttcactcccaacggggagatcgtgggcaccttggcagggaacctcgaaggcgacccgcagttggcgccctccatcagctatctggaggcgttctctgacaaactggataccgtccgagccttcggcaaggccgccgagaaccgcgatcctcggttcatcgacgagcactatctgaaggaagttctcggcccggcccaggcgcagcacgtcatcaacgtggccaagggcgtcctgacctatgtcgatgcgcaaaccaaggctgtcctgaaccagacctatgccgccgtcggtggcgaggccgtgctgaagcaggccgcaggcgtcttcaaccaacacgctgacccggccaccaaggccgccatcggtcggctgatggactctggcgatgcccaggccatgcagtacgcagcgaagcagatcattgccttcgcacaaggctccggtgccgttgtacaggctaccggccaacccctgggtgctgcggcacctgcactagcagccctgaccgctgagcagtaccgcgcagaagtgtcgaagctgccgctgaacgcatccgaagccgacatggctgcactgcgagagcgccgtaaggcaggcatggcgcagggtatctaacgaccctgccctactccggccttaaactcacatccaaaagagagagaatcgcatgagctttctgaacgacctgacccgtccgaactacgctggcaaggacgcggacgttgacatccacctggaagagcacctcggcatcgtcgacaagcacttcgcctacacctccaagttcgcaccgctgatgaacatccgcgacctgcgtggctcgaacgtggtccgcctggatcgcctgggtaacgtcaaggtcaagggtcgtcgcgccggtgaagagctggagcgcagccgagtcgtgaacgacaagtggaacctgaccgttgacaccctgctgtacctccgccaccagttcgaccaccaggacgagtggacccaatccttcgacatgcgcaaggaagtcgccgagctggacggccaggaactggctcgcaagttcgaccaagcctgcctgatccaggtgatcaaggctgccgcgatggacgcaccggtggacctggaagacgccttctcgccgggcgtgctggagaagctggacctgaccggcctgaccgccaagcaggctgccgagaagatcgtccgcatgcaccgccgcgtagtcgagaccttcatcgaccgcgacctgggcgatgcggtctactccgagggcctgaccccgatgtcgccacgtgtgttcagcctgctgctggaacacgacaagctgatgaacgtcgagtaccaggcaaccggcgcgaccaacgattacgtgaagtcgcgtgtggccgtcctcaacggcgtcaaggtgctggagactccgcgcttcgccaccgacgcaaacgcagcgcatccgctgggccgccacttcaacgtgagcgccgaggaggctgagcgtcagatcgccctgttcctcccgagcaagaccctgatcaccgcccaggtggcgccggttcaggccaagctgtgggaagaccacgataagttctcgtgggttctggataccttccagatgtacaacatcggtgcccgtcgcccggacaccgctggtgccatcgagctgaagggtatcggcgccttcgacatcaccgcgtgacggctaaggatttaaggtaaggaggtttatttatgcaggataaaaagagcaaatctaagacagctaagatcgattggagtcattggactgtaactgttccggaagagaacccagataaaccgggtaagccatacagcttgggctatccggaaatccttaattacgccgaggacaaaatagcgagcaagtacatgtatgacgaccctaaggataagagtgttgtcttttatgcgtttcctagtggagtaaccacggcgaacacccattactcacgaagcgaattgcgtgaaacgatggagacgggtagtaataaagtgaattggaccttcgcaaaaggaggtaaaatgagaggtacatacgccattgacgacatcagtaaggaaccggatgggaaatatagccgcgtaattattgctcagatacatggcgtcttaactgatgagcagcgagacttaataggccagaaggataataacgctccaccaatattaaaggtttattgggataaaggtaaaattcgtgtgaaaacaaaagtattgaaggacttgaacgccccatataaagaaatgctactagaacacgcctggggggacgacgaaggacgtaatttcaaggaaaaaatagacttaaacacacgattcacattggaggtgaaggtctcagacggacgaatggaagttattttaaatgacactgagtctctagtgtacgacgatattcacatgaaaaagtggggcatattcgagaactacttcaaagcggggaactacttccaaagtaaaacacctgggacctttgcaaaggtgaaaatctatagcttacaggttactcactaaatgctactactcgacgcagtgaatgtcatcctgcgcaagatcggcgagctgccgatcccgagcatggatgagacgtatcccaccatggccattgccctccctgagctggaggaccagcgcatccagttgctgacgcaaggctggtggttcaacacctggtggaagcacaagctgacacctgatcccacgggccgcatcaacctgcccaagggcaccttggcattctacccggattccccggacctccagtgggacggcctgggagtgcgcgacgccaacaccggcgacgaccgcatcggtaagtcggtcgagggccggctggtgctgtcccgcgagtgggaccgtatccccgagatcgcacagcgcgtcattgcgcaccaggccgcactcgcggtgtacacccacgagattggcccggacgagaccgcccaggtcatcgcccaggaattgcaggcgtatcagaacgaactgtcccgcatgcacacccgatcccgtccgctgaacacccaggccaagcgtagcttcagccggtggcggcgcagcttgaggacctgagcatgagctacaagcaatccgcgtatcccaatctgctgatgggtgtgagccagcaggtgcccttcgagcgcctacctggccagctcagcgagcagatcaacatggtatcagaccccgtgtcggggctgcggcggcgcagcggtatcgagctgatggcccacctgcataccgaccaaccctggccgaggccgttcctctaccacacgaaccttggtggccgcagcattgcgatgctggtggcgcagcaccgtggcgagctgtacctgttcgacgagcgggacggtcgcctgctgatgggtcagcccctggtgcatgactacctcaaggccaacgattacaggcagctacgggccgccacggtggccgatgacctattcatcgccaacctgagcgtgaagcccgaggccgaccgcaccgacatcaagggcgtggaccccaacaaggccggctggctgtacatcaaggcgggccagtattcgaaggcattctccatgaccatcaaggtcaaggacaacgccaccggcaccacctacagccacacggctacctacgtgacgccggacaacgccagcacgaaccccaaccttgcggaagcgcccttccaaacgagcgtaggctacatcgcctggcagctctacggcaagttcttcggtgcgccagagtacaccctgccgaactccacgaagaaatacccgaaggttaaccaggatgccgatgcggcaaccatagccggatacctcaaccagcgtggggtgcaggacgggtacatcgcattccggggagatgccgacatcaacgtcgaagtgtccacggacatgggcaacaactacggcatcgcgtcgggcggtatgagcctcaacgcaacggcggacctgccggccttgctgcctggtgcgggcgcacccggtgtgggtgttcagttcatggatggtgccgtcatggccaccggctcgaccaaggccccggtgtacttcgagtgggactccgctaaccgccgatgggcagagcgggccgcctacgggaccgattgggtcctgaagaagatgcccttggcgctacgctgggatgaggctaccgacacctacagcttgaacgagctggactatgatcggcgcggctccggcgacgaggacacgaaccccacgttcaacttcgtcacccgaggcatcaccggcatgacgaccttccagggtcgcctcgttctcctgtcgcaggagtacgtctgcatgtcagccagcaacaatccgcaccgctggttcaagaagtcggcagccgcgctgaacgacgacgatcctatcgagatcgccgctcagggcagcctgaccgagccgtacgagcatgcggtcaccttcaacaaggacttgatcgtcttcgccaagaagtatcaggccgtggtcccgggtggcggcatcgtgaccccgcgaacagcagtcatcagcatcaccacgcagtacgacctcgatacccgggcggcacctgctgtgactggacgcagcgtgtacttcgctgccgagcgtgccctgggtttcatgggcctgcacgagatggccccgtcgccgtccacggacagccactacgtcgccgaggacgttaccagccacatcccgagctacatgccggggccggctgagtacatccaggcggcggcctccagcggctacctggtgtttggcaccagcacggcggacgagatgatctgccaccagtacctctggcagggcaacgagaaagtccagaacgccttccaccgatggacgctgcggcatcagatcatcggcgcgtacttcaccggcgacaacctgatggtcctaatccagaagggccaggagatcgccttgggccggatgcacctgaatagcctgccagcccgcgagggtctgcaatatccgaagtacgactactggcggcgtatcgaggcgaccgtcgatggtgagctggagctgaccaagcagcactgggacctgatcaaggatgcctctgccgtataccagctccagcccgtggccggtgcctacatggaacgtacccatctcggcgtgaagcgcgagacgaatacgaaggtgttcctcgacgtgcccgaggccgtggtcgggtcggtgtacgtggtcggctgtgagttctggtccaaggtggagttcactccgccagtgctccgagaccacaatggcctgcccatgacctcgacccgcgcagtgcttcatcggtacaacgtaaacttcggctggaccggcgagttcctgtggcgcatcagcgacacagcccgacccaatcagccgtggtacgacacgacgcctctgcggttgttcagtcggcagctcaacgccggggaacctctggtggacagcgccgtggtgccgctgccggctcgggtcgatatggctacgtccaagttcgagttgagctgccatagtccgtacgacatgaacgtccgggctgtcgagtacaacttcaagtccaaccaaatctacaggagggtgtgatggctttctggctaccactattggccgctggcggcatgtccgcccttcagcagggattggccaacaaggaagagcgcaacaagatcaaggccgagaacaaggctcgactgaagacggacctcgacaacctgggcgccgccgcccgcgacatcgccaacctcggagtcatggccgctagctaccgcaagcaggccgtggcctcgcaggtggaggccaaacgccaggggatgctcgccggcggcagtgccgaggctcaggccggagcgttcggcgtcaagggcgcatccgttgatgcggtggccctggatatcgagcgggaggtcggcgaggctctgttccagattgacgacaacctggacaatcagatgtggaacctcgccgagcaggcgcactccatccaggcccaagctaaggccggcctgctgggacagaagagcaccactgcggggcaacgatccccgctggtggctggcctgatgtcggcgggttccctgtatgcaagtcaatacttcaagttcggcgccacgcctaaaggaggcaactgatggcggaatcgcaacgtgcttcccaagagcttgggatcaacgtcgggcagacgcaactccagccgggccagagtgcccggcgtggggtgcgcgactccgaagtcaactacagcgggccgagtgtaggctcacagattctcgacggcatcctcggcgccggtcagcaaatcgcaggcaagtggttcgagcacaacgtgcagcaggaagtgctgcgcggtgagcgtgcccgcatggccggcgaggccgaggaggcggtagacagcaacatcctggccaagcccttcgtgaagggcggctggcgtaagcaggactaccgtatcgctcaggcggacttcagcctgaagatgcagcagttcatcgccaacaagggccgggagatgactcccgaggagttccgcaaatacctgtcccaggaggctacgcacgtcctggactcgacaaagggcatgaaccccaacgacgccctacaggcgctggcgcagcagcagaaggccgaggagcagctcttcggcatgcaggccaaggcgtacatggactggtccatcgaccaggccgcacgaggcttccgcacccagggtaacagcatcctggccaaggctgtacaggcccaggccaccggcgacgaactgtcccgacaactcagcctggaagaggctggcctgttctataccaacatcatgacctccgaggatatcccgctggaggtgcgtgacaaggtgggcatgcagttcctggcagccagcctggacatgaaccagcggggcatctacgagagtctgcgcgatgccggcttcctggacagcatgtccttcgacgaccggcgtgcgctcaacggcctctatgaaaagtcgaaggcacagacccgggccaaggaatcgatggctaccctgcgggccgatgcggacttccagcagcgggtggctaacggggccatcacagaccttgccgaggtcgaggcgtactcccggggcatggtcgaggagggccgctggagcgacgcccaggccatctcgttcatgaccaaggccatgaccggcctgggcaacgctcagcgcatgcagggcatcatggcggccctggaggctggggacatcaacgccctgcacacgctggggacgaacgtctccgaggcactggagcagtgggacaagatgcaggcggccaacggctcaagcctgaccgatcgactcgtacagggcacgcagctcggcctgcgcctggggaccttccccaagacctacggcgagtccgtgggcagcgccgtgcggatgatccaggcggccaaggaaggcgaggcgaacccggagctggtcaatacgttgaacagcatcttcgagcaggtggcctcggcccaggagatcaacccctccgccggcaacgtgatgctatccggcatcccggaagccgagcagggcgctgtggcctgggcactcaagcagatgaagatgggcatcgccccagctcaagcactgcgcgagttcagtgccaacgccgaagtcgtgaagcagatggacgagttcgagaaaggacagaacaccaaggcattcaaggacaacctcggcaagcaggtcaacgacaagttcgtgaacaacatcttcggtcgggcctggaacatgctgaccggtgagagcgacctgagcaacaacgaggccgttctcagcatgtaccgtcgagcaaccatcgacgaggcgaactggctggccagcgaccgcaagcatgcgggtctgcttaccagtgacacgggccgcgaggccctgctggagatcgccgccgccaacgtgcgtaaccgcaccatccaggtaggcgaaggtcggaacctgaaggaaggggacctgttcagccgccgcgacagcgcgccactgatcctaccccgtggaaccaccgccgagcagctattcgggaccaacgataccgagaccatcgggaccgtcctggccgagcagcacaagccgcatgtcgaaggactcctcggttacaagtcggtagtcgccttcgagtacgaccgcaccagtggcagcctcctcgccgtcgagtacgatgagaacggtgtggccctggaccgcacgcgggtcgatccccaggcagtcggtaacgaggtgctcaagcgcaactcggacaagctgaacgcgatgcgaggtgccgagtacggtgccaacgtcaaggtcagcggcacggacattcgcatgaacggtggcaacagtgccggcatgctgaagcaggacgtgttcaactggcggaaggaactggctcagttcgaggcttaccgaggggaggcgtacaaggatgccgatggttatagtgtgggcctggggcattacctgggcagtggcaatgctggggcaggtactacagtcacgcctgagcaggccgcgcagtggttcgccgaagacaccgaccgcgcactcgaccagggtgtgaggttggccgacgagctgggcgttacgaacaatgcctctatcctgggcttggccggtatggccttccagatgggcgaggggcgtgcccggcagttccgtaacaccttccaggcgatcaaggatcgtaacaaggaagccttcgaggctggcgtacggaacagcaaatggtacacgcagacgcccaaccgggctgaggcattcatcaagcgcatggcgccccacttcgatacaccgagccaaatcggggtcgattggtacagcgccgcaacagcggagtaagacatggcacagcaattcaagggccgcatgacgcccaagtacccacttgaccaagcacagctcgacgaggcccaagtacagggccaactcgacgcagtgcctaccgtggggttcgacgccctgacgggtggcgagatcggagaacggaacgtggcagcgggccaacgagccaacgcgcgggaactggaacgcatcgtagcggaccaggaactgccggcccttgaccgtgcttccgcactctggaaccagtccaccctcgtcggacgctggggcgatgcgctccagctcgacgcggaccttgcggcgaacagcaccggcgaggtggaccccaacttcgacgccgggacctacggggtccaggcgctccaggcggcgggtatccagccgactgacaactatctccagatcatggcccgtgccggcaatgccgaggacgcggcctacctcctgtcgaggattcaacggtatgagcaggacgagcaaatcgtgcgggacaacccgtactggaacttcgcggctggcatgctggaccccgccgctctggcagttgatgcggttactttcggcgctggccgtgctctgcggctcggtcgtgctggcatggctgctgctggcggcgctgggcaagtcgggtatgttgctgggctggatgccgcaggggccgacgtggatgccggaacctacatcgtggcaggtgctcttggcgctggcgtgggtgctctgctggggtctggtgcgggacgcattgccgcagaggccccaacgcaaccgcatgtgcccgaagtatcggcgcctactgtcgggctgccagaagtagccatgaccgccgaggaggccgccgcacgcggcttcaaggccggtgacgtggtagacctgctggacgagggcaccgtgctgtcccgtgtcagctcccgtgtggagcaggccgagataccggccatcccgcgccgtgacactgccttcggcgacgagctgcacagcctgtcgggccggaagctgtccgaggtcctggaccacctcaagacccacgcagaggttcccaagccgctccagggcatcgccgccaaggtggctgataccatcaggaccctggagggcctgggccagcgaaccgcgttccgagtggtgcagggtggcgacactgccagctccgcattccttaagccgggcacggcgggcatccactccacccagggcctcgacaccttggtccaggtacgcggcagcaccgcacctggtcgagttggcaccaacccggtgaccgtgctccacgaggcggtccacgctgccaccgtaggcgtgatgaacgccgccctgcgcaaccctggcgcgatgagtccgaaggtggctcaggccatgcagaccctggagaacgtccggggtaacgtgctcaacgccctgaagcaggaccgcgccgccggtcggcaactgtccgagttcgaagagacgctgctggccggcaactccaacaccctggcaaacgtcaaggagctggtggcctggggcctgacggatacccgcttccagcggaccctgaatcgcctccgctacagcgacggcgggccgggcctgtggacccgtttcgtggagggcatccgtagcctcctgggcctccggtctgatgccgacacggccctgagtcgcgtcctggccgcctctgagacgatcatggacgccatgccggggtacactaaggctcaggctaagtgggccaacaagggcgctccggtgaccgaggaggccagcctggagaccatcgtgcggaccaccagggagcgtgcccgcgagggtgcgggcttcgtgaaccggttcttcagcgaggcggacctactggcacagcccggagagggcgcacggcgcctcctgagccgtcttatcgacgaccctgtacgtcgggatgggttcagcacgaacgacaacgcagcgagctatttgcgccgttaccggaacgagttcgagggctacgtgaagtcctacgacgagatgatggccaaggcaatggctgagcagggcgtgggcctgacggcacgtgcgctgaactcccgccgcgccatggcagtccgggaccagcttaacgagcaggtcacccgcgagctgctgcgccgggaccgggagtggaccgcctacggcagcgtccgcgtagaccccaacctgccgccgaccatcaaggccctggccgaccgctcggacgagattcacggtctgatgggtcagcgtgccagggaagccggggtccggggcttcgaggacttcgctccgcgtcccggatacttccaccgctcgtggaactggtccaagatggcgcagatggatgaggccgcccctggcctggcccggcgtgctatcagcgaggccgtgttccggggcatccctgggctggagcgtgccgacgccgacaccatcgcacaggccattgtgcagcgggcacgggaccgggctaccggtatccgctccgagttcatgggcgcgatgggcgtggcggacacggcattcatccggcaggcgctggaggaggccaacgtgtcccaggccaagttcgacagcatcatggccaagatcgagcagaagcagtccgaccagggcaccgtcaaatacggcaagggccggctgtcgctggacatgaccgccgagatcaaccacaatggaaccgtgtaccgcgtgcaggacctgatcgaccgggacctagaccgcctgatggagaactacgccggcagtatgtcgggccgctcggcactggcccgcgcaggcatgcccggcgactccgaggtggaagccttcatccgtgagtaccagcgggaggccgcgcacctgggcaccgacaaggtgcaggagctgacgggccaactgcggggcgtcttcggggacttcaccggcaacgtgccgcgagagcatcagctcggccccgtcgcacagcgggccagcgggctgaccagcgccaccatgctgggattctccggcgtgtaccagcttgctgagctggccacgatggctcaccgccagggcgtcttcaacgtaatgaaggccatgctgaactcccgcctgggtgacttcgtaggtgccatgcgtcgagacccggacctcgctgatgagatgcagaccgtcctcggcctgaacctcgccaacgacattcggatgaagccctggaagcggcagttcgacaccttcctggccagccaagacaccttcatggatcgcttcctccacgcgggtaagcaggctgtcccggtgctcaacggcatgaagttcatccacaactggcaatcccgcatgaacgccaacctcaccttgaacaaggtggcgcgggcggcgcagggggatgaagcagcccttcgcgtgcttcagcagtacgggaaggacgtggactggacgccagtcctggcgcgggttcgcggttatgtcacatacagaggaaggaacgcccaatccatgaattggggcgcctggagccaagcagacgtgaacaccgtcatgaacaccgcattgcggatcatggacgactcactgctgtacggtcgagtcggtcagaactcgggctttgcccggtcacctgtcggccaaatcctggggcagttccgcagctttgtggccttcgcgcacaacaagctcctccggggaacctatgagaactccggcgtgcttggcgtggcctcgctcctcgcattccagtatccgctcaccgcgctgatgatgggtgccaaggcagcgatcaacggcaagttcgacacctctgatgaaggcatccgcaagatggccatcgacggcatcggttacactgccggcctcggcttcaccgccgacatgtggggcgtgatcaccggacactctaggatgtccgccccggtcttcggactggcggagcactccaacgaggtgttccgtggcgtcaaggacctagtaaccggcgacgaccccgcagccgccaccggcgatatcgtcaacggcgccgcaggggcactgcctttcgtcaacgtattcccggcgaccaagttgctgctggaatccatcaaaggggaataacgtggctcggttcaagaatcccgagaccatccacgttgcagatggggtcgaggctgtcttcagtctcgacttcccattcctgcggcgtgaggacgtattcgtccaggtcgataagatactcaccaccgactatacgtgggtggacaacaccaacattcaattggccgtggtgccgaagcagggccaagaggtccgcatcttccgcgacacgcctgcccaggtcccggacactcagttcagccagggcatcccattcctgccgcgctacatcgacgcgaacaacaagcagctcctgtacgctgtgcaggagggcatcaacaccgcgaacctcgccctggatggcgtactcgacgcgatccgtatcgccgaggaagctcgccgcctggcacaggaagcactcgacgccgccaatgaggcgctgcgccgtgccctgggcttcgctgagattcgcaccgtgaccgaggactcggacatcgatccgagctggcgtggttactggaaccgctgcatcaccgctgacaaacccctgaccttgaccatgcagatggaagacccggatgcaccctggatcgagttcagcgaggtccacttcgagcaggcaggcgtgcgcgacctcaacatcgtggccggccccggcgtgaccatcaaccggttgcagaacaccaccatgcagctctacggcgagaatggcgtgtgtaccctcaagcggctgggcgctaaccactggatcgtgttcggagccatggaggacgaataatgcgcggcattatcgcgggcatcatggcctcccaaatccggcgtccaaaaccaatcctggcgacgtacccgtatcccatcctagctacagacgacgcatggtcctgccggcccaacatagtggcggcgctgacacgcgacactctgcacgaggttgtgaaccagccaggagaggacacctaccacgcgacctccagcgtggtaagcgtactgctgcggtcgctgactcagctcggctacggcggtggcgatgggttcctgaccggacctgccgtcaatgcagccttgctgcgcgatacggtgaaggaatataccgcagagccttacgcattcctgtcgcagaccgcagtggccggcgcagaactgaaggttgtggttgtatactccgagtatatcgtggagccgtacgccttcgccacctcgacagcaattaaacaggcggaactgaccaatgtttgagacacgagttaagggtcgctacaccgtgacccatctgaaagccacgggtgaagtcctggcacagtacaccttcgacaacctcatcactaacgcgggtctcgactggatttgcgccatggacacctcagacctgttctcacaggccctggccgtgagtaccagcacagcagaccccaaccccgctgcaccctccctgccggaggaagtacgacggaccacctcgtacgccccgaacggggatgttacctcgggtctggatggggagtggatttactggcacaagcggtggcgcttcccgataggcacccttaccggacaggtactggccaccgtgggcatcgtggcccaatccgaagttgggttcgagagtaacaccggcgcgaagattccggcagggactccactgtcctacacccggatcaaggatgccgccggccaacccaccaccctggtggttcaggccgacgagattctcgacgtgcagtatgagctgcgcagcaaggctgtggcgatggccgaggccaagttcgtgatctctggagtcgagcgtaccatccgccttactccgctgcccttcgcgaaccggcgtaacctctacggtgagcgctacatcttctacaacgagagtcctcggattgacggtaagaatgcgtccggctcggatgtccaggatggccagtgggtgaagctgtacccgcgatatacgcggggcacctacaaggggcagctaatgctgcgggccaccgttgataacggcaacatgccgggaggcatcaccggctgcaaggacctgaagatttacaacggtcggaactacgcactcaccatcgacccgcctgtagtcaagaacaacacgcaggaattctccatcacgatggagttctcggtagcgagggcataacccatggcactgatctacgacttcaacctggacctcgatccgaaggctaagtccaagttcgtaggtgcgcgaggccgtagggacatcagcgacgtgctagacttctgcgacgggggcgtggccatccaggacccgtcgcagggtatgatggtccgcgtgtggcgaacagagcttcgccaggacgggacctacctggggcacgaggacggctcgaacgagattcgcatcggcggaggtatcgaagaaggtatctccacgatgtccctcgacttcgacagtaacatgaactacgtgtgtgctttcgtacgagccgatcgaactggtgcaatctcctacttcaacgtgcagcagggccgccggctcctcgtggagcttgggcaggttgactatgccaaggtggccttggacgataagcgtcctggagctactgcctgggcacaggtcatcgtaccttacacccgtaacggcaacctgtacgtccgcacacagaacgagaactatacggtagagcacctggaggtggataccggcaaggtattccgaccgctggtcaaatgcggtatgggcaccaacctccgcttccaagtccaattcagagggcacatgtaatgagcaaaaagcagaccgcgagtgctgagcggctgggcctgctacacgagctggtctgcaccgctatcgagcgcaacttcaagtggtacatggacaacgacatcccgatccccgcatcggatatcgctgccgccaccaagttcctcaaggacaacgagatcacctgtgatccgtccgacaccatcaacatcgaccggctccgcgaggagatgcggcaggcgcaggccgagaaccgccgcattgccttggagggcttcatcgccggtgagaccgacgacgagatggaacgcctgtacacccactaaggaggcagcatgacgccgcaagaacgattccagatagcccacgaagtgcgggacatgtacccgcgcttccgggacttctgcctggacgccatgctgttcctcggcttcaagatgacgtggatgcagctcgacatcgccgacttcatgcaggattcgcccaacaaggcgatggtcgctgcgcagcgtggcgaggccaagtccaccatcgcctgtatctttgtggtgtggtgcatcgtccagaacccggctacccgcgccatgctggtatccggctctggtgacaaggctgaagagaacggccagttgatcacgaagctgatcatgcactgggacctgctggcgtacctgcgccccgaggcccgaatgggtgaccgtacctcggccaccagcttcgacgtgaactgggcgttgaagggcgtcgagaaatcggcctccatcaactgcatcgggatcaccgccgccctccagggttaccgtgctgacatcctaatccctgacgacatcgagaccacgaagaacggcctcaccgccaccgagcgggccaagctgacgcggcagtcgcaggagttcacctctatctgcacccacgggaagattctgtacctgggcacgccgcagagtcgcgagtcgatctacaacggcctgcccgcacggggcttcctgctgcgcatctggccgggccggttcccgaccctggaagagcaagagcgctacggcgactggctcgcaccctccatcctggcacgtatcgcccgcctggaggagaaaggccacaacccgcgcaccggcaagggcctggacggcacccgtggctggccggcggaccctcagcgctacaacgaagaagacctgatcgacaaggaactcgaccaaggccccgagggcttccagcttcagtacatgctggacaccagcctcgccgacgagcagcgtatgcagctcaagctgcgcgacctgctgttcatcgacgccacgcatgagagcgtacccgagcaagtggcctgggctgccgacgagcgcttcaagctcaagttcgacgcccaccgattcccggtcatcaagcctgagctgtacctgccggcgctgatggctggcggctgggcaccgctccagcagatgacgatgttcgtggaccctgccggcgatggtggcgacgagctgtcgtatgcagtaggcggaactctcggcccgtacatccacgtcgtgagcatcggcggctggaagggtggatttgccgaggagaacctggagaaatgtattgccctggctgcgcgttacggcgtcaaggtgatctatgtcgagaaaaacctcggcgcgggtgcagttggccagctcttccgcaaccatatgcgatccatcgacccggacaccaacaagccccgctatgaggggatcggcgtagaagaccgccagaagtccggccaaaaggaacgtcgcatcatcgacaccctgcggcccatcatgcagcggcaccgtctgatcttccacgtctcggcgatggattccgaccacgtgtcctgccagcaatacccagcggacaagcgcaacgagcgctccgtgttccaccagattcacaacatcaccaccgaccgaggctcactgccgaaggacgaccggatcgatgcccttgagggccttgtccgcgagctagcacccacgctcgtaaaggacgacgaagccgcaacccgcgctcgtgaagaggctgccaagaaggaatggctgaacaacccgatgggttacactaagtctgtccttcggtctctcggcatgggccgggagcgtcgcaagggccgcccaaaaggacgaagactatgatgctcgataccgccaccgaggcgggcaaaggcaccctcgccgtcaccggcgtggggattgccgtttactcgccctatgagatcgccagcctctgtgctgcggtactcaccgcgctctacgtgggcgctcagctcatcaccctactcccgaagatgctcgatagcatcgcggagcttcgccggaggttcaagaagtgaacaagcccctgcgcggcgcagcccttgcggctgccctcgccggccttgtcgccctggaaggcagcgagaccaccgcctaccgggacatcgccggcgtacccaccatctgctctggcaccactgccggggtcaagatgggcgacaaagccacaccggagcagtgctaccagatgacgctcaaggactaccagcgcttcgagcgcattgtcctggacgccatcaaggtgccgctgaacgtcaacgagcaaaccgccctgacgttcttctgctacaacgtgggtccagtctgtacaaccagcacagcgttcaagcgcttcaaccaaggccgcgccaccgagggctgccaagccctggctatgtggaacaaggtcacgatcaacgaccagagggtcgtatccaagggcctcgtgaatcgccgcaacgcggagatcaagcaatgcctcgaaccatcgtcgcaatactcgtccttgctgtggtagccctgggagcctcatacggcttcgtccagagctaccgagccttgggtatagcccaggaggagatcaagcgtcagacggcccgtgcggaggccctggaggtgcgttacaccaccttacagcgccacgtccaggaggtcgccgccaagaccaacacccagcgccaggaggtggaccgtgccctggaccagaaccgcccgtgggctgaccggcctgtgcctgctactgtcgttgacagcctgtgcaaccgccccggcgcccgctgtgctgtgcgaacaccctctgattgaccctaccacccaggctggcctaatccgcgctgtagcggcctatcaggacgccctggacctatgcaacgccctgaatcaaggagactgacatggcgaacacccgtgatcaatacctcgctggccgtaacaccggcctgaccttctaccaggtctgccagcccggcaccgacaaccgcatcgccctgcacgacatggacgaggccgatgtcaaggctaaggccaccgctgtgattgcagcagcctctgccctgggcggcgagggtggcgctactccaccggacccgctcaccgcctacaaggtgaagaacggtgacaccctgcccgtggacggcggtggctccgtgaaggtgaccgtagccaacggtgccatcaccaaggtcgtgtacaccgcaccggcgggctgagctacagcccgtccaacctgatccacccataacacaaggaactgaaccatggcaaccttcgccgctgcaactcagaaagacctccgcgccttcgccggcaccatcgagaacctgatccgtccgctggaggaagcggccctgggttctggctacaacgagaccaagctgcgcgctgaactggtcgcgcacctcgacgagctgatggctgctgtcgagactgccaaggcgctggtctacaagtgatcgacgagtagctcaagccgagcacctgcacagtcgggtgctccactggaactactggaatttttattgagggctggctgtgggtgggagttggtagtggtgggcgggagtagttactccgggtctaattttggtatcgtcgtgtgagaaccctcccgactctgatcagcccacccttcccccgtaggccctccgcctggtgggccactgcctcgcattgcctgggtgttgcctgggtcatccctgggagcttccagctacgctgggtggtggtgggcttccctgccctgtcgctgtcctgtcgccgcccattctacgcatcctggcgggagtgtcaacccctgggtggtcggtgccttgctcggctacgctccagcgcttccgcgtggtcggctaggcggttggctcgccagcgcttcgcccactctacacctcgctccacctcggaccacttgtccgccagcatcatgcgctgccatgccgcgtcctgctgtagccatgccctgctggctctgtcctgtctgctcagcatcctctgtctcctctgtctggctccctggggcttccctggggcgctgctgtggtcctgtcgggtgatggtg

SEQ ID NO: 55 - DNA, 44383 bp, synthetic construct
  source 1..44383: mol_type = other DNA
tctaattttggtatcgtcgtgtgagaaccctcccgactctgatcagcccacccttcccccgtaggccctccgcctggtgggccactgcctcgcattgcctgggtgttgcctgggtcatccctgggagcttccagctacgctgggtggtggtgggcttccctgccctgtcgctgtcctgtcgccgcccattctacgcatcctggcgggagtgtcaacccctgggtggtcggtgccttgctcggctacgctccagcgcttccgcgtggtcggctaggcggttggctcgccagcgcttcgcccactctacacctcgctccacctcggaccacttgtccgccagcatcatgcgctgccatgccgcgtcctgctgtagccatgccctgctggctctgtcctgtctgctcagcatcctctgtctcctctgtctggctccctggggcttccctggggcgctgctgtggtcctgtcgggtgatggtgcgggagtggctggccttgcctcttgtgcctctgtacctgtggcattgccctggctctacctggctgctccctgggtattccctggggctgcctgggtggccctggccactccctctaggccacgtactctactcgcctccacctgtcctgtctagtcctgctctgctccctggagcttccctggatgctacctgggtgctggtctatctccctggctctgcctggcgctgtgctgtgctaccgctggtcctgctgtcttgcctcgccgctccctcgcctgctcggtcgcacctgcggcgctgatggactcctgtttgtccattgtgtgtgacataaccgcagccttagtgccatgcgggttccagggcgatgggtctggctggttggctgctccctgggtgggggctgtcgctccctggtaacgcaaatcctggctagctagactaagcctcgcgcatggggtctctatacgcgtgggaaggctccagggagcgcctggggaggggttgacacgttggcggtaggtctgtagagttcgccctgtcttcacgcaataccgccttcacaggcagcctggagacagggttgacacactacccgggcatcggtagagtacgcagccagaacgacgggagattgcaaccttccaagcgcggcacaagccataggcgcaagggacacggcaagctcttagggcaggaaccgcagtgtgtaaggccggcaggcatcactggggggattgacaaggtaatagatgcggtaagatgtgcggcgtcaagtggtcccgatgtacacactgtgaagggattacggcgcggtcagacagatgaccggcaccgcttgacactgtaaagctcagtcggtacgatgggcacccatagcggacgtgatggtccggggcgatgcggataggacgccttgtttataacctgaccgcaaagctgtgactccagccgataggactgacccaccacgtaaatacagacgggttgacacgacaaggccaagtcgataacatggccgccacaaagggaagcgatagcttcctggcggtagaggttcgaagcttcaccagcggtacatggactggtgcggtaggttgaccgaagctgcaactggttaggcagggtcccagggaatacctgtcgggtgctgaagactcacccaaaagagtctgagcgggaagcctccccgtccacggttaagcaaaggcacgttagtgccggtgggaacgaatagagtgtcagtgggatcgagaactagaaacctcggttaatcgcgactgacagtatgctgggtagtatcggtgggccgattgaacaaggccaggcagatagcgcaaagggtacgggggatgagtgaagacgatcccgaagagtatgcgcaggacaagccagaaccgctgatactacagggactatgccaatgccaaggtttgtcccttgaggcccttccaccgaggggattcaagagacagacctagttgaggaatgccgatggcacacttcaaggctaaggctcccaagtcgcccttcgctacccaggtagcgtactggcgggattgggaagccaaacgtactaagctcatcgcacaggataacgtcgaggggcgcaaagagcttcgcaagatgcgtgacgtgcgctacgctaccgacccggagccagcgccaggacgctaccataaccctgaacagaaagcgttcgtgaagggtagcgaaggcaaggcgcggaacatcctgaagggatggaacgctaagaagtcgcaagggaagggtttgtaatgccacgtgtgaatgaactgacgccgcgtcaacgcaaggccgccaaggctcgccgcgacaaggcacgccggattgatctagcgcacaagatgccgaaaggcgccgactgcccgatcttccgcaaggctgaacaggcgcaagctaagcagccccgcgtcgataccctgaccactccccgcagtgccggctacctggccgccgctgcttacctgaacaaatccatctgaggtacataccatgaccaacgcaatctccaaaaccgtaatcgcattccgtggcaccgaagagatcaatcgcgctatcgacgccatccgtgtccgtggcaaggaactcgacgaagccatccaactgaccggcctgtcgatcatccatcacatcgaccagtgtggtgacgtgaccgtggtcaaggcgctgtatgaagccatgccgaagggcagccgccgcaatgcgctggtcgagtggctggtgctgcacggcaaggtacaggtgaataccgacaagaagtcgaacaaggacctgcccttcctgtacaacaagttcggcaagaccgatctcgtaggcgccaccgacaacccgtggtacagcttcaagcctgagaaagcgctggaccaggagtttaacctggccgctgccctggccacgatcaaaaagcaggtgctccaggctcagaccaagggcaaggtgatcgtcggcatggaactgctgggtgatctggaagcgctggccgccaaggctgcacccatcgccgagcagagcaagcgcgctgccgcccattgactcaagtcgaacgcctgctaagcgggcgttccgctggaatcaatgacaactggagaaacacgatgagctttaagcaacgtctgcaacgtcaaatcgccctggcccaatacagccgcccggctcagttcccgtacggcgagcaggccgtccaggcgaagggagagtgaccatggacttctggattgccctccccttcctcgaactcggcctcaacctcggcgaggatgaactgcgcatgttgtggttcagcggcctgacggtattcttcatccacctcctgaagcggtgactcaagtcatggccctggcgggcgaccctcgcctactccggggccatcgctggactcatcacaagcgagaactaaaccatgcaagctttgaatactctgttgatcgcaatccccaaggacccgtcgaacgcattcaatgcagccgacaaggtgctgtgcgcccatggcttccgtatgggtgacctgaataccgcgcacgtgctgacccctggcgggttcgtagtagtgggcgccggcgtgaccgtcaaccgctacgacgaagcgtatcgtatgagccggaacctcgattccgaaggcttcgacgttctgctggtccagggcagtccactgtccgggcacgtcacctgccaggcgtacggctggatcaatgcggaataccgcaagggctgcgcgaacgggcgcccgatcttcgacattgcaggaacctcgtaccatgtcctcgcgtgatccctaccgtatcggccaccgcgtggggctggtgaactacagcgaccgctacctaggtgccgacgcggcaggcaccaagggcgtcattgaagccataacccgaccgtcccgctgtatgacgatctatcacgtacgctgtgagcggaccctgcgcttgatcgaggccgaggcccgtaacgtgcgattcatcagacagctaccgacccgcaaatgacgtggcgcataatcgtcgtcagcccatcaagcggctgcgccttcgtgtggagtctcaagcggcctgtgcggccagtgcgattctactcccgcaaggcagctaaacgctggctccgcaagcaccgccgacagggcttgcctggccactactacctcatcgtgaactggagcaaacgcctatgaatcctacttacgtcgtccgcctcaaggacggaaccacccgccaggtagtcgccgacagcatcgtcaccggccacgccttcgtcgaactctggttcctcggcggggcggtcgctatctacccggcctgcgaagtacaggaggtccaccgcactgacctcgtaaaggagggtggtgatgaatacccgcactgtatacgtcaagccgcacagttcgaggtgcccgccggtattgtccgcaggacgcctgaccccgggtgaactctaccacgtgatcgcacctgccgaggtcgaaggcgtcattgtgctggcaacttcaggcccgtggcacatccggtccgtggtggtgcatagcatgcacccctcggtatatcccgtagggatggctgtcactgacgattcctggcggttccgccgcctgggtgtgagcgagtacgtccaactaattcaagggtacgaacaatgatcgccatcctgttcgtactcggtctgtactgctgcctcggcctgctggcaggcgcctgctactgcatcgcagtggccccgccattcgagaacccgacggaagtgcagttccaggacgcatgcgtgatcgggtgcatctggccactcgtgatcctcgtcggcatattcctggcactccgtgcagtaggccggggcctgctgaccgggctgaagcgtcacctgaacatccaataacctaccggaggtaacatgatccgcacccatacccacaacaccgaccgcgaacagcgccgcatctacaagctcactgagctgacgtcgggtgagatgtacagtgtagtgcagcccgagtccaagcgtggcacgctggtggtcggagtagcaacctgggatagccagagccgacctgtagtgctgcccgtggtcattcacgatgtgggtgcgcatccctcgccctgtcccaccgtgctgcgcaacgacggctggcgcatggtgcttgccgccaagggcacccaggtaacactcaccgccgagtgaccaaggcgaaggctggtgcgccagccttccaccgtggccattccttgccgcgaaccaactcaaccgaggagctacaacatgaccaacgtcaacaccgccaccaccgagaccaccaccgctgctgccctgggcgccaagctcatcaagaagccggctaccgtggaagacttccgcaacaacgtggtcttccatcacaccgccctggccaagctgaccgaagtctacaacgaggcggtcgttgccctgcaaaccgccgagcgcctgtccagcctcgtcgccggtgacgtgatcaccttcgaccacggcaagggcgagaaagccgaagtgctgagcggcgaagtcatcagcgtggttgccggcgtttaccaggtgctggtccgcttcagcgacagcgcacctgccaagctgctggacgtgaaggccagcgccatccgcgccgtccagtcgtcggcagcccaggctgctaccctcgacgaagccatcgcccagggcgagtaaggcccgcacgtaataggcccggccctccgggcctattgcgagctagccataccataggaggagtcaccatgagcaagcgtaaccccgagcacatcagcggcgccgtgcgtagcgtcagcgtccagaagtcggcagccgtccaggaactggaggatcgtctggagtctgccctggccgtgtgccagcagcgggcggaagacatcgatctgctgagccgccgtctccaggccgccgagcgcgcccgccgctgggagatcgacgagattcgcaaccaccaggcgaccatccgcctgttgcagaacgacctgaacgctgcgcatgatgcccacgaggcacaagagcgccgcgctcgcaaggcaaccatcatggcctgggtatgcctgctgaccgcaggtttggccgtcaccctgaaactggcaggagtctgaccatgcagtgcaacgacctttacactaagctcgcagcgagcatgttcaacgtgccgtgctcccaggtgaccgccgagatgcgccgcgtagccaagagccgggcattcgcgtatgcttacactcccaagcgacaggcgtcgggtgggacgtacaccgcccgcgtgagcggcgtcacctgtgacggtggcaaggtggaggtacgtctggacaacgtggagcgcgccgacacctgtggctatgccaagctggaggcgctggaagcggtcagcctgtaccagggtgccgcgaagcgcgccgatgagtatgaaaagctactgctccaggcattcccggtggtggctaagcgtcgtgagcgcttgcgtatctccgggccgctgtcggcggaagacttccgggcaaacctgctcgggacgtgttccgcatatcggaatgccctcgacgccatacggggcgagattacctcgaccggcccgttgcggaaccgcatatgggcgctggtcgaacgtatgcaccgggccgagacgaagctcaggaatgctcagtcggagatcaaccgcctgcgggagcaggaactggaccgcctccgcaaggacatgtccagctactgcgccaacgacgttacctctacggtgagtgcagcatccgcgaaggataccctacgggtggcaaccttcgccgccgccctcgccggtggcgtcgtaggtagcgccctgatgttcctgctcagctagggcgaccagggcctactccggggtcaaatctgagggcgttcctagagcgccctctcgtgtgagtctggaggatcacgaacatgcaataccatttcacgcattacaacggataccgcttcggcgtcgagctggaagacgaggctgtcttcccgtgcatcgacggtaagcgggcgacctgggacaaggtggcggcgtgtgccggtagccttgtgcattacatggcgcaggacctgattgacttcggccagcgcaagttaagggagatcgaagatgagcaagacgagcctgtacccgctgagcctgcatcccggcctgattcaaatcaggacgattcacgtattcagcattcaagctccgagcaacgccgagaactggtggcaatggttcctctggcagcggaagtaccacccgctccgggagagcctgagtccagccggggaactgagtgcgagtatcgccgagtgtgtccaccgcctccgccagagtggctggcaagatagcgacatctggcgcaagaagggaggcgtgctggccctcggtgccttcgacctgtccggcctgatggtgggttcctgcctcgtagtaggcggtgagctgaaggccctgtgcgttgatgaccggcacagcaggcagggtatcggcgctgagctggtacgagctgccgagctggccggtgctgagcacctgacctgcttcgagttcctggagccgttctacgccggcttgggctggcgcaccgagcgccgtgaggcaaactggactgaaggcgagccggatgtgctgtacatgagggcacctggccatgacgcatgaggtgatggtatggcttatcgcgaacaaaccgctggtcatcggagtcgccttcagcctggtggccctgggcgtgctgctcacacagaacaacggcggcccgcctatggcgcccgcatgacctggcacctccaggacatgttcgaggcccgaggtgggctgaggcccttgtgggaggagtggtatcaatggcactgcgccgcgactcctggctaaagcaagcgcaatccctggcagtcggccaggcgggtcgattccgccacgtcctgggatgccagagcatgagccggggcgggaccaacatgacctgcaagaacctgcctgaccgctgggtggcatactgctactcctgtcaggaaggtggcgtggtcgagaaaacgcacgtgcggagggtgcaatgcgcggatcaagaacgcttcatgccctggcccgaggatgcctcggactggacgcaagccgactgctatcaatcgctatatggtttgctgctgtccaagggcatcgactacaacgtgatgacgccggggctgccgctgctctacagcgaaaggcagcatcggcttatcttccctaccgacgcgggctggattgggcgcgctactgccgaccaaaatcccaagtgggtgggctacgggtatcctgccccggactaccatggatggccccaggaatcatcaatgggcaggccatgggtgctgacggaagactacttgtcggcgctgaaggtgcggtgggcatgtcccgaagtcttcgctgtcggtctgaacggtacaaggctgcgcgacaggctggcggcgatcatgttgcagcagacctgcaagcgcgccttcatcttcttggatggcgaccgggcaggtgtccgtggtagtgcaggcgtgatgcgccggctccggtccctgcttatcgaaggccaagtcataccaacgccggacgggttcgaccccaaggacctgacccgcgagcagataaggagcctagtaattggacgtattgacgcttcacgcactgagtgaccgggaccgcttccgcacgttgcggagtgtggtgcccgaaggaatgatggggccggagacgtgcttcgtcatcgactggatcgagcagtattggaaggtctacccggtgcatcagaaggtagacccgcaggcactgcgcgaactgatcaagctgcgaggtggctaccagccagagcaactagcggtggtcctgaacctcgtcaaccaactggacaagccggtggacccggactcgctacagggcgttgtgtcccagctcaacgaactggatttctcagggcgggtggatgccctcctggcgcagtacaaccagggcgaggacatcgacctggcgtatgagctgcgccggctgagcgacgaggccctgcgccgcgagggggtcagcacgccgaccgactacgtgacggacgacgtgtttgatatcctcgcggaggagcagggtgaccacggcatcaagctgccggggctggtgctgccggcgtacatgaagggcctccacgccggggcctcggtgctggtggcggcgccgcctgatgcgggcaagacctcgttcatggcctggatcgctgtccatatcgcgccgcagctcaagcggtacttcgacccggggcggcccatcctgtggctgaacaacgagggcaagggtcggcggatcaagccgcgcctgtactcggcagccttgggcatgaccgtgggcgagattcttgccctggacccggaggaagttcgcaggatgtacgccgagaaaatcggcggcgactctgagctgatccgcatcaaggacttccacggtgggtcgctggctcaggctgaacaggtcatcgacgcgatgaagccagcggtggtgttttgggacatgatggcccacgtcaagggcggccagcgcaaggaccagaaccgtaccgacgagatggagtacaaggtggctgaggtccgcgagatggcggtacggcacgacttcatcagcttcatgacgtggcagattagcaacgacggccacgaccagttgttcccgccgcagtcctgcctcaaggattcgaagacagcggtacagggtgctgtggacgtgcaaatccacctgggccgtctcaacggcgcggatcaacaggtcatgcgtggcctgtccctgccgaagaacaagttccagatggacgggaagccttcgaacgtggaggcaatgattaacttcgacgccgcacggtgtcgtttctttgagagtgtggatcatgcaagctaagcatagccgggtgctcgaaggcaccaaagaaattccgctgggtagcatcgcactgttaccgggcaccgtcgcgggcctgctgctgtgcctgtactccgacgcaactcacgaggagggcgtcgccttggccggtgggttccctcgcgacttgctgcacggcgccactcccaaggacgtggatgttgccctgtacagcatgacctgggggcgggcagagcacctgatccagaaggcactcccggtcctgaaccccatcttcgtccgggatggtgggtggcgctcggactacgccgatggcggcgacggtggtatcttcaagggcgtgatgtccctcgtgggctgccgtgggttgaatggcatggacttggactttaactactacgacgccgacagcctcggtcgagtgatggagtcgttcgacttcaccatcaaccaggtaggcatcgcgtacaactggcccgaccccgaaggcggtccgcgcctgggtgcgtacctgcacaaggacgttacctggggcgtgaacagggaagtcggtaacggctcgcgactgccggagcgatgcgagaagatgcgggccaaggccgcgtattacggatgggagaacgtgtgatgagcaagcgcgacgtggtactggatatcgagaaaggcatctggcgcggcgtagaccagaacgacaaggccgtcgaggccatcatcaagaagcacgggtacgtgatcgtcgagcctaagatcgacgggtgccgtgccatcgtcggtgcgcatggcgtggtgtcccgaagcgggcgccgcttcccggccctggatagcttggaagaccgcatcatcgatcgactggcccgccccgggctggactccggcctggtgctggactgcgagatgtacctggccggcatgcccttcagcgaggcgactggccgcatgtcgcgcaagaccccactgaccgaggaagagctggggtgcctgcacttcgcggtgttcgacgccacccatatagacgtgctccgcaaggcgcgcacctcccacctggtatacgaagagcgccgcgccatggccagcagcctcctggcagcttgccgcctcagcgacactccgacgttcttccaggtaggctcgcaggtgtgtcggtcgatggaggaagtcttaggccggtactccctccaccgcgccatgggcttcgaagggtcgatggagaaagacccgagcatggtctaccgcaacggcaaggtcgccggctgctacaagcgcaagccggagatcaccgtagacgggcgcatcgtaggctacgtgccgggcaggaccggcaagaacgctggccgcatcgtgggctactatgtcgagttggaagacggctcgggcaccgtggccgccaccggtctgaccgaggagcacatcgagttcctgacccgtagccaatactactcgaccgtcaacgacacgatgccaaacttcggtcgcatcgtcgaggtctctgcgatggaacgctcggccaacaccctgcgccatcccagcttcagtcgcttccgcgaccttcccagcaatccaggagtcaaggtatgaagattcgaaagtcccgtaaccgcaactacccggaagatatggtgtaccacgccaccaaccgggattcactgctgtatccgaagtacgtcatgggttccgtgttcatcagccaggacggaacattccgcatctgcgtcatggcagggacctgggaccacgttgggtccgaagttctgcatcatgcacgggacatccaatcccttggcgccggtcgccgtaagttgcaccgggtcatgcgacggctgcgccgcaatctgcaacaggtaggagtcaaggtatgagaatgccaaccgaagaagaacgcacgatccgctgcctgctggcagatatccacgaacccttgaacctgctgttccccggtatccgtgtaaaggccgagacaatgcccttgggctggggagatagtatctgtgccctggtactccgggtgagctacgaacatcgcacgctgggtcgcctggagtacctgcacgaggtccccatcctgcacctgacgcagtggggccgggacggcatgctccagcacctgatgaacgagattccccgtcgggtgctggatggcatgctgcgccaggcacagaaatacagccagagcaactggtacagcaaatgacgactatccgaatcctcgacctcgaaaccgagagctacgagcacaaagggcgcaaagcgtcgccctttgacccccgcaactatatcgtcatggccggctggcgtgacgatgttgacggcaaggtcggccagaaggtggagcatcgcttccgcagccgggccgaagccgaagatccgaacaaccgctggttcaacctcgacggcgtggacgtgatcgtagcgcacaacgccatgttcgaatcgaactggttcttcacccgctaccgggacgagtacctggccttcctgcgacgtggtggccgggtctggtgtacccagcaggccgagtatctgctgagccatcagacgtggctgtacccggcactcgacgaactggccccgaagtacggcggcacccacaaggtggacggcatcaagctgctgtgggaccagggcgtgctcacctcggagatggaccaggacctgctgagcgagtacctgtccggcccgtgcggcgacatcgagaataccgccctcgtattctacggtcagttgatgaagctccaggcccgtggaatgtgggctggctacctggagcgctgcgaggccctgatcggtttctcggcgatggagtgcgccggcctgaaggtggacctcgaagtcgcccgggtgaaccacgccaagcaactggaagaggtggccgggatcgaggctgagctgaagaagctgatgcccgacttcccggaatacttcgagttcaagtataccagcctctaccatatgagcgcatggctctacggcggcgaggtgcggtacaagggccgggtgccctacgaagatggccggatggagaaagccgacttcgtgcgcttcggcacggccaagcgggggactcctatcgagagtacctcggtgcgggtcccgatccacgaagtgaccaaccagggtgagtggcactggcccaccatcaccgagctggcgaccaagcacggcccggtcatcacgttctccgccggcaagaacaagggcagcgtcaaggtgttccgtgaggatacggacatcccggcgaccaagtgggacgatgaccagcgattccgattccccgggctgatcaacctgaacaacctgccggaagtggtgcgcgagaaattcctaggcaagcgcccggagttccagtgcgccctcaccctggcggatggatcgcccgtgttcagcaccagcggcgacgccctccaggctctggagaaacagggcttcgaggcagccaagctgttgatgcgcctggccgagttgcacaaggacaactcctcgttctacatcacccacacctacaacaaggatgggacgatcaaggacacgaaggggatgcttcagtacgtggacgatgatggtatcatccaccactcgctgaatacgaccgcgacggccacgacccgactgtcgtccagccgcccgaacctccagcagctcccgtcaaaggacgaagacgacccggaagccggcagccgcgtgaaggagatgttcgtgtctcgcttcggcgcggacgggatgatcggcgagaccgactataccgccctggaggtggtgatgttggcggccctgtcgaaggaccggaacctcctggcgaagctgatggccggcacggacatgcacttgtaccgcctggcagggaagcacaacaactggaacgggttcgattacgaccagctcgtggccatcaagaaggaccccaaccatccgtggcacggtcgcatgatgcaggctcgaaagaacatcaagcccaaggcattctcggcgcagtacggtgcgagcgcggctggtatcgcattcaacaccggctgtaccgtggaagaggcccaggaattcctggacaacgaggcggccctgttccccgagtccatcgcattccggcagatcgtccgcgacagtgcagaggccaccagcctcgtgatgtacaaggccgaggaccagatgccggcgggcgccttcagcgagatggggtcggatggtaactggcgccagtaccgccgaggattctggcaagcgccgggaggcacctgctacagcttccgccaacaggaacgctgggacaaggaacagcgcaagacggtcatggacttcaaggacacgcagatcgccaactactggaaccagggcgaggctgggttcatgatgaccgtgagcgtggggcgcatcttccgttggatgctgcatcgcccgggattcatggtcaccgagttcctgatcaacaacgtacacgatgccgtgtacaccgactgccacaaggacaccgccgccgaggtcaacaagggcgtgcgcgacatcatggccgacgcggcccgctacatgagcgagcggctgggctacgacatcgccgacgttccattcccggcagtggctgagatggggccgaacatgttcaatatggaggtgatccagtgaaagaactgcatccgctgcacacgcccgagttcgtcaaaacattcctggaccagaccgggtgcctgcctggggtacgccgtacgggccgcaccaccggcattgctctacaggccatcggcatggcgctgtcccatccgagggaaaccctgacgttcgtggaccacccggacggcagctcggcagcactggtggccagcattgaaaccatactggcgaccctgggctaccggaacgtcctcgttcgacccacaacccgtgcggacgggcgcagcgtgaacatcgtcttcaagacgctgccgaacgcctgacgaccttccctactccggccttaaatcttccttcgacacaagagagaccacgtatgactcagcaactcaacgctctgcaagctgcactcgccctggccaacaaggctgccgagaccgcaaccatcgacatgtctgaaacctccaccggcggtggcggcggtcgaatcttcccggctggcaccgccatgggccgattctgcatctacatcgagctgggtgaccacgccaaggaattccagggcaagctcaagaacccggcgcctcaaatccgcctgggcttcgcactgtggggcgacgtgaacccgcaggccggtaatccgcagagccgcccggacgacctgttccacacctacgaggccgacggctcgatcaagcccggcctgttccgtaccttcgagatgaccctcggcaacaacgagaaatcgaagaccaagctcgccttcgacaagatgaactggagcgggcagcatacccacttcgctcagatgctcggccaggcgttcatcatcccgatcaagcgcaccaagatcaccaagggcaacaacgccggcaaggaacgcaacgacatcgattggggcggcatcatgaagccctacaatccggtcgatggcagcccgtacaacgtgccggaactgccgatggacctgttgcagtatttcttcttcgacgcgccgaccaaggagacctgggacgccctgcacatcgaaggcacctcggacaatggcaagtccaagaacttcctgcaagagaccattcgctcggccaccaacttccctggctcggccctgcacatcatgctgggcggcggcgacgatctgatcatcaagccgacgacccaggccgcaggcagcaacctgccggcagtgcccaacgtggccgccgatgcaggcgtagcagcagcccctgctgtcccggcagttccgcaggcagtgccgcagacggcccctagcgtgccccaggtggcgaatgtagctgcccctgtggtaggtactgccgaggcacagaacgtgctgcctgacgtaccgcaggtggctcaggtggcagctccggcggcggtcgaagtcccgtcggtcccggtagtgccggcagtaccgcaggtctaatgcgcctgccatcggaagagttcctggcaggactatccgcgcagttcgaccgcagcatggcaggcgggacgttggtgtgtgacgccgacggacccgcctacgtggctgcggccactgctaagaccttggacactgcactccggagattctggaagctcattttggagcagcagttcctagcgcactgcacggggacacgggttcacctcacggcagcaggtggggcgaaggcgtaccgggacacgtatccgaccatgaaaccctaccagggccagcgcaagggtaaggcaaagcccgcgctgctggagcctctgcgacgggccgtggcggacgtgcatgagcgcggcggcgcacccgaagggatcgatgtcatcctgcacacgttcttcgaggcggacgacggcatgatgatggacgcctacgccatgcaggacaaggccatcatccggtccgacgacaaagacctgcggatgacgatctacccgtattgggagatcgacacggcgtgtgtgagcaggatcgaaggcggcttcggctacctcaaggaggcatacacgccttccggccagttcaagctcaagggccacggacggaagttcttccttgcgcagtggctcggcggcgataccgctgacaacatccgagggatcgatcgattcaacgggaagctctgcgggatgaagacggccttcgatatcctccacccgatcacggacgaggatgaagccatcgacatgatcctggaggcgtacgccaagatcaagcaaaacccgctggcagaggccgaggtgctgtggatgcgccgaacgcctaccgacaacgcagcgcagtacctgttaagccgcgaccttcgtccggccttccgccagtggatcatcgagctggacgcctaccacgaggcgctgctccagaagcggagggagagtgactatgacgagtgagccgaaggtctaccagataccgcgcagccaacagcgcaccttcaccctgaagctgtgggccgagcagggcaagctatgcccgctctgcggtaagcccatcgatatcagcgtgaagggcgaggcggtgatggaccacgaccacgagacggggctggtgcggggcgtcctgcatcgatcctgtaacaccgcagaaggcaagatcacgaacgcggcgggttcctggggatgcaagtcgatgaagtacaccgacatcatcccctaccttcgtgccctcctgacgtacctggaggggccgaagcatccgctgatctaccccctgcacaagaccgacgaggagaaacacgaagcgaagctggccaagcgccggcaggcagccgccaaacgcaaggcggcgatggccgtcgcaaagcacaacgcgaggaacgtatgagcaaactccgcaagcaattcaccaatgagtacctgcgcaacgtctatgtcgagctgggtctcaagaagggcgccgagcatctgaccaggcattcgcgcttcggcgaagtgagccgccagtgcttccgcaactggtgcatcaagctgggcttccacgacagcaggacacgcggcacgtacgccaagaagggtgcgctgcactggctgggccgaaaggcggccgaggtagtgcgcaagttccctggcgccgtgggcaacgtggtcggccaagggccgaaggtgttgagcctggacatcgagacctcgcctatcgagggctgggtctggtcgctctggaagcagaacgtgggcctcaaccagatcaagcgggactggaccatcctgtcgttctgcgcgaagtggatgcacagcgacgaggtgatctacatggactgccagggcgaccccctggacgacatgcacctgctggtcgccctgcacaagctgttggacgaggccgacatcatcatcgtccagaacggcaagcgcttcgacgtgcccaagatcaacgcccggttcttcctgaacaagatgccgccgccacgaccgttcaaggtgatcgacaccttgatcatcgccaagcagcaattcgcgttcaccagccgcaagctggagtacatgacccacaaggcatgcaccatcaagaagcgcctccacggcaagttccccggattcgacctgtgggcagcctgcctccaggacaacccggaagcctgggaggagatgcgcctgtacaacatcgacgacgtacgatcgatggaggagctgtacatcctgatgcgcccgtggttcgtcggccatcccaacgtggccgtgtacttcaacgacgctgagccgactatccgatgcccgaagtgtggcgacacggatgtcaagcaagaaggctgggtgcatacgcagaccggcaagtacgagcactatcactgcggtggctgtggtggctggagccgagggcggtatacccgcaacacctcggaacagcgcaaggccctgctgagcaactaaggaggctatatgagcctggcgttctccgatccctacgaatctacgggcacccagcccggccagtaccgcaaaggcgcggccccggacgagcgaaaggccggcaagctcccgatgcacctggtggttgaaggcttcccgctgctaaagcgggagcttgcccgcatgatgcagtgggccgccgaggtcaagggctacaagccccacgactggaagaagatgtcggtgggcgagttcaaggccgcccaacaccggcacgaatcccaccgcctgctggacgggccgctggatgacgagtcgaacctgatgcacctcgtgcatgaggcattcaacgcaatggccgccgccgagcgtgccttgatggaccgggagaaaggcaatgagtaaaatctgttggtgtacccgaccgcacgagaccgacgaaggtgtacgtgtcatctgggccttcaacgagcggggcatcggggtaaactacgtcacggcgtacgtcacgccggcgatgatccaccacccggactggcgcgataccatcctcccggacatcctccaggagatggcggagcgcctggaccgcgaggttaagctggtggaattgcgctggttccgcgctgagattctgagctgcggggaatggcgtgactaccgagcaatgacgctggacggggcggtcagcctggccgaggccgagtggggtcccgaggatatcgggcgcgtaatcgaaagacgataggagacggaatggacctgatacagcagcagatcgcccacgaagaggcccttgtcggggcggcgcagaacgacgcccgcattgccttggaaaaggcgatagcccaagggtccatcgaccgcatcccgagggcacgcatcatgttgatgcggatgctccccatcgtgaccgaagcgatcttcgcccaccaggaagcgaaggcggcgggaccggcagcgaagctgcgacacctgctgcggatcatcgacgcccaggacctcgcggtcatggcgctacgggccgggctgtcgatgctcatcaactacccaacgatcaccgcgacgaagtattacacccatatgggcaagatgctctgccgcgagatcgaagtgcggttggccttcaaggtcaaccaaccctattacgaccggacgctggactacctcaagaccagcaggactcgcagcgtccggcacatccagaagacgatggacgcccttctggacgcggtactgcccgaggaggcacgtatcgacctgccggatggcgactacctgcgtctcggcaagttcatcggtgacccgctgatccaatgcggcctgttcgagccgaaccgcttcacaggccggggcggtacgagcgtccacctggagccgtcgccggaggccaaggagttcctgcaagacccgtcggcggcgatgacctggggaggcccaggccgtagcgtaatgctggcaccaccgagaccctggaacgactggtgcgatggcgggtactacagcgccaaggcgcagaagcatcacgtattggtgcgtcgtaccaaacaccagaccaagcgggcacgtcagatgcagctccgccacctgggccgggacaagatgcccaaggtatacgcggcggtcaacgcactgcaatcggtggcctacgagatcaaccacgacgtgtacgagatcatcgagcgcatcttcacttccggcggcggcgtgctgggtatcccgcagcgtacctacccggacaaacctgagttcccgctcggcgacgagtgggccaaggagaacgccagtgaacaagagctggaagccttcaaccgatggaagcgatccgtccaccgatggtacaccggggagcgggagcataccgccaagcttcgcgaatttgctgcactctaccgagttgttcgagagcatcatggcaaggcagtgtacttcccgatgcacgttgactcccgtggccgcatgtactattggggcacaccgaatccccaagggtccgacatcgccaaggcatgccttcagttccacgaaaagcgcgccctcggcaagcgcggcctgtactggctcaaggtccacgtcgccaactccctcggatgtgacaaggtgtacttcgacgaccgggcagcctgggtcgatgagcgatgggacgacttccagcgagcactcgacgaaggcccggagaactatccgaatctcttccccgaagacgagtcgcccctgtgcgccatcgccggtctgctggagctgcgggcggcctacgcatcaggccagccggagaattaccgaagtgggttcatcgtccatatggatgcaacctgctccggcctccagcactactcagccatcctccgagacgagatcggcggagcatacgtcaacctgttgccacctggacttgccaaagctgacatctactcccgagttctcggtctcgttgcagagtctctggcacgagacatcgagagtgctgaaggcgaggctcggggctacgctgtactgtgggataaggccggtcttgccaggagcctgacgaagaaaccctgcatgacgctggtgtacggaaccacgttcaagggtgttgtggaccactgcctggactacctggacgagtccggcctggagattcccgagggtatcccgtcataccgcctgggaagctacatggcaacgctcatactggacgcaattcgcgagacagtaccatcggcagtcttcgccatggaatggctccagcggctcgctaaggcccttcctgacgcatccaaggatttgcactggaccacgccactcggcatgcaggtcttccagtcctacccgaagaccgaggaggtccgggtgcggctgcgggccgaggctgtcgagtacgtcaccctgtacgaggccaaggacgagctggacccggtacgcaacgccaacggcatcgccccgaacttcgtccacgggctggatagcagccacctgggcctgacagccctggcatgcgcggcggagggaatcccgatccaggccatccacgacagcatgggcacctatgcggcagacgtggatcggatgcacgtccacatacgggagcagttcatcgccatgtacagtggcccctgtgtgctcgtagagctggcaaatcagcttggggtagaggctaccccgccccggaggggatcgttgaatctggaggctgtacgggactcctgggcgttcttctgctgaggtggattatgtcacccacataggagcaagtgcatccgtccaaggccctcgtagagggagcggggagagaggagaggtcagggaagacctggtagaggagaggtggagatgagaatggatgactacgaaggattctagatagaatagactaaccagcataggagatatgatagatggctactatgaagacccaccgccctacggttatgtcacccacagtggaaggatcgagaacaggcaagggtacggcccgtcctgtcacgttcacctctcagcagatcgagtggttagaacagaccttccccgaacatcagatcggtcctggaaccacgatggaagacatccagttccaggccggcaggcgagacgttgtgcgagcagtacgactgcgccgacgtgatgccatcgcagtggagctgaagtgatgagtaagtccatctggcgagtacacgcaaaggccggcactccctcggaactccagggcctgtgctggctggcaatacaggagctggaggagttcaccctcttccgctcgaaggacgacgccctgaatgcgatgctggacagtatcgagggcaacgatcgaaccgagctgttggtattccgcgatggtcagttggccggcggtgcctgcatcgtgttcgaggacgacccccacgtcggcccgtgcgtcacagcacagtggcagtacgtcctaccgcgctaccgcaatacaggcgtggtccgggagttcatccgcgaactccaccgtcaggccggctggggtcaaatccccctcgtgtgctggagccatcgtgaaagcgatagccggtacacgatccactaccggagagccaagccttatgggcaagaaagtcaagaaggtgctaggcaagaccatcatcggcaaactcgctgatggcctgctgggcaccgaccttagcggcgcacaatccgatgcccgcaagatggaagagcagaaccgcctaatgcagcagcaggcggaccagctcgcacgaaaccagcaggttgacctcaccgccgagaacgtggcgcaggttgacctaggagcgatggccgatgccactggcaccggcactcgacgacgccggaatcaggcgggcacaggcgtatcgcaaaccctcggtatcaactactgacgaggtacgccatgaaaaccaccgcagctatgctgtgggagaaacttcgggatgggagcgtggagagtcgagccatcgagttcgccaagaccacgctgccctacctgatggtcgatcccatgtccggcagtcggggagtcgtagagcatgacttccagtccgccggcgccctcctggtgaacaacctcgccgccaagctggcgagatcgctgttccccacggggattccgttcttccgatccgaactcactgatgcgatccgccgcgaggccgacagccgggacacagacattaccgaagtgaccgctgccttggctcgggtggatcgcaaagcaacacagcgcctgttccagaacgcctccctggcggtcctgacgcaggtgatcaagctactgatcgtgactggcaatgctctgctgtaccgagacagcgccgccgctacggtggtcgcatggtcgctccgctcttacgcggtgcgccgggatgcgactggccgctggatggatatcgtcctcaagcagcgctacaagtccaaggacctggatgaagagtacaagcaggacctgatgcgcgcaggccgcaacctgtccggttcgggcagcgtggacctgtacacccacgtacagcgcaagaagggcacggcgatggaatacgccgagctgtaccacgagatcgacggcgtgcgtgtgggcaaggagggccgctggcctatccacctgtgcccgtacatcgtgccgacctggaacctcgcccctggcgagcactacggtcgcggccacgtcgaggactacatcggcgacttcgccaagctgtccctgctgagtgagaaactcggcctgtacgagctggagtcgctggaggtcctgaacctcgtggacgaggccaagggtgcggtagtcgatgactaccaagacgccgagatgggcgattacgtgccaggcggtgcggaagccgtccgtgcttacgagcgtggcgactacaacaagatggctgctatccagcagagcttgcaagccgtggtcgtccgcctgaaccaggcgttcatgtacggtgccaaccagcgcgacgccgagcgcgtcactgccgaggaagtccgcatcactgcggaggaggcggagaacacgctgggcggtacttactcgctcctggccgagaaccttcagtcgccgctggcgtacgtctgcctgtccgaggtggacgatgcgctcctccagggcttgatcaccaagcagcacaagccggctatcgagacgggccttcccgccctgtcccgctccgccgctgtgcagagcatgctcaacgcttcccaggtcatcgctggcctggccccgattgctcagctcgatccccgcatctcgctaccgaagatgatggatacgatttgggcagccttcagtgtcgatacctcgcagttctacaagagcgaggcggagctacaggccgaggcagaacagcagcgccagcaggccgcacaggcccaggcagcgcaggaaaccttgctggaaggcgcttccgacatgaccaacgcactcgcaggagtctgatagatgacccaaccgaacgaacagcaactgccgccgggcctcgctaacctggttgccaacgtaccgcctgccgccgcaccgaccccgagtcatgtgcaggtgatgccgaacccggtgatccaaccgcaggccccggtccagcccggccaggtaggtgcgccgcagcaactggccatcccgacccagcagccgcaacccgttccgaccagcgccatgacgccgcactaccaaccggtagcggcacctgccgtgggtcaacccgttgttccgcaagcacccgctcagccggccccggtagctccgccggctgcgggtgcagttcttcccgagaacctggaagtcccgccgccgccggccttcactcccaacggggagatcgtgggcaccttggcagggaacctcgaaggcgacccgcagttggcgccctccatcagctatctggaggcgttctctgacaaactggataccgtccgagccttcggcaaggccgccgagaaccgcgatcctcggttcatcgacgagcactatctgaaggaagttctcggcccggcccaggcgcagcacgtcatcaacgtggccaagggcgtcctgacctatgtcgatgcgcaaaccaaggctgtcctgaaccagacctatgccgccgtcggtggcgaggccgtgctgaagcaggccgcaggcgtcttcaaccaacacgctgacccggccaccaaggccgccatcggtcggctgatggactctggcgatgcccaggccatgcagtacgcagcgaagcagatcattgccttcgcacaaggctccggtgccgttgtacaggctaccggccaacccctgggtgctgcggcacctgcactagcagccctgaccgctgagcagtaccgcgcagaagtgtcgaagctgccgctgaacgcatccgaagccgacatggctgcactgcgagagcgccgtaaggcaggcatggcgcagggtatctaacgaccctgccctactccggccttaaactcacatccaaaagagagagaatcgcatgagctttctgaacgacctgacccgtccgaactacgctggcaaggacgcggacgttgacatccacctggaagagcacctcggcatcgtcgacaagcacttcgcctacacctccaagttcgcaccgctgatgaacatccgcgacctgcgtggctcgaacgtggtccgcctggatcgcctgggtaacgtcaaggtcaagggtcgtcgcgccggtgaagagctggagcgcagccgagtcgtgaacgacaagtggaacctgaccgttgacaccctgctgtacctccgccaccagttcgaccaccaggacgagtggacccaatccttcgacatgcgcaaggaagtcgccgagctggacggccaggaactggctcgcaagttcgaccaagcctgcctgatccaggtgatcaaggctgccgcgatggacgcaccggtggacctggaagacgccttctcgccgggcgtgctggagaagctggacctgaccggcctgaccgccaagcaggctgccgagaagatcgtccgcatgcaccgccgcgtagtcgagaccttcatcgaccgcgacctgggcgatgcggtctactccgagggcctgaccccgatgtcgccacgtgtgttcagcctgctgctggaacacgacaagctgatgaacgtcgagtaccaggcaaccggcgcgaccaacgattacgtgaagtcgcgtgtggccgtcctcaacggcgtcaaggtgctggagactccgcgcttcgccaccgacgcaaacgcagcgcatccgctgggccgccacttcaacgtgagcgccgaggaggctgagcgtcagatcgccctgttcctcccgagcaagaccctgatcaccgcccaggtggcgccggttcaggccaagctgtgggaagaccacgataagttctcgtgggttctggataccttccagatgtacaacatcggtgcccgtcgcccggacaccgctggtgccatcgagctgaagggtatcggcgccttcgacatcaccgcgtgacggctaaggatttaaggtaaggaggtttatttatgcaggataagaaaagcaaatccaaaaccgctaaaatcgactggagccattggaccgtgactgttcctgaggagaaccctgacaaacccggcaaaccatattcgctgggttaccccgaaatcttgaactacgctgaggataaaattgcgtcaaaatatatgtatgatgaccctaaggataagtccgtggttttctatgccttcccctcgggggttaccacagccaacacgcattattcacgtagcgagctgcgtgagacgatggagacaggcagcaataaagtcaattggactttcgccaaaggtgggaagatgcgcggaacgtatgcgattgatgatatttctaaggagccagatggaaagtattctcgtgtcattatcgcacaaatccacggggttcttacggacgagcaacgtgatctgatcggccaaaaggacaataatgctcccccaattttgaaggtttattgggacaaaggcaaaattcgtgttaaaacgaaggtcttgaaggatttgaatgcaccatacaaagaaatgttgttggaacatgcgtggggtgacgacgaaggccgcaattttaaagagaagattgatctgaacactcgttttacattagaagtaaaggtgtctgatggtcgcatggaggtgattttaaatgatactgaaagcttggtttacgatgatatccatatgaagaaatggggaatctttgaaaattactttaaggccggtaattactttcaatctaagactccagggacattcgccaaagttaaaatctactctcttcaagtcactcattaaatgctactactcgacgcagtgaatgtcatcctgcgcaagatcggcgagctgccgatcccgagcatggatgagacgtatcccaccatggccattgccctccctgagctggaggaccagcgcatccagttgctgacgcaaggctggtggttcaacacctggtggaagcacaagctgacacctgatcccacgggccgcatcaacctgcccaagggcaccttggcattctacccggattccccggacctccagtgggacggcctgggagtgcgcgacgccaacaccggcgacgaccgcatcggtaagtcggtcgagggccggctggtgctgtcccgcgagtgggaccgtatccccgagatcgcacagcgcgtcattgcgcaccaggccgcactcgcggtgtacacccacgagattggcccggacgagaccgcccaggtcatcgcccaggaattgcaggcgtatcagaacgaactgtcccgcatgcacacccgatcccgtccgctgaacacccaggccaagcgtagcttcagccggtggcggcgcagcttgaggacctgagcatgagctacaagcaatccgcgtatcccaatctgctgatgggtgtgagccagcaggtgcccttcgagcgcctacctggccagctcagcgagcagatcaacatggtatcagaccccgtgtcggggctgcggcggcgcagcggtatcgagctgatggcccacctgcataccgaccaaccctggccgaggccgttcctctaccacacgaaccttggtggccgcagcattgcgatgctggtggcgcagcaccgtggcgagctgtacctgttcgacgagcgggacggtcgcctgctgatgggtcagcccctggtgcatgactacctcaaggccaacgattacaggcagctacgggccgccacggtggccgatgacctattcatcgccaacctgagcgtgaagcccgaggccgaccgcaccgacatcaagggcgtggaccccaacaaggccggctggctgtacatcaaggcgggccagtattcgaaggcattctccatgaccatcaaggtcaaggacaacgccaccggcaccacctacagccacacggctacctacgtgacgccggacaacgccagcacgaaccccaaccttgcggaagcgcccttccaaacgagcgtaggctacatcgcctggcagctctacggcaagttcttcggtgcgccagagtacaccctgccgaactccacgaagaaatacccgaaggttaaccaggatgccgatgcggcaaccatagccggatacctcaaccagcgtggggtgcaggacgggtacatcgcattccggggagatgccgacatcaacgtcgaagtgtccacggacatgggcaacaactacggcatcgcgtcgggcggtatgagcctcaacgcaacggcggacctgccggccttgctgcctggtgcgggcgcacccggtgtgggtgttcagttcatggatggtgccgtcatggccaccggctcgaccaaggccccggtgtacttcgagtgggactccgctaaccgccgatgggcagagcgggccgcctacgggaccgattgggtcctgaagaagatgcccttggcgctacgctgggatgaggctaccgacacctacagcttgaacgagctggactatgatcggcgcggctccggcgacgaggacacgaaccccacgttcaacttcgtcacccgaggcatcaccggcatgacgaccttccagggtcgcctcgttctcctgtcgcaggagtacgtctgcatgtcagccagcaacaatccgcaccgctggttcaagaagtcggcagccgcgctgaacgacgacgatcctatcgagatcgccgctcagggcagcctgaccgagccgtacgagcatgcggtcaccttcaacaaggacttgatcgtcttcgccaagaagtatcaggccgtggtcccgggtggcggcatcgtgaccccgcgaacagcagtcatcagcatcaccacgcagtacgacctcgatacccgggcggcacctgctgtgactggacgcagcgtgtacttcgctgccgagcgtgccctgggtttcatgggcctgcacgagatggccccgtcgccgtccacggacagccactacgtcgccgaggacgttaccagccacatcccgagctacatgccggggccggctgagtacatccaggcggcggcctccagcggctacctggtgtttggcaccagcacggcggacgagatgatctgccaccagtacctctggcagggcaacgagaaagtccagaacgccttccaccgatggacgctgcggcatcagatcatcggcgcgtacttcaccggcgacaacctgatggtcctaatccagaagggccaggagatcgccttgggccggatgcacctgaatagcctgccagcccgcgagggtctgcaatatccgaagtacgactactggcggcgtatcgaggcgaccgtcgatggtgagctggagctgaccaagcagcactgggacctgatcaaggatgcctctgccgtataccagctccagcccgtggccggtgcctacatggaacgtacccatctcggcgtgaagcgcgagacgaatacgaaggtgttcctcgacgtgcccgaggccgtggtcgggtcggtgtacgtggtcggctgtgagttctggtccaaggtggagttcactccgccagtgctccgagaccacaatggcctgcccatgacctcgacccgcgcagtgcttcatcggtacaacgtaaacttcggctggaccggcgagttcctgtggcgcatcagcgacacagcccgacccaatcagccgtggtacgacacgacgcctctgcggttgttcagtcggcagctcaacgccggggaacctctggtggacagcgccgtggtgccgctgccggctcgggtcgatatggctacgtccaagttcgagttgagctgccatagtccgtacgacatgaacgtccgggctgtcgagtacaacttcaagtccaaccaaatctacaggagggtgtgatggctttctggctaccactattggccgctggcggcatgtccgcccttcagcagggattggccaacaaggaagagcgcaacaagatcaaggccgagaacaaggctcgactgaagacggacctcgacaacctgggcgccgccgcccgcgacatcgccaacctcggagtcatggccgctagctaccgcaagcaggccgtggcctcgcaggtggaggccaaacgccaggggatgctcgccggcggcagtgccgaggctcaggccggagcgttcggcgtcaagggcgcatccgttgatgcggtggccctggatatcgagcgggaggtcggcgaggctctgttccagattgacgacaacctggacaatcagatgtggaacctcgccgagcaggcgcactccatccaggcccaagctaaggccggcctgctgggacagaagagcaccactgcggggcaacgatccccgctggtggctggcctgatgtcggcgggttccctgtatgcaagtcaatacttcaagttcggcgccacgcctaaaggaggcaactgatggcggaatcgcaacgtgcttcccaagagcttgggatcaacgtcgggcagacgcaactccagccgggccagagtgcccggcgtggggtgcgcgactccgaagtcaactacagcgggccgagtgtaggctcacagattctcgacggcatcctcggcgccggtcagcaaatcgcaggcaagtggttcgagcacaacgtgcagcaggaagtgctgcgcggtgagcgtgcccgcatggccggcgaggccgaggaggcggtagacagcaacatcctggccaagcccttcgtgaagggcggctggcgtaagcaggactaccgtatcgctcaggcggacttcagcctgaagatgcagcagttcatcgccaacaagggccgggagatgactcccgaggagttccgcaaatacctgtcccaggaggctacgcacgtcctggactcgacaaagggcatgaaccccaacgacgccctacaggcgctggcgcagcagcagaaggccgaggagcagctcttcggcatgcaggccaaggcgtacatggactggtccatcgaccaggccgcacgaggcttccgcacccagggtaacagcatcctggccaaggctgtacaggcccaggccaccggcgacgaactgtcccgacaactcagcctggaagaggctggcctgttctataccaacatcatgacctccgaggatatcccgctggaggtgcgtgacaaggtgggcatgcagttcctggcagccagcctggacatgaaccagcggggcatctacgagagtctgcgcgatgccggcttcctggacagcatgtccttcgacgaccggcgtgcgctcaacggcctctatgaaaagtcgaaggcacagacccgggccaaggaatcgatggctaccctgcgggccgatgcggacttccagcagcgggtggctaacggggccatcacagaccttgccgaggtcgaggcgtactcccggggcatggtcgaggagggccgctggagcgacgcccaggccatctcgttcatgaccaaggccatgaccggcctgggcaacgctcagcgcatgcagggcatcatggcggccctggaggctggggacatcaacgccctgcacacgctggggacgaacgtctccgaggcactggagcagtgggacaagatgcaggcggccaacggctcaagcctgaccgatcgactcgtacagggcacgcagctcggcctgcgcctggggaccttccccaagacctacggcgagtccgtgggcagcgccgtgcggatgatccaggcggccaaggaaggcgaggcgaacccggagctggtcaatacgttgaacagcatcttcgagcaggtggcctcggcccaggagatcaacccctccgccggcaacgtgatgctatccggcatcccggaagccgagcagggcgctgtggcctgggcactcaagcagatgaagatgggcatcgccccagctcaagcactgcgcgagttcagtgccaacgccgaagtcgtgaagcagatggacgagttcgagaaaggacagaacaccaaggcattcaaggacaacctcggcaagcaggtcaacgacaagttcgtgaacaacatcttcggtcgggcctggaacatgctgaccggtgagagcgacctgagcaacaacgaggccgttctcagcatgtaccgtcgagcaaccatcgacgaggcgaactggctggccagcgaccgcaagcatgcgggtctgcttaccagtgacacgggccgcgaggccctgctggagatcgccgccgccaacgtgcgtaaccgcaccatccaggtaggcgaaggtcggaacctgaaggaaggggacctgttcagccgccgcgacagcgcgccactgatcctaccccgtggaaccaccgccgagcagctattcgggaccaacgataccgagaccatcgggaccgtcctggccgagcagcacaagccgcatgtcgaaggactcctcggttacaagtcggtagtcgccttcgagtacgaccgcaccagtggcagcctcctcgccgtcgagtacgatgagaacggtgtggccctggaccgcacgcgggtcgatccccaggcagtcggtaacgaggtgctcaagcgcaactcggacaagctgaacgcgatgcgaggtgccgagtacggtgccaacgtcaaggtcagcggcacggacattcgcatgaacggtggcaacagtgccggcatgctgaagcaggacgtgttcaactggcggaaggaactggctcagttcgaggcttaccgaggggaggcgtacaaggatgccgatggttatagtgtgggcctggggcattacctgggcagtggcaatgctggggcaggtactacagtcacgcctgagcaggccgcgcagtggttcgccgaagacaccgaccgcgcactcgaccagggtgtgaggttggccgacgagctgggcgttacgaacaatgcctctatcctgggcttggccggtatggccttccagatgggcgaggggcgtgcccggcagttccgtaacaccttccaggcgatcaaggatcgtaacaaggaagccttcgaggctggcgtacggaacagcaaatggtacacgcagacgcccaaccgggctgaggcattcatcaagcgcatggcgccccacttcgatacaccgagccaaatcggggtcgattggtacagcgccgcaacagcggagtaagacatggcacagcaattcaagggccgcatgacgcccaagtacccacttgaccaagcacagctcgacgaggcccaagtacagggccaactcgacgcagtgcctaccgtggggttcgacgccctgacgggtggcgagatcggagaacggaacgtggcagcgggccaacgagccaacgcgcgggaactggaacgcatcgtagcggaccaggaactgccggcccttgaccgtgcttccgcactctggaaccagtccaccctcgtcggacgctggggcgatgcgctccagctcgacgcggaccttgcggcgaacagcaccggcgaggtggaccccaacttcgacgccgggacctacggggtccaggcgctccaggcggcgggtatccagccgactgacaactatctccagatcatggcccgtgccggcaatgccgaggacgcggcctacctcctgtcgaggattcaacggtatgagcaggacgagcaaatcgtgcgggacaacccgtactggaacttcgcggctggcatgctggaccccgccgctctggcagttgatgcggttactttcggcgctggccgtgctctgcggctcggtcgtgctggcatggctgctgctggcggcgctgggcaagtcgggtatgttgctgggctggatgccgcaggggccgacgtggatgccggaacctacatcgtggcaggtgctcttggcgctggcgtgggtgctctgctggggtctggtgcgggacgcattgccgcagaggccccaacgcaaccgcatgtgcccgaagtatcggcgcctactgtcgggctgccagaagtagccatgaccgccgaggaggccgccgcacgcggcttcaaggccggtgacgtggtagacctgctggacgagggcaccgtgctgtcccgtgtcagctcccgtgtggagcaggccgagataccggccatcccgcgccgtgacactgccttcggcgacgagctgcacagcctgtcgggccggaagctgtccgaggtcctggaccacctcaagacccacgcagaggttcccaagccgctccagggcatcgccgccaaggtggctgataccatcaggaccctggagggcctgggccagcgaaccgcgttccgagtggtgcagggtggcgacactgccagctccgcattccttaagccgggcacggcgggcatccactccacccagggcctcgacaccttggtccaggtacgcggcagcaccgcacctggtcgagttggcaccaacccggtgaccgtgctccacgaggcggtccacgctgccaccgtaggcgtgatgaacgccgccctgcgcaaccctggcgcgatgagtccgaaggtggctcaggccatgcagaccctggagaacgtccggggtaacgtgctcaacgccctgaagcaggaccgcgccgccggtcggcaactgtccgagttcgaagagacgctgctggccggcaactccaacaccctggcaaacgtcaaggagctggtggcctggggcctgacggatacccgcttccagcggaccctgaatcgcctccgctacagcgacggcgggccgggcctgtggacccgtttcgtggagggcatccgtagcctcctgggcctccggtctgatgccgacacggccctgagtcgcgtcctggccgcctctgagacgatcatggacgccatgccggggtacactaaggctcaggctaagtgggccaacaagggcgctccggtgaccgaggaggccagcctggagaccatcgtgcggaccaccagggagcgtgcccgcgagggtgcgggcttcgtgaaccggttcttcagcgaggcggacctactggcacagcccggagagggcgcacggcgcctcctgagccgtcttatcgacgaccctgtacgtcgggatgggttcagcacgaacgacaacgcagcgagctatttgcgccgttaccggaacgagttcgagggctacgtgaagtcctacgacgagatgatggccaaggcaatggctgagcagggcgtgggcctgacggcacgtgcgctgaactcccgccgcgccatggcagtccgggaccagcttaacgagcaggtcacccgcgagctgctgcgccgggaccgggagtggaccgcctacggcagcgtccgcgtagaccccaacctgccgccgaccatcaaggccctggccgaccgctcggacgagattcacggtctgatgggtcagcgtgccagggaagccggggtccggggcttcgaggacttcgctccgcgtcccggatacttccaccgctcgtggaactggtccaagatggcgcagatggatgaggccgcccctggcctggcccggcgtgctatcagcgaggccgtgttccggggcatccctgggctggagcgtgccgacgccgacaccatcgcacaggccattgtgcagcgggcacgggaccgggctaccggtatccgctccgagttcatgggcgcgatgggcgtggcggacacggcattcatccggcaggcgctggaggaggccaacgtgtcccaggccaagttcgacagcatcatggccaagatcgagcagaagcagtccgaccagggcaccgtcaaatacggcaagggccggctgtcgctggacatgaccgccgagatcaaccacaatggaaccgtgtaccgcgtgcaggacctgatcgaccgggacctagaccgcctgatggagaactacgccggcagtatgtcgggccgctcggcactggcccgcgcaggcatgcccggcgactccgaggtggaagccttcatccgtgagtaccagcgggaggccgcgcacctgggcaccgacaaggtgcaggagctgacgggccaactgcggggcgtcttcggggacttcaccggcaacgtgccgcgagagcatcagctcggccccgtcgcacagcgggccagcgggctgaccagcgccaccatgctgggattctccggcgtgtaccagcttgctgagctggccacgatggctcaccgccagggcgtcttcaacgtaatgaaggccatgctgaactcccgcctgggtgacttcgtaggtgccatgcgtcgagacccggacctcgctgatgagatgcagaccgtcctcggcctgaacctcgccaacgacattcggatgaagccctggaagcggcagttcgacaccttcctggccagccaagacaccttcatggatcgcttcctccacgcgggtaagcaggctgtcccggtgctcaacggcatgaagttcatccacaactggcaatcccgcatgaacgccaacctcaccttgaacaaggtggcgcgggcggcgcagggggatgaagcagcccttcgcgtgcttcagcagtacgggaaggacgtggactggacgccagtcctggcgcgggttcgcggttatgtcacatacagaggaaggaacgcccaatccatgaattggggcgcctggagccaagcagacgtgaacaccgtcatgaacaccgcattgcggatcatggacgactcactgctgtacggtcgagtcggtcagaactcgggctttgcccggtcacctgtcggccaaatcctggggcagttccgcagctttgtggccttcgcgcacaacaagctcctccggggaacctatgagaactccggcgtgcttggcgtggcctcgctcctcgcattccagtatccgctcaccgcgctgatgatgggtgccaaggcagcgatcaacggcaagttcgacacctctgatgaaggcatccgcaagatggccatcgacggcatcggttacactgccggcctcggcttcaccgccgacatgtggggcgtgatcaccggacactctaggatgtccgccccggtcttcggactggcggagcactccaacgaggtgttccgtggcgtcaaggacctagtaaccggcgacgaccccgcagccgccaccggcgatatcgtcaacggcgccgcaggggcactgcctttcgtcaacgtattcccggcgaccaagttgctgctggaatccatcaaaggggaataacgtggctcggttcaagaatcccgagaccatccacgttgcagatggggtcgaggctgtcttcagtctcgacttcccattcctgcggcgtgaggacgtattcgtccaggtcgataagatactcaccaccgactatacgtgggtggacaacaccaacattcaattggccgtggtgccgaagcagggccaagaggtccgcatcttccgcgacacgcctgcccaggtcccggacactcagttcagccagggcatcccattcctgccgcgctacatcgacgcgaacaacaagcagctcctgtacgctgtgcaggagggcatcaacaccgcgaacctcgccctggatggcgtactcgacgcgatccgtatcgccgaggaagctcgccgcctggcacaggaagcactcgacgccgccaatgaggcgctgcgccgtgccctgggcttcgctgagattcgcaccgtgaccgaggactcggacatcgatccgagctggcgtggttactggaaccgctgcatcaccgctgacaaacccctgaccttgaccatgcagatggaagacccggatgcaccctggatcgagttcagcgaggtccacttcgagcaggcaggcgtgcgcgacctcaacatcgtggccggccccggcgtgaccatcaaccggttgcagaacaccaccatgcagctctacggcgagaatggcgtgtgtaccctcaagcggctgggcgctaaccactggatcgtgttcggagccatggaggacgaataatgcgcggcattatcgcgggcatcatggcctcccaaatccggcgtccaaaaccaatcctggcgacgtacccgtatcccatcctagctacagacgacgcatggtcctgccggcccaacatagtggcggcgctgacacgcgacactctgcacgaggttgtgaaccagccaggagaggacacctaccacgcgacctccagcgtggtaagcgtactgctgcggtcgctgactcagctcggctacggcggtggcgatgggttcctgaccggacctgccgtcaatgcagccttgctgcgcgatacggtgaaggaatataccgcagagccttacgcattcctgtcgcagaccgcagtggccggcgcagaactgaaggttgtggttgtatactccgagtatatcgtggagccgtacgccttcgccacctcgacagcaattaaacaggcggaactgaccaatgtttgagacacgagttaagggtcgctacaccgtgacccatctgaaagccacgggtgaagtcctggcacagtacaccttcgacaacctcatcactaacgcgggtctcgactggatttgcgccatggacacctcagacctgttctcacaggccctggccgtgagtaccagcacagcagaccccaaccccgctgcaccctccctgccggaggaagtacgacggaccacctcgtacgccccgaacggggatgttacctcgggtctggatggggagtggatttactggcacaagcggtggcgcttcccgataggcacccttaccggacaggtactggccaccgtgggcatcgtggcccaatccgaagttgggttcgagagtaacaccggcgcgaagattccggcagggactccactgtcctacacccggatcaaggatgccgccggccaacccaccaccctggtggttcaggccgacgagattctcgacgtgcagtatgagctgcgcagcaaggctgtggcgatggccgaggccaagttcgtgatctctggagtcgagcgtaccatccgccttactccgctgcccttcgcgaaccggcgtaacctctacggtgagcgctacatcttctacaacgagagtcctcggattgacggtaagaatgcgtccggctcggatgtccaggatggccagtgggtgaagctgtacccgcgatatacgcggggcacctacaaggggcagctaatgctgcgggccaccgttgataacggcaacatgccgggaggcatcaccggctgcaaggacctgaagatttacaacggtcggaactacgcactcaccatcgacccgcctgtagtcaagaacaacacgcaggaattctccatcacgatggagttctcggtagcgagggcataacccatggcactgatctacgacttcaacctggacctcgatccgaaggctaagtccaagttcgtaggtgcgcgaggccgtagggacatcagcgacgtgctagacttctgcgacgggggcgtggccatccaggacccgtcgcagggtatgatggtccgcgtgtggcgaacagagcttcgccaggacgggacctacctggggcacgaggacggctcgaacgagattcgcatcggcggaggtatcgaagaaggtatctccacgatgtccctcgacttcgacagtaacatgaactacgtgtgtgctttcgtacgagccgatcgaactggtgcaatctcctacttcaacgtgcagcagggccgccggctcctcgtggagcttgggcaggttgactatgccaaggtggccttggacgataagcgtcctggagctactgcctgggcacaggtcatcgtaccttacacccgtaacggcaacctgtacgtccgcacacagaacgagaactatacggtagagcacctggaggtggataccggcaaggtattccgaccgctggtcaaatgcggtatgggcaccaacctccgcttccaagtccaattcagagggcacatgtaatgagcaaaaagcagaccgcgagtgctgagcggctgggcctgctacacgagctggtctgcaccgctatcgagcgcaacttcaagtggtacatggacaacgacatcccgatccccgcatcggatatcgctgccgccaccaagttcctcaaggacaacgagatcacctgtgatccgtccgacaccatcaacatcgaccggctccgcgaggagatgcggcaggcgcaggccgagaaccgccgcattgccttggagggcttcatcgccggtgagaccgacgacgagatggaacgcctgtacacccactaaggaggcagcatgacgccgcaagaacgattccagatagcccacgaagtgcgggacatgtacccgcgcttccgggacttctgcctggacgccatgctgttcctcggcttcaagatgacgtggatgcagctcgacatcgccgacttcatgcaggattcgcccaacaaggcgatggtcgctgcgcagcgtggcgaggccaagtccaccatcgcctgtatctttgtggtgtggtgcatcgtccagaacccggctacccgcgccatgctggtatccggctctggtgacaaggctgaagagaacggccagttgatcacgaagctgatcatgcactgggacctgctggcgtacctgcgccccgaggcccgaatgggtgaccgtacctcggccaccagcttcgacgtgaactgggcgttgaagggcgtcgagaaatcggcctccatcaactgcatcgggatcaccgccgccctccagggttaccgtgctgacatcctaatccctgacgacatcgagaccacgaagaacggcctcaccgccaccgagcgggccaagctgacgcggcagtcgcaggagttcacctctatctgcacccacgggaagattctgtacctgggcacgccgcagagtcgcgagtcgatctacaacggcctgcccgcacggggcttcctgctgcgcatctggccgggccggttcccgaccctggaagagcaagagcgctacggcgactggctcgcaccctccatcctggcacgtatcgcccgcctggaggagaaaggccacaacccgcgcaccggcaagggcctggacggcacccgtggctggccggcggaccctcagcgctacaacgaagaagacctgatcgacaaggaactcgaccaaggccccgagggcttccagcttcagtacatgctggacaccagcctcgccgacgagcagcgtatgcagctcaagctgcgcgacctgctgttcatcgacgccacgcatgagagcgtacccgagcaagtggcctgggctgccgacgagcgcttcaagctcaagttcgacgcccaccgattcccggtcatcaagcctgagctgtacctgccggcgctgatggctggcggctgggcaccgctccagcagatgacgatgttcgtggaccctgccggcgatggtggcgacgagctgtcgtatgcagtaggcggaactctcggcccgtacatccacgtcgtgagcatcggcggctggaagggtggatttgccgaggagaacctggagaaatgtattgccctggctgcgcgttacggcgtcaaggtgatctatgtcgagaaaaacctcggcgcgggtgcagttggccagctcttccgcaaccatatgcgatccatcgacccggacaccaacaagccccgctatgaggggatcggcgtagaagaccgccagaagtccggccaaaaggaacgtcgcatcatcgacaccctgcggcccatcatgcagcggcaccgtctgatcttccacgtctcggcgatggattccgaccacgtgtcctgccagcaatacccagcggacaagcgcaacgagcgctccgtgttccaccagattcacaacatcaccaccgaccgaggctcactgccgaaggacgaccggatcgatgcccttgagggccttgtccgcgagctagcacccacgctcgtaaaggacgacgaagccgcaacccgcgctcgtgaagaggctgccaagaaggaatggctgaacaacccgatgggttacactaagtctgtccttcggtctctcggcatgggccgggagcgtcgcaagggccgcccaaaaggacgaagactatgatgctcgataccgccaccgaggcgggcaaaggcaccctcgccgtcaccggcgtggggattgccgtttactcgccctatgagatcgccagcctctgtgctgcggtactcaccgcgctctacgtgggcgctcagctcatcaccctactcccgaagatgctcgatagcatcgcggagcttcgccggaggttcaagaagtgaacaagcccctgcgcggcgcagcccttgcggctgccctcgccggccttgtcgccctggaaggcagcgagaccaccgcctaccgggacatcgccggcgtacccaccatctgctctggcaccactgccggggtcaagatgggcgacaaagccacaccggagcagtgctaccagatgacgctcaaggactaccagcgcttcgagcgcattgtcctggacgccatcaaggtgccgctgaacgtcaacgagcaaaccgccctgacgttcttctgctacaacgtgggtccagtctgtacaaccagcacagcgttcaagcgcttcaaccaaggccgcgccaccgagggctgccaagccctggctatgtggaacaaggtcacgatcaacgaccagagggtcgtatccaagggcctcgtgaatcgccgcaacgcggagatcaagcaatgcctcgaaccatcgtcgcaatactcgtccttgctgtggtagccctgggagcctcatacggcttcgtccagagctaccgagccttgggtatagcccaggaggagatcaagcgtcagacggcccgtgcggaggccctggaggtgcgttacaccaccttacagcgccacgtccaggaggtcgccgccaagaccaacacccagcgccaggaggtggaccgtgccctggaccagaaccgcccgtgggctgaccggcctgtgcctgctactgtcgttgacagcctgtgcaaccgccccggcgcccgctgtgctgtgcgaacaccctctgattgaccctaccacccaggctggcctaatccgcgctgtagcggcctatcaggacgccctggacctatgcaacgccctgaatcaaggagactgacatggcgaacacccgtgatcaatacctcgctggccgtaacaccggcctgaccttctaccaggtctgccagcccggcaccgacaaccgcatcgccctgcacgacatggacgaggccgatgtcaaggctaaggccaccgctgtgattgcagcagcctctgccctgggcggcgagggtggcgctactccaccggacccgctcaccgcctacaaggtgaagaacggtgacaccctgcccgtggacggcggtggctccgtgaaggtgaccgtagccaacggtgccatcaccaaggtcgtgtacaccgcaccggcgggctgagctacagcccgtccaacctgatccacccataacacaaggaactgaaccatggcaaccttcgccgctgcaactcagaaagacctccgcgccttcgccggcaccatcgagaacctgatccgtccgctggaggaagcggccctgggttctggctacaacgagaccaagctgcgcgctgaactggtcgcgcacctcgacgagctgatggctgctgtcgagactgccaaggcgctggtctacaagtgatcgacgagtagctcaagccgagcacctgcacagtcgggtgctccactggaactactggaatttttattgagggctggctgtgggtgggagttggtagtggtgggcgggagtagttactccgggtctaattttggtatcgtcgtgtgagaaccctcccgactctgatcagcccacccttcccccgtaggccctccgcctggtgggccactgcctcgcattgcctgggtgttgcctgggtcatccctgggagcttccagctacgctgggtggtggtgggcttccctgccctgtcgctgtcctgtcgccgcccattctacgcatcctggcgggagtgtcaacccctgggtggtcggtgccttgctcggctacgctccagcgcttccgcgtggtcggctaggcggttggctcgccagcgcttcgcccactctacacctcgctccacctcggaccacttgtccgccagcatcatgcgctgccatgccgcgtcctgctgtagccatgccctgctggctctgtcctgtctgctcagcatcctctgtctcctctgtctggctccctggggcttccctggggcgctgctgtggtcctgtcgggtgatggtg

SEQ ID NO: 56 - DNA, 44758 bp, synthetic construct
  source 1..44758: mol_type = other DNA
tctaattttggtatcgtcgtgtgagaaccctcccgactctgatcagcccacccttcccccgtaggccctccgcctggtgggccactgcctcgcattgcctgggtgttgcctgggtcatccctgggagcttccagctacgctgggtggtggtgggcttccctgccctgtcgctgtcctgtcgccgcccattctacgcatcctggcgggagtgtcaacccctgggtggtcggtgccttgctcggctacgctccagcgcttccgcgtggtcggctaggcggttggctcgccagcgcttcgcccactctacacctcgctccacctcggaccacttgtccgccagcatcatgcgctgccatgccgcgtcctgctgtagccatgccctgctggctctgtcctgtctgctcagcatcctctgtctcctctgtctggctccctggggcttccctggggcgctgctgtggtcctgtcgggtgatggtgcgggagtggctggccttgcctcttgtgcctctgtacctgtggcattgccctggctctacctggctgctccctgggtattccctggggctgcctgggtggccctggccactccctctaggccacgtactctactcgcctccacctgtcctgtctagtcctgctctgctccctggagcttccctggatgctacctgggtgctggtctatctccctggctctgcctggcgctgtgctgtgctaccgctggtcctgctgtcttgcctcgccgctccctcgcctgctcggtcgcacctgcggcgctgatggactcctgtttgtccattgtgtgtgacataaccgcagccttagtgccatgcgggttccagggcgatgggtctggctggttggctgctccctgggtgggggctgtcgctccctggtaacgcaaatcctggctagctagactaagcctcgcgcatggggtctctatacgcgtgggaaggctccagggagcgcctggggaggggttgacacgttggcggtaggtctgtagagttcgccctgtcttcacgcaataccgccttcacaggcagcctggagacagggttgacacactacccgggcatcggtagagtacgcagccagaacgacgggagattgcaaccttccaagcgcggcacaagccataggcgcaagggacacggcaagctcttagggcaggaaccgcagtgtgtaaggccggcaggcatcactggggggattgacaaggtaatagatgcggtaagatgtgcggcgtcaagtggtcccgatgtacacactgtgaagggattacggcgcggtcagacagatgaccggcaccgcttgacactgtaaagctcagtcggtacgatgggcacccatagcggacgtgatggtccggggcgatgcggataggacgccttgtttataacctgaccgcaaagctgtgactccagccgataggactgacccaccacgtaaatacagacgggttgacacgacaaggccaagtcgataacatggccgccacaaagggaagcgatagcttcctggcggtagaggttcgaagcttcaccagcggtacatggactggtgcggtaggttgaccgaagctgcaactggttaggcagggtcccagggaatacctgtcgggtgctgaagactcacccaaaagagtctgagcgggaagcctccccgtccacggttaagcaaaggcacgttagtgccggtgggaacgaatagagtgtcagtgggatcgagaactagaaacctcggttaatcgcgactgacagtatgctgggtagtatcggtgggccgattgaacaaggccaggcagatagcgcaaagggtacgggggatgagtgaagacgatcccgaagagtatgcgcaggacaagccagaaccgctgatactacagggactatgccaatgccaaggtttgtcccttgaggcccttccaccgaggggattcaagagacagacctagttgaggaatgccgatggcacacttcaaggctaaggctcccaagtcgcccttcgctacccaggtagcgtactggcgggattgggaagccaaacgtactaagctcatcgcacaggataacgtcgaggggcgcaaagagcttcgcaagatgcgtgacgtgcgctacgctaccgacccggagccagcgccaggacgctaccataaccctgaacagaaagcgttcgtgaagggtagcgaaggcaaggcgcggaacatcctgaagggatggaacgctaagaagtcgcaagggaagggtttgtaatgccacgtgtgaatgaactgacgccgcgtcaacgcaaggccgccaaggctcgccgcgacaaggcacgccggattgatctagcgcacaagatgccgaaaggcgccgactgcccgatcttccgcaaggctgaacaggcgcaagctaagcagccccgcgtcgataccctgaccactccccgcagtgccggctacctggccgccgctgcttacctgaacaaatccatctgaggtacataccatgaccaacgcaatctccaaaaccgtaatcgcattccgtggcaccgaagagatcaatcgcgctatcgacgccatccgtgtccgtggcaaggaactcgacgaagccatccaactgaccggcctgtcgatcatccatcacatcgaccagtgtggtgacgtgaccgtggtcaaggcgctgtatgaagccatgccgaagggcagccgccgcaatgcgctggtcgagtggctggtgctgcacggcaaggtacaggtgaataccgacaagaagtcgaacaaggacctgcccttcctgtacaacaagttcggcaagaccgatctcgtaggcgccaccgacaacccgtggtacagcttcaagcctgagaaagcgctggaccaggagtttaacctggccgctgccctggccacgatcaaaaagcaggtgctccaggctcagaccaagggcaaggtgatcgtcggcatggaactgctgggtgatctggaagcgctggccgccaaggctgcacccatcgccgagcagagcaagcgcgctgccgcccattgactcaagtcgaacgcctgctaagcgggcgttccgctggaatcaatgacaactggagaaacacgatgagctttaagcaacgtctgcaacgtcaaatcgccctggcccaatacagccgcccggctcagttcccgtacggcgagcaggccgtccaggcgaagggagagtgaccatggacttctggattgccctccccttcctcgaactcggcctcaacctcggcgaggatgaactgcgcatgttgtggttcagcggcctgacggtattcttcatccacctcctgaagcggtgactcaagtcatggccctggcgggcgaccctcgcctactccggggccatcgctggactcatcacaagcgagaactaaaccatgcaagctttgaatactctgttgatcgcaatccccaaggacccgtcgaacgcattcaatgcagccgacaaggtgctgtgcgcccatggcttccgtatgggtgacctgaataccgcgcacgtgctgacccctggcgggttcgtagtagtgggcgccggcgtgaccgtcaaccgctacgacgaagcgtatcgtatgagccggaacctcgattccgaaggcttcgacgttctgctggtccagggcagtccactgtccgggcacgtcacctgccaggcgtacggctggatcaatgcggaataccgcaagggctgcgcgaacgggcgcccgatcttcgacattgcaggaacctcgtaccatgtcctcgcgtgatccctaccgtatcggccaccgcgtggggctggtgaactacagcgaccgctacctaggtgccgacgcggcaggcaccaagggcgtcattgaagccataacccgaccgtcccgctgtatgacgatctatcacgtacgctgtgagcggaccctgcgcttgatcgaggccgaggcccgtaacgtgcgattcatcagacagctaccgacccgcaaatgacgtggcgcataatcgtcgtcagcccatcaagcggctgcgccttcgtgtggagtctcaagcggcctgtgcggccagtgcgattctactcccgcaaggcagctaaacgctggctccgcaagcaccgccgacagggcttgcctggccactactacctcatcgtgaactggagcaaacgcctatgaatcctacttacgtcgtccgcctcaaggacggaaccacccgccaggtagtcgccgacagcatcgtcaccggccacgccttcgtcgaactctggttcctcggcggggcggtcgctatctacccggcctgcgaagtacaggaggtccaccgcactgacctcgtaaaggagggtggtgatgaatacccgcactgtatacgtcaagccgcacagttcgaggtgcccgccggtattgtccgcaggacgcctgaccccgggtgaactctaccacgtgatcgcacctgccgaggtcgaaggcgtcattgtgctggcaacttcaggcccgtggcacatccggtccgtggtggtgcatagcatgcacccctcggtatatcccgtagggatggctgtcactgacgattcctggcggttccgccgcctgggtgtgagcgagtacgtccaactaattcaagggtacgaacaatgatcgccatcctgttcgtactcggtctgtactgctgcctcggcctgctggcaggcgcctgctactgcatcgcagtggccccgccattcgagaacccgacggaagtgcagttccaggacgcatgcgtgatcgggtgcatctggccactcgtgatcctcgtcggcatattcctggcactccgtgcagtaggccggggcctgctgaccgggctgaagcgtcacctgaacatccaataacctaccggaggtaacatgatccgcacccatacccacaacaccgaccgcgaacagcgccgcatctacaagctcactgagctgacgtcgggtgagatgtacagtgtagtgcagcccgagtccaagcgtggcacgctggtggtcggagtagcaacctgggatagccagagccgacctgtagtgctgcccgtggtcattcacgatgtgggtgcgcatccctcgccctgtcccaccgtgctgcgcaacgacggctggcgcatggtgcttgccgccaagggcacccaggtaacactcaccgccgagtgaccaaggcgaaggctggtgcgccagccttccaccgtggccattccttgccgcgaaccaactcaaccgaggagctacaacatgaccaacgtcaacaccgccaccaccgagaccaccaccgctgctgccctgggcgccaagctcatcaagaagccggctaccgtggaagacttccgcaacaacgtggtcttccatcacaccgccctggccaagctgaccgaagtctacaacgaggcggtcgttgccctgcaaaccgccgagcgcctgtccagcctcgtcgccggtgacgtgatcaccttcgaccacggcaagggcgagaaagccgaagtgctgagcggcgaagtcatcagcgtggttgccggcgtttaccaggtgctggtccgcttcagcgacagcgcacctgccaagctgctggacgtgaaggccagcgccatccgcgccgtccagtcgtcggcagcccaggctgctaccctcgacgaagccatcgcccagggcgagtaaggcccgcacgtaataggcccggccctccgggcctattgcgagctagccataccataggaggagtcaccatgagcaagcgtaaccccgagcacatcagcggcgccgtgcgtagcgtcagcgtccagaagtcggcagccgtccaggaactggaggatcgtctggagtctgccctggccgtgtgccagcagcgggcggaagacatcgatctgctgagccgccgtctccaggccgccgagcgcgcccgccgctgggagatcgacgagattcgcaaccaccaggcgaccatccgcctgttgcagaacgacctgaacgctgcgcatgatgcccacgaggcacaagagcgccgcgctcgcaaggcaaccatcatggcctgggtatgcctgctgaccgcaggtttggccgtcaccctgaaactggcaggagtctgaccatgcagtgcaacgacctttacactaagctcgcagcgagcatgttcaacgtgccgtgctcccaggtgaccgccgagatgcgccgcgtagccaagagccgggcattcgcgtatgcttacactcccaagcgacaggcgtcgggtgggacgtacaccgcccgcgtgagcggcgtcacctgtgacggtggcaaggtggaggtacgtctggacaacgtggagcgcgccgacacctgtggctatgccaagctggaggcgctggaagcggtcagcctgtaccagggtgccgcgaagcgcgccgatgagtatgaaaagctactgctccaggcattcccggtggtggctaagcgtcgtgagcgcttgcgtatctccgggccgctgtcggcggaagacttccgggcaaacctgctcgggacgtgttccgcatatcggaatgccctcgacgccatacggggcgagattacctcgaccggcccgttgcggaaccgcatatgggcgctggtcgaacgtatgcaccgggccgagacgaagctcaggaatgctcagtcggagatcaaccgcctgcgggagcaggaactggaccgcctccgcaaggacatgtccagctactgcgccaacgacgttacctctacggtgagtgcagcatccgcgaaggataccctacgggtggcaaccttcgccgccgccctcgccggtggcgtcgtaggtagcgccctgatgttcctgctcagctagggcgaccagggcctactccggggtcaaatctgagggcgttcctagagcgccctctcgtgtgagtctggaggatcacgaacatgcaataccatttcacgcattacaacggataccgcttcggcgtcgagctggaagacgaggctgtcttcccgtgcatcgacggtaagcgggcgacctgggacaaggtggcggcgtgtgccggtagccttgtgcattacatggcgcaggacctgattgacttcggccagcgcaagttaagggagatcgaagatgagcaagacgagcctgtacccgctgagcctgcatcccggcctgattcaaatcaggacgattcacgtattcagcattcaagctccgagcaacgccgagaactggtggcaatggttcctctggcagcggaagtaccacccgctccgggagagcctgagtccagccggggaactgagtgcgagtatcgccgagtgtgtccaccgcctccgccagagtggctggcaagatagcgacatctggcgcaagaagggaggcgtgctggccctcggtgccttcgacctgtccggcctgatggtgggttcctgcctcgtagtaggcggtgagctgaaggccctgtgcgttgatgaccggcacagcaggcagggtatcggcgctgagctggtacgagctgccgagctggccggtgctgagcacctgacctgcttcgagttcctggagccgttctacgccggcttgggctggcgcaccgagcgccgtgaggcaaactggactgaaggcgagccggatgtgctgtacatgagggcacctggccatgacgcatgaggtgatggtatggcttatcgcgaacaaaccgctggtcatcggagtcgccttcagcctggtggccctgggcgtgctgctcacacagaacaacggcggcccgcctatggcgcccgcatgacctggcacctccaggacatgttcgaggcccgaggtgggctgaggcccttgtgggaggagtggtatcaatggcactgcgccgcgactcctggctaaagcaagcgcaatccctggcagtcggccaggcgggtcgattccgccacgtcctgggatgccagagcatgagccggggcgggaccaacatgacctgcaagaacctgcctgaccgctgggtggcatactgctactcctgtcaggaaggtggcgtggtcgagaaaacgcacgtgcggagggtgcaatgcgcggatcaagaacgcttcatgccctggcccgaggatgcctcggactggacgcaagccgactgctatcaatcgctatatggtttgctgctgtccaagggcatcgactacaacgtgatgacgccggggctgccgctgctctacagcgaaaggcagcatcggcttatcttccctaccgacgcgggctggattgggcgcgctactgccgaccaaaatcccaagtgggtgggctacgggtatcctgccccggactaccatggatggccccaggaatcatcaatgggcaggccatgggtgctgacggaagactacttgtcggcgctgaaggtgcggtgggcatgtcccgaagtcttcgctgtcggtctgaacggtacaaggctgcgcgacaggctggcggcgatcatgttgcagcagacctgcaagcgcgccttcatcttcttggatggcgaccgggcaggtgtccgtggtagtgcaggcgtgatgcgccggctccggtccctgcttatcgaaggccaagtcataccaacgccggacgggttcgaccccaaggacctgacccgcgagcagataaggagcctagtaattggacgtattgacgcttcacgcactgagtgaccgggaccgcttccgcacgttgcggagtgtggtgcccgaaggaatgatggggccggagacgtgcttcgtcatcgactggatcgagcagtattggaaggtctacccggtgcatcagaaggtagacccgcaggcactgcgcgaactgatcaagctgcgaggtggctaccagccagagcaactagcggtggtcctgaacctcgtcaaccaactggacaagccggtggacccggactcgctacagggcgttgtgtcccagctcaacgaactggatttctcagggcgggtggatgccctcctggcgcagtacaaccagggcgaggacatcgacctggcgtatgagctgcgccggctgagcgacgaggccctgcgccgcgagggggtcagcacgccgaccgactacgtgacggacgacgtgtttgatatcctcgcggaggagcagggtgaccacggcatcaagctgccggggctggtgctgccggcgtacatgaagggcctccacgccggggcctcggtgctggtggcggcgccgcctgatgcgggcaagacctcgttcatggcctggatcgctgtccatatcgcgccgcagctcaagcggtacttcgacccggggcggcccatcctgtggctgaacaacgagggcaagggtcggcggatcaagccgcgcctgtactcggcagccttgggcatgaccgtgggcgagattcttgccctggacccggaggaagttcgcaggatgtacgccgagaaaatcggcggcgactctgagctgatccgcatcaaggacttccacggtgggtcgctggctcaggctgaacaggtcatcgacgcgatgaagccagcggtggtgttttgggacatgatggcccacgtcaagggcggccagcgcaaggaccagaaccgtaccgacgagatggagtacaaggtggctgaggtccgcgagatggcggtacggcacgacttcatcagcttcatgacgtggcagattagcaacgacggccacgaccagttgttcccgccgcagtcctgcctcaaggattcgaagacagcggtacagggtgctgtggacgtgcaaatccacctgggccgtctcaacggcgcggatcaacaggtcatgcgtggcctgtccctgccgaagaacaagttccagatggacgggaagccttcgaacgtggaggcaatgattaacttcgacgccgcacggtgtcgtttctttgagagtgtggatcatgcaagctaagcatagccgggtgctcgaaggcaccaaagaaattccgctgggtagcatcgcactgttaccgggcaccgtcgcgggcctgctgctgtgcctgtactccgacgcaactcacgaggagggcgtcgccttggccggtgggttccctcgcgacttgctgcacggcgccactcccaaggacgtggatgttgccctgtacagcatgacctgggggcgggcagagcacctgatccagaaggcactcccggtcctgaaccccatcttcgtccgggatggtgggtggcgctcggactacgccgatggcggcgacggtggtatcttcaagggcgtgatgtccctcgtgggctgccgtgggttgaatggcatggacttggactttaactactacgacgccgacagcctcggtcgagtgatggagtcgttcgacttcaccatcaaccaggtaggcatcgcgtacaactggcccgaccccgaaggcggtccgcgcctgggtgcgtacctgcacaaggacgttacctggggcgtgaacagggaagtcggtaacggctcgcgactgccggagcgatgcgagaagatgcgggccaaggccgcgtattacggatgggagaacgtgtgatgagcaagcgcgacgtggtactggatatcgagaaaggcatctggcgcggcgtagaccagaacgacaaggccgtcgaggccatcatcaagaagcacgggtacgtgatcgtcgagcctaagatcgacgggtgccgtgccatcgtcggtgcgcatggcgtggtgtcccgaagcgggcgccgcttcccggccctggatagcttggaagaccgcatcatcgatcgactggcccgccccgggctggactccggcctggtgctggactgcgagatgtacctggccggcatgcccttcagcgaggcgactggccgcatgtcgcgcaagaccccactgaccgaggaagagctggggtgcctgcacttcgcggtgttcgacgccacccatatagacgtgctccgcaaggcgcgcacctcccacctggtatacgaagagcgccgcgccatggccagcagcctcctggcagcttgccgcctcagcgacactccgacgttcttccaggtaggctcgcaggtgtgtcggtcgatggaggaagtcttaggccggtactccctccaccgcgccatgggcttcgaagggtcgatggagaaagacccgagcatggtctaccgcaacggcaaggtcgccggctgctacaagcgcaagccggagatcaccgtagacgggcgcatcgtaggctacgtgccgggcaggaccggcaagaacgctggccgcatcgtgggctactatgtcgagttggaagacggctcgggcaccgtggccgccaccggtctgaccgaggagcacatcgagttcctgacccgtagccaatactactcgaccgtcaacgacacgatgccaaacttcggtcgcatcgtcgaggtctctgcgatggaacgctcggccaacaccctgcgccatcccagcttcagtcgcttccgcgaccttcccagcaatccaggagtcaaggtatgaagattcgaaagtcccgtaaccgcaactacccggaagatatggtgtaccacgccaccaaccgggattcactgctgtatccgaagtacgtcatgggttccgtgttcatcagccaggacggaacattccgcatctgcgtcatggcagggacctgggaccacgttgggtccgaagttctgcatcatgcacgggacatccaatcccttggcgccggtcgccgtaagttgcaccgggtcatgcgacggctgcgccgcaatctgcaacaggtaggagtcaaggtatgagaatgccaaccgaagaagaacgcacgatccgctgcctgctggcagatatccacgaacccttgaacctgctgttccccggtatccgtgtaaaggccgagacaatgcccttgggctggggagatagtatctgtgccctggtactccgggtgagctacgaacatcgcacgctgggtcgcctggagtacctgcacgaggtccccatcctgcacctgacgcagtggggccgggacggcatgctccagcacctgatgaacgagattccccgtcgggtgctggatggcatgctgcgccaggcacagaaatacagccagagcaactggtacagcaaatgacgactatccgaatcctcgacctcgaaaccgagagctacgagcacaaagggcgcaaagcgtcgccctttgacccccgcaactatatcgtcatggccggctggcgtgacgatgttgacggcaaggtcggccagaaggtggagcatcgcttccgcagccgggccgaagccgaagatccgaacaaccgctggttcaacctcgacggcgtggacgtgatcgtagcgcacaacgccatgttcgaatcgaactggttcttcacccgctaccgggacgagtacctggccttcctgcgacgtggtggccgggtctggtgtacccagcaggccgagtatctgctgagccatcagacgtggctgtacccggcactcgacgaactggccccgaagtacggcggcacccacaaggtggacggcatcaagctgctgtgggaccagggcgtgctcacctcggagatggaccaggacctgctgagcgagtacctgtccggcccgtgcggcgacatcgagaataccgccctcgtattctacggtcagttgatgaagctccaggcccgtggaatgtgggctggctacctggagcgctgcgaggccctgatcggtttctcggcgatggagtgcgccggcctgaaggtggacctcgaagtcgcccgggtgaaccacgccaagcaactggaagaggtggccgggatcgaggctgagctgaagaagctgatgcccgacttcccggaatacttcgagttcaagtataccagcctctaccatatgagcgcatggctctacggcggcgaggtgcggtacaagggccgggtgccctacgaagatggccggatggagaaagccgacttcgtgcgcttcggcacggccaagcgggggactcctatcgagagtacctcggtgcgggtcccgatccacgaagtgaccaaccagggtgagtggcactggcccaccatcaccgagctggcgaccaagcacggcccggtcatcacgttctccgccggcaagaacaagggcagcgtcaaggtgttccgtgaggatacggacatcccggcgaccaagtgggacgatgaccagcgattccgattccccgggctgatcaacctgaacaacctgccggaagtggtgcgcgagaaattcctaggcaagcgcccggagttccagtgcgccctcaccctggcggatggatcgcccgtgttcagcaccagcggcgacgccctccaggctctggagaaacagggcttcgaggcagccaagctgttgatgcgcctggccgagttgcacaaggacaactcctcgttctacatcacccacacctacaacaaggatgggacgatcaaggacacgaaggggatgcttcagtacgtggacgatgatggtatcatccaccactcgctgaatacgaccgcgacggccacgacccgactgtcgtccagccgcccgaacctccagcagctcccgtcaaaggacgaagacgacccggaagccggcagccgcgtgaaggagatgttcgtgtctcgcttcggcgcggacgggatgatcggcgagaccgactataccgccctggaggtggtgatgttggcggccctgtcgaaggaccggaacctcctggcgaagctgatggccggcacggacatgcacttgtaccgcctggcagggaagcacaacaactggaacgggttcgattacgaccagctcgtggccatcaagaaggaccccaaccatccgtggcacggtcgcatgatgcaggctcgaaagaacatcaagcccaaggcattctcggcgcagtacggtgcgagcgcggctggtatcgcattcaacaccggctgtaccgtggaagaggcccaggaattcctggacaacgaggcggccctgttccccgagtccatcgcattccggcagatcgtccgcgacagtgcagaggccaccagcctcgtgatgtacaaggccgaggaccagatgccggcgggcgccttcagcgagatggggtcggatggtaactggcgccagtaccgccgaggattctggcaagcgccgggaggcacctgctacagcttccgccaacaggaacgctgggacaaggaacagcgcaagacggtcatggacttcaaggacacgcagatcgccaactactggaaccagggcgaggctgggttcatgatgaccgtgagcgtggggcgcatcttccgttggatgctgcatcgcccgggattcatggtcaccgagttcctgatcaacaacgtacacgatgccgtgtacaccgactgccacaaggacaccgccgccgaggtcaacaagggcgtgcgcgacatcatggccgacgcggcccgctacatgagcgagcggctgggctacgacatcgccgacgttccattcccggcagtggctgagatggggccgaacatgttcaatatggaggtgatccagtgaaagaactgcatccgctgcacacgcccgagttcgtcaaaacattcctggaccagaccgggtgcctgcctggggtacgccgtacgggccgcaccaccggcattgctctacaggccatcggcatggcgctgtcccatccgagggaaaccctgacgttcgtggaccacccggacggcagctcggcagcactggtggccagcattgaaaccatactggcgaccctgggctaccggaacgtcctcgttcgacccacaacccgtgcggacgggcgcagcgtgaacatcgtcttcaagacgctgccgaacgcctgacgaccttccctactccggccttaaatcttccttcgacacaagagagaccacgtatgactcagcaactcaacgctctgcaagctgcactcgccctggccaacaaggctgccgagaccgcaaccatcgacatgtctgaaacctccaccggcggtggcggcggtcgaatcttcccggctggcaccgccatgggccgattctgcatctacatcgagctgggtgaccacgccaaggaattccagggcaagctcaagaacccggcgcctcaaatccgcctgggcttcgcactgtggggcgacgtgaacccgcaggccggtaatccgcagagccgcccggacgacctgttccacacctacgaggccgacggctcgatcaagcccggcctgttccgtaccttcgagatgaccctcggcaacaacgagaaatcgaagaccaagctcgccttcgacaagatgaactggagcgggcagcatacccacttcgctcagatgctcggccaggcgttcatcatcccgatcaagcgcaccaagatcaccaagggcaacaacgccggcaaggaacgcaacgacatcgattggggcggcatcatgaagccctacaatccggtcgatggcagcccgtacaacgtgccggaactgccgatggacctgttgcagtatttcttcttcgacgcgccgaccaaggagacctgggacgccctgcacatcgaaggcacctcggacaatggcaagtccaagaacttcctgcaagagaccattcgctcggccaccaacttccctggctcggccctgcacatcatgctgggcggcggcgacgatctgatcatcaagccgacgacccaggccgcaggcagcaacctgccggcagtgcccaacgtggccgccgatgcaggcgtagcagcagcccctgctgtcccggcagttccgcaggcagtgccgcagacggcccctagcgtgccccaggtggcgaatgtagctgcccctgtggtaggtactgccgaggcacagaacgtgctgcctgacgtaccgcaggtggctcaggtggcagctccggcggcggtcgaagtcccgtcggtcccggtagtgccggcagtaccgcaggtctaatgcgcctgccatcggaagagttcctggcaggactatccgcgcagttcgaccgcagcatggcaggcgggacgttggtgtgtgacgccgacggacccgcctacgtggctgcggccactgctaagaccttggacactgcactccggagattctggaagctcattttggagcagcagttcctagcgcactgcacggggacacgggttcacctcacggcagcaggtggggcgaaggcgtaccgggacacgtatccgaccatgaaaccctaccagggccagcgcaagggtaaggcaaagcccgcgctgctggagcctctgcgacgggccgtggcggacgtgcatgagcgcggcggcgcacccgaagggatcgatgtcatcctgcacacgttcttcgaggcggacgacggcatgatgatggacgcctacgccatgcaggacaaggccatcatccggtccgacgacaaagacctgcggatgacgatctacccgtattgggagatcgacacggcgtgtgtgagcaggatcgaaggcggcttcggctacctcaaggaggcatacacgccttccggccagttcaagctcaagggccacggacggaagttcttccttgcgcagtggctcggcggcgataccgctgacaacatccgagggatcgatcgattcaacgggaagctctgcgggatgaagacggccttcgatatcctccacccgatcacggacgaggatgaagccatcgacatgatcctggaggcgtacgccaagatcaagcaaaacccgctggcagaggccgaggtgctgtggatgcgccgaacgcctaccgacaacgcagcgcagtacctgttaagccgcgaccttcgtccggccttccgccagtggatcatcgagctggacgcctaccacgaggcgctgctccagaagcggagggagagtgactatgacgagtgagccgaaggtctaccagataccgcgcagccaacagcgcaccttcaccctgaagctgtgggccgagcagggcaagctatgcccgctctgcggtaagcccatcgatatcagcgtgaagggcgaggcggtgatggaccacgaccacgagacggggctggtgcggggcgtcctgcatcgatcctgtaacaccgcagaaggcaagatcacgaacgcggcgggttcctggggatgcaagtcgatgaagtacaccgacatcatcccctaccttcgtgccctcctgacgtacctggaggggccgaagcatccgctgatctaccccctgcacaagaccgacgaggagaaacacgaagcgaagctggccaagcgccggcaggcagccgccaaacgcaaggcggcgatggccgtcgcaaagcacaacgcgaggaacgtatgagcaaactccgcaagcaattcaccaatgagtacctgcgcaacgtctatgtcgagctgggtctcaagaagggcgccgagcatctgaccaggcattcgcgcttcggcgaagtgagccgccagtgcttccgcaactggtgcatcaagctgggcttccacgacagcaggacacgcggcacgtacgccaagaagggtgcgctgcactggctgggccgaaaggcggccgaggtagtgcgcaagttccctggcgccgtgggcaacgtggtcggccaagggccgaaggtgttgagcctggacatcgagacctcgcctatcgagggctgggtctggtcgctctggaagcagaacgtgggcctcaaccagatcaagcgggactggaccatcctgtcgttctgcgcgaagtggatgcacagcgacgaggtgatctacatggactgccagggcgaccccctggacgacatgcacctgctggtcgccctgcacaagctgttggacgaggccgacatcatcatcgtccagaacggcaagcgcttcgacgtgcccaagatcaacgcccggttcttcctgaacaagatgccgccgccacgaccgttcaaggtgatcgacaccttgatcatcgccaagcagcaattcgcgttcaccagccgcaagctggagtacatgacccacaaggcatgcaccatcaagaagcgcctccacggcaagttccccggattcgacctgtgggcagcctgcctccaggacaacccggaagcctgggaggagatgcgcctgtacaacatcgacgacgtacgatcgatggaggagctgtacatcctgatgcgcccgtggttcgtcggccatcccaacgtggccgtgtacttcaacgacgctgagccgactatccgatgcccgaagtgtggcgacacggatgtcaagcaagaaggctgggtgcatacgcagaccggcaagtacgagcactatcactgcggtggctgtggtggctggagccgagggcggtatacccgcaacacctcggaacagcgcaaggccctgctgagcaactaaggaggctatatgagcctggcgttctccgatccctacgaatctacgggcacccagcccggccagtaccgcaaaggcgcggccccggacgagcgaaaggccggcaagctcccgatgcacctggtggttgaaggcttcccgctgctaaagcgggagcttgcccgcatgatgcagtgggccgccgaggtcaagggctacaagccccacgactggaagaagatgtcggtgggcgagttcaaggccgcccaacaccggcacgaatcccaccgcctgctggacgggccgctggatgacgagtcgaacctgatgcacctcgtgcatgaggcattcaacgcaatggccgccgccgagcgtgccttgatggaccgggagaaaggcaatgagtaaaatctgttggtgtacccgaccgcacgagaccgacgaaggtgtacgtgtcatctgggccttcaacgagcggggcatcggggtaaactacgtcacggcgtacgtcacgccggcgatgatccaccacccggactggcgcgataccatcctcccggacatcctccaggagatggcggagcgcctggaccgcgaggttaagctggtggaattgcgctggttccgcgctgagattctgagctgcggggaatggcgtgactaccgagcaatgacgctggacggggcggtcagcctggccgaggccgagtggggtcccgaggatatcgggcgcgtaatcgaaagacgataggagacggaatggacctgatacagcagcagatcgcccacgaagaggcccttgtcggggcggcgcagaacgacgcccgcattgccttggaaaaggcgatagcccaagggtccatcgaccgcatcccgagggcacgcatcatgttgatgcggatgctccccatcgtgaccgaagcgatcttcgcccaccaggaagcgaaggcggcgggaccggcagcgaagctgcgacacctgctgcggatcatcgacgcccaggacctcgcggtcatggcgctacgggccgggctgtcgatgctcatcaactacccaacgatcaccgcgacgaagtattacacccatatgggcaagatgctctgccgcgagatcgaagtgcggttggccttcaaggtcaaccaaccctattacgaccggacgctggactacctcaagaccagcaggactcgcagcgtccggcacatccagaagacgatggacgcccttctggacgcggtactgcccgaggaggcacgtatcgacctgccggatggcgactacctgcgtctcggcaagttcatcggtgacccgctgatccaatgcggcctgttcgagccgaaccgcttcacaggccggggcggtacgagcgtccacctggagccgtcgccggaggccaaggagttcctgcaagacccgtcggcggcgatgacctggggaggcccaggccgtagcgtaatgctggcaccaccgagaccctggaacgactggtgcgatggcgggtactacagcgccaaggcgcagaagcatcacgtattggtgcgtcgtaccaaacaccagaccaagcgggcacgtcagatgcagctccgccacctgggccgggacaagatgcccaaggtatacgcggcggtcaacgcactgcaatcggtggcctacgagatcaaccacgacgtgtacgagatcatcgagcgcatcttcacttccggcggcggcgtgctgggtatcccgcagcgtacctacccggacaaacctgagttcccgctcggcgacgagtgggccaaggagaacgccagtgaacaagagctggaagccttcaaccgatggaagcgatccgtccaccgatggtacaccggggagcgggagcataccgccaagcttcgcgaatttgctgcactctaccgagttgttcgagagcatcatggcaaggcagtgtacttcccgatgcacgttgactcccgtggccgcatgtactattggggcacaccgaatccccaagggtccgacatcgccaaggcatgccttcagttccacgaaaagcgcgccctcggcaagcgcggcctgtactggctcaaggtccacgtcgccaactccctcggatgtgacaaggtgtacttcgacgaccgggcagcctgggtcgatgagcgatgggacgacttccagcgagcactcgacgaaggcccggagaactatccgaatctcttccccgaagacgagtcgcccctgtgcgccatcgccggtctgctggagctgcgggcggcctacgcatcaggccagccggagaattaccgaagtgggttcatcgtccatatggatgcaacctgctccggcctccagcactactcagccatcctccgagacgagatcggcggagcatacgtcaacctgttgccacctggacttgccaaagctgacatctactcccgagttctcggtctcgttgcagagtctctggcacgagacatcgagagtgctgaaggcgaggctcggggctacgctgtactgtgggataaggccggtcttgccaggagcctgacgaagaaaccctgcatgacgctggtgtacggaaccacgttcaagggtgttgtggaccactgcctggactacctggacgagtccggcctggagattcccgagggtatcccgtcataccgcctgggaagctacatggcaacgctcatactggacgcaattcgcgagacagtaccatcggcagtcttcgccatggaatggctccagcggctcgctaaggcccttcctgacgcatccaaggatttgcactggaccacgccactcggcatgcaggtcttccagtcctacccgaagaccgaggaggtccgggtgcggctgcgggccgaggctgtcgagtacgtcaccctgtacgaggccaaggacgagctggacccggtacgcaacgccaacggcatcgccccgaacttcgtccacgggctggatagcagccacctgggcctgacagccctggcatgcgcggcggagggaatcccgatccaggccatccacgacagcatgggcacctatgcggcagacgtggatcggatgcacgtccacatacgggagcagttcatcgccatgtacagtggcccctgtgtgctcgtagagctggcaaatcagcttggggtagaggctaccccgccccggaggggatcgttgaatctggaggctgtacgggactcctgggcgttcttctgctgaggtggattatgtcacccacataggagcaagtgcatccgtccaaggccctcgtagagggagcggggagagaggagaggtcagggaagacctggtagaggagaggtggagatgagaatggatgactacgaaggattctagatagaatagactaaccagcataggagatatgatagatggctactatgaagacccaccgccctacggttatgtcacccacagtggaaggatcgagaacaggcaagggtacggcccgtcctgtcacgttcacctctcagcagatcgagtggttagaacagaccttccccgaacatcagatcggtcctggaaccacgatggaagacatccagttccaggccggcaggcgagacgttgtgcgagcagtacgactgcgccgacgtgatgccatcgcagtggagctgaagtgatgagtaagtccatctggcgagtacacgcaaaggccggcactccctcggaactccagggcctgtgctggctggcaatacaggagctggaggagttcaccctcttccgctcgaaggacgacgccctgaatgcgatgctggacagtatcgagggcaacgatcgaaccgagctgttggtattccgcgatggtcagttggccggcggtgcctgcatcgtgttcgaggacgacccccacgtcggcccgtgcgtcacagcacagtggcagtacgtcctaccgcgctaccgcaatacaggcgtggtccgggagttcatccgcgaactccaccgtcaggccggctggggtcaaatccccctcgtgtgctggagccatcgtgaaagcgatagccggtacacgatccactaccggagagccaagccttatgggcaagaaagtcaagaaggtgctaggcaagaccatcatcggcaaactcgctgatggcctgctgggcaccgaccttagcggcgcacaatccgatgcccgcaagatggaagagcagaaccgcctaatgcagcagcaggcggaccagctcgcacgaaaccagcaggttgacctcaccgccgagaacgtggcgcaggttgacctaggagcgatggccgatgccactggcaccggcactcgacgacgccggaatcaggcgggcacaggcgtatcgcaaaccctcggtatcaactactgacgaggtacgccatgaaaaccaccgcagctatgctgtgggagaaacttcgggatgggagcgtggagagtcgagccatcgagttcgccaagaccacgctgccctacctgatggtcgatcccatgtccggcagtcggggagtcgtagagcatgacttccagtccgccggcgccctcctggtgaacaacctcgccgccaagctggcgagatcgctgttccccacggggattccgttcttccgatccgaactcactgatgcgatccgccgcgaggccgacagccgggacacagacattaccgaagtgaccgctgccttggctcgggtggatcgcaaagcaacacagcgcctgttccagaacgcctccctggcggtcctgacgcaggtgatcaagctactgatcgtgactggcaatgctctgctgtaccgagacagcgccgccgctacggtggtcgcatggtcgctccgctcttacgcggtgcgccgggatgcgactggccgctggatggatatcgtcctcaagcagcgctacaagtccaaggacctggatgaagagtacaagcaggacctgatgcgcgcaggccgcaacctgtccggttcgggcagcgtggacctgtacacccacgtacagcgcaagaagggcacggcgatggaatacgccgagctgtaccacgagatcgacggcgtgcgtgtgggcaaggagggccgctggcctatccacctgtgcccgtacatcgtgccgacctggaacctcgcccctggcgagcactacggtcgcggccacgtcgaggactacatcggcgacttcgccaagctgtccctgctgagtgagaaactcggcctgtacgagctggagtcgctggaggtcctgaacctcgtggacgaggccaagggtgcggtagtcgatgactaccaagacgccgagatgggcgattacgtgccaggcggtgcggaagccgtccgtgcttacgagcgtggcgactacaacaagatggctgctatccagcagagcttgcaagccgtggtcgtccgcctgaaccaggcgttcatgtacggtgccaaccagcgcgacgccgagcgcgtcactgccgaggaagtccgcatcactgcggaggaggcggagaacacgctgggcggtacttactcgctcctggccgagaaccttcagtcgccgctggcgtacgtctgcctgtccgaggtggacgatgcgctcctccagggcttgatcaccaagcagcacaagccggctatcgagacgggccttcccgccctgtcccgctccgccgctgtgcagagcatgctcaacgcttcccaggtcatcgctggcctggccccgattgctcagctcgatccccgcatctcgctaccgaagatgatggatacgatttgggcagccttcagtgtcgatacctcgcagttctacaagagcgaggcggagctacaggccgaggcagaacagcagcgccagcaggccgcacaggcccaggcagcgcaggaaaccttgctggaaggcgcttccgacatgaccaacgcactcgcaggagtctgatagatgacccaaccgaacgaacagcaactgccgccgggcctcgctaacctggttgccaacgtaccgcctgccgccgcaccgaccccgagtcatgtgcaggtgatgccgaacccggtgatccaaccgcaggccccggtccagcccggccaggtaggtgcgccgcagcaactggccatcccgacccagcagccgcaacccgttccgaccagcgccatgacgccgcactaccaaccggtagcggcacctgccgtgggtcaacccgttgttccgcaagcacccgctcagccggccccggtagctccgccggctgcgggtgcagttcttcccgagaacctggaagtcccgccgccgccggccttcactcccaacggggagatcgtgggcaccttggcagggaacctcgaaggcgacccgcagttggcgccctccatcagctatctggaggcgttctctgacaaactggataccgtccgagccttcggcaaggccgccgagaaccgcgatcctcggttcatcgacgagcactatctgaaggaagttctcggcccggcccaggcgcagcacgtcatcaacgtggccaagggcgtcctgacctatgtcgatgcgcaaaccaaggctgtcctgaaccagacctatgccgccgtcggtggcgaggccgtgctgaagcaggccgcaggcgtcttcaaccaacacgctgacccggccaccaaggccgccatcggtcggctgatggactctggcgatgcccaggccatgcagtacgcagcgaagcagatcattgccttcgcacaaggctccggtgccgttgtacaggctaccggccaacccctgggtgctgcggcacctgcactagcagccctgaccgctgagcagtaccgcgcagaagtgtcgaagctgccgctgaacgcatccgaagccgacatggctgcactgcgagagcgccgtaaggcaggcatggcgcagggtatctaacgaccctgccctactccggccttaaactcacatccaaaagagagagaatcgcatgagctttctgaacgacctgacccgtccgaactacgctggcaaggacgcggacgttgacatccacctggaagagcacctcggcatcgtcgacaagcacttcgcctacacctccaagttcgcaccgctgatgaacatccgcgacctgcgtggctcgaacgtggtccgcctggatcgcctgggtaacgtcaaggtcaagggtcgtcgcgccggtgaagagctggagcgcagccgagtcgtgaacgacaagtggaacctgaccgttgacaccctgctgtacctccgccaccagttcgaccaccaggacgagtggacccaatccttcgacatgcgcaaggaagtcgccgagctggacggccaggaactggctcgcaagttcgaccaagcctgcctgatccaggtgatcaaggctgccgcgatggacgcaccggtggacctggaagacgccttctcgccgggcgtgctggagaagctggacctgaccggcctgaccgccaagcaggctgccgagaagatcgtccgcatgcaccgccgcgtagtcgagaccttcatcgaccgcgacctgggcgatgcggtctactccgagggcctgaccccgatgtcgccacgtgtgttcagcctgctgctggaacacgacaagctgatgaacgtcgagtaccaggcaaccggcgcgaccaacgattacgtgaagtcgcgtgtggccgtcctcaacggcgtcaaggtgctggagactccgcgcttcgccaccgacgcaaacgcagcgcatccgctgggccgccacttcaacgtgagcgccgaggaggctgagcgtcagatcgccctgttcctcccgagcaagaccctgatcaccgcccaggtggcgccggttcaggccaagctgtgggaagaccacgataagttctcgtgggttctggataccttccagatgtacaacatcggtgcccgtcgcccggacaccgctggtgccatcgagctgaagggtatcggcgccttcgacatcaccgcgtgacggctaaggatttaaggtaaggaggtttatttatgcatccgtttgaccaagctgtggttaaggatcctaccgcaagctatgtagatgttaaagcacgtcgtacctttctgcagagcggtcagctggatgatcgtctgaaagcagcactgccgaaagaatacgactgcaccaccgaagcgaccccgaacccgcagcagggtgaaatggttatcccgcgtcgctacctgtctggtaaccacggtccggttaatccggactacgaaccagttgttaccctgtaccgcgacttcgaaaaaatctctgcgaccctgggtaacctgtacgttgcgaccggtaaaccagtgtatgcgacctgcctgctgaacatgctggacaaatgggcgaaagccgacgcgctgctcaactacgatccgaaatctcagagctggtatcaggttgaatggtctgcggcgaccgctgcattcgcgctgtctaccatgatggcggaaccgaacgttgacaccgcgcagcgtgaacgtgttgttaaatggctgaaccgcgttgcgcgtcaccagacctctttcccgggtggtgatacctcttgctgcaacaaccactcttactggcgtggtcaggaagccacgatcatcggtgttatctctaaagacgacgaactgttccgttggggtctgggtcgttacgttcaagcgatgggtctgatcaacgaagacggttcctttgttcacgaaatgacccgtcacgaacagtctctgcactaccagaattacgcgatgctgccgctgactatgattgcggaaaccgcctctcgtcagggtatcgacctctacgcctacaaagaaaacggtcgtgacatccactctgcgcgtaaattcgtttttgcggcggttaaaaacccggacctcatcaagaaatacgcgtctgaacctcaggacacccgtgcgttcaaaccgggtcgtggtgacctgaactggatcgaatatcagcgtgcgcgtttcggtttcgcggacgagctgggtttcatgaccgttccgatcttcgacccgcgtaccggtggctctggtacgctcctcgcgtataaaccacagggcgccgccgcacaagcaccggtgagttaatgccacgaaaccccgcacttcggtgtggggtttcttcaaagcctaacgacccgcgcagattccctgcgtgggtttttgcgctttaggagaaaccctatgctactactcgacgcagtgaatgtcatcctgcgcaagatcggcgagctgccgatcccgagcatggatgagacgtatcccaccatggccattgccctccctgagctggaggaccagcgcatccagttgctgacgcaaggctggtggttcaacacctggtggaagcacaagctgacacctgatcccacgggccgcatcaacctgcccaagggcaccttggcattctacccggattccccggacctccagtgggacggcctgggagtgcgcgacgccaacaccggcgacgaccgcatcggtaagtcggtcgagggccggctggtgctgtcccgcgagtgggaccgtatccccgagatcgcacagcgcgtcattgcgcaccaggccgcactcgcggtgtacacccacgagattggcccggacgagaccgcccaggtcatcgcccaggaattgcaggcgtatcagaacgaactgtcccgcatgcacacccgatcccgtccgctgaacacccaggccaagcgtagcttcagccggtggcggcgcagcttgaggacctgagcatgagctacaagcaatccgcgtatcccaatctgctgatgggtgtgagccagcaggtgcccttcgagcgcctacctggccagctcagcgagcagatcaacatggtatcagaccccgtgtcggggctgcggcggcgcagcggtatcgagctgatggcccacctgcataccgaccaaccctggccgaggccgttcctctaccacacgaaccttggtggccgcagcattgcgatgctggtggcgcagcaccgtggcgagctgtacctgttcgacgagcgggacggtcgcctgctgatgggtcagcccctggtgcatgactacctcaaggccaacgattacaggcagctacgggccgccacggtggccgatgacctattcatcgccaacctgagcgtgaagcccgaggccgaccgcaccgacatcaagggcgtggaccccaacaaggccggctggctgtacatcaaggcgggccagtattcgaaggcattctccatgaccatcaaggtcaaggacaacgccaccggcaccacctacagccacacggctacctacgtgacgccggacaacgccagcacgaaccccaaccttgcggaagcgcccttccaaacgagcgtaggctacatcgcctggcagctctacggcaagttcttcggtgcgccagagtacaccctgccgaactccacgaagaaatacccgaaggttaaccaggatgccgatgcggcaaccatagccggatacctcaaccagcgtggggtgcaggacgggtacatcgcattccggggagatgccgacatcaacgtcgaagtgtccacggacatgggcaacaactacggcatcgcgtcgggcggtatgagcctcaacgcaacggcggacctgccggccttgctgcctggtgcgggcgcacccggtgtgggtgttcagttcatggatggtgccgtcatggccaccggctcgaccaaggccccggtgtacttcgagtgggactccgctaaccgccgatgggcagagcgggccgcctacgggaccgattgggtcctgaagaagatgcccttggcgctacgctgggatgaggctaccgacacctacagcttgaacgagctggactatgatcggcgcggctccggcgacgaggacacgaaccccacgttcaacttcgtcacccgaggcatcaccggcatgacgaccttccagggtcgcctcgttctcctgtcgcaggagtacgtctgcatgtcagccagcaacaatccgcaccgctggttcaagaagtcggcagccgcgctgaacgacgacgatcctatcgagatcgccgctcagggcagcctgaccgagccgtacgagcatgcggtcaccttcaacaaggacttgatcgtcttcgccaagaagtatcaggccgtggtcccgggtggcggcatcgtgaccccgcgaacagcagtcatcagcatcaccacgcagtacgacctcgatacccgggcggcacctgctgtgactggacgcagcgtgtacttcgctgccgagcgtgccctgggtttcatgggcctgcacgagatggccccgtcgccgtccacggacagccactacgtcgccgaggacgttaccagccacatcccgagctacatgccggggccggctgagtacatccaggcggcggcctccagcggctacctggtgtttggcaccagcacggcggacgagatgatctgccaccagtacctctggcagggcaacgagaaagtccagaacgccttccaccgatggacgctgcggcatcagatcatcggcgcgtacttcaccggcgacaacctgatggtcctaatccagaagggccaggagatcgccttgggccggatgcacctgaatagcctgccagcccgcgagggtctgcaatatccgaagtacgactactggcggcgtatcgaggcgaccgtcgatggtgagctggagctgaccaagcagcactgggacctgatcaaggatgcctctgccgtataccagctccagcccgtggccggtgcctacatggaacgtacccatctcggcgtgaagcgcgagacgaatacgaaggtgttcctcgacgtgcccgaggccgtggtcgggtcggtgtacgtggtcggctgtgagttctggtccaaggtggagttcactccgccagtgctccgagaccacaatggcctgcccatgacctcgacccgcgcagtgcttcatcggtacaacgtaaacttcggctggaccggcgagttcctgtggcgcatcagcgacacagcccgacccaatcagccgtggtacgacacgacgcctctgcggttgttcagtcggcagctcaacgccggggaacctctggtggacagcgccgtggtgccgctgccggctcgggtcgatatggctacgtccaagttcgagttgagctgccatagtccgtacgacatgaacgtccgggctgtcgagtacaacttcaagtccaaccaaatctacaggagggtgtgatggctttctggctaccactattggccgctggcggcatgtccgcccttcagcagggattggccaacaaggaagagcgcaacaagatcaaggccgagaacaaggctcgactgaagacggacctcgacaacctgggcgccgccgcccgcgacatcgccaacctcggagtcatggccgctagctaccgcaagcaggccgtggcctcgcaggtggaggccaaacgccaggggatgctcgccggcggcagtgccgaggctcaggccggagcgttcggcgtcaagggcgcatccgttgatgcggtggccctggatatcgagcgggaggtcggcgaggctctgttccagattgacgacaacctggacaatcagatgtggaacctcgccgagcaggcgcactccatccaggcccaagctaaggccggcctgctgggacagaagagcaccactgcggggcaacgatccccgctggtggctggcctgatgtcggcgggttccctgtatgcaagtcaatacttcaagttcggcgccacgcctaaaggaggcaactgatggcggaatcgcaacgtgcttcccaagagcttgggatcaacgtcgggcagacgcaactccagccgggccagagtgcccggcgtggggtgcgcgactccgaagtcaactacagcgggccgagtgtaggctcacagattctcgacggcatcctcggcgccggtcagcaaatcgcaggcaagtggttcgagcacaacgtgcagcaggaagtgctgcgcggtgagcgtgcccgcatggccggcgaggccgaggaggcggtagacagcaacatcctggccaagcccttcgtgaagggcggctggcgtaagcaggactaccgtatcgctcaggcggacttcagcctgaagatgcagcagttcatcgccaacaagggccgggagatgactcccgaggagttccgcaaatacctgtcccaggaggctacgcacgtcctggactcgacaaagggcatgaaccccaacgacgccctacaggcgctggcgcagcagcagaaggccgaggagcagctcttcggcatgcaggccaaggcgtacatggactggtccatcgaccaggccgcacgaggcttccgcacccagggtaacagcatcctggccaaggctgtacaggcccaggccaccggcgacgaactgtcccgacaactcagcctggaagaggctggcctgttctataccaacatcatgacctccgaggatatcccgctggaggtgcgtgacaaggtgggcatgcagttcctggcagccagcctggacatgaaccagcggggcatctacgagagtctgcgcgatgccggcttcctggacagcatgtccttcgacgaccggcgtgcgctcaacggcctctatgaaaagtcgaaggcacagacccgggccaaggaatcgatggctaccctgcgggccgatgcggacttccagcagcgggtggctaacggggccatcacagaccttgccgaggtcgaggcgtactcccggggcatggtcgaggagggccgctggagcgacgcccaggccatctcgttcatgaccaaggccatgaccggcctgggcaacgctcagcgcatgcagggcatcatggcggccctggaggctggggacatcaacgccctgcacacgctggggacgaacgtctccgaggcactggagcagtgggacaagatgcaggcggccaacggctcaagcctgaccgatcgactcgtacagggcacgcagctcggcctgcgcctggggaccttccccaagacctacggcgagtccgtgggcagcgccgtgcggatgatccaggcggccaaggaaggcgaggcgaacccggagctggtcaatacgttgaacagcatcttcgagcaggtggcctcggcccaggagatcaacccctccgccggcaacgtgatgctatccggcatcccggaagccgagcagggcgctgtggcctgggcactcaagcagatgaagatgggcatcgccccagctcaagcactgcgcgagttcagtgccaacgccgaagtcgtgaagcagatggacgagttcgagaaaggacagaacaccaaggcattcaaggacaacctcggcaagcaggtcaacgacaagttcgtgaacaacatcttcggtcgggcctggaacatgctgaccggtgagagcgacctgagcaacaacgaggccgttctcagcatgtaccgtcgagcaaccatcgacgaggcgaactggctggccagcgaccgcaagcatgcgggtctgcttaccagtgacacgggccgcgaggccctgctggagatcgccgccgccaacgtgcgtaaccgcaccatccaggtaggcgaaggtcggaacctgaaggaaggggacctgttcagccgccgcgacagcgcgccactgatcctaccccgtggaaccaccgccgagcagctattcgggaccaacgataccgagaccatcgggaccgtcctggccgagcagcacaagccgcatgtcgaaggactcctcggttacaagtcggtagtcgccttcgagtacgaccgcaccagtggcagcctcctcgccgtcgagtacgatgagaacggtgtggccctggaccgcacgcgggtcgatccccaggcagtcggtaacgaggtgctcaagcgcaactcggacaagctgaacgcgatgcgaggtgccgagtacggtgccaacgtcaaggtcagcggcacggacattcgcatgaacggtggcaacagtgccggcatgctgaagcaggacgtgttcaactggcggaaggaactggctcagttcgaggcttaccgaggggaggcgtacaaggatgccgatggttatagtgtgggcctggggcattacctgggcagtggcaatgctggggcaggtactacagtcacgcctgagcaggccgcgcagtggttcgccgaagacaccgaccgcgcactcgaccagggtgtgaggttggccgacgagctgggcgttacgaacaatgcctctatcctgggcttggccggtatggccttccagatgggcgaggggcgtgcccggcagttccgtaacaccttccaggcgatcaaggatcgtaacaaggaagccttcgaggctggcgtacggaacagcaaatggtacacgcagacgcccaaccgggctgaggcattcatcaagcgcatggcgccccacttcgatacaccgagccaaatcggggtcgattggtacagcgccgcaacagcggagtaagacatggcacagcaattcaagggccgcatgacgcccaagtacccacttgaccaagcacagctcgacgaggcccaagtacagggccaactcgacgcagtgcctaccgtggggttcgacgccctgacgggtggcgagatcggagaacggaacgtggcagcgggccaacgagccaacgcgcgggaactggaacgcatcgtagcggaccaggaactgccggcccttgaccgtgcttccgcactctggaaccagtccaccctcgtcggacgctggggcgatgcgctccagctcgacgcggaccttgcggcgaacagcaccggcgaggtggaccccaacttcgacgccgggacctacggggtccaggcgctccaggcggcgggtatccagccgactgacaactatctccagatcatggcccgtgccggcaatgccgaggacgcggcctacctcctgtcgaggattcaacggtatgagcaggacgagcaaatcgtgcgggacaacccgtactggaacttcgcggctggcatgctggaccccgccgctctggcagttgatgcggttactttcggcgctggccgtgctctgcggctcggtcgtgctggcatggctgctgctggcggcgctgggcaagtcgggtatgttgctgggctggatgccgcaggggccgacgtggatgccggaacctacatcgtggcaggtgctcttggcgctggcgtgggtgctctgctggggtctggtgcgggacgcattgccgcagaggccccaacgcaaccgcatgtgcccgaagtatcggcgcctactgtcgggctgccagaagtagccatgaccgccgaggaggccgccgcacgcggcttcaaggccggtgacgtggtagacctgctggacgagggcaccgtgctgtcccgtgtcagctcccgtgtggagcaggccgagataccggccatcccgcgccgtgacactgccttcggcgacgagctgcacagcctgtcgggccggaagctgtccgaggtcctggaccacctcaagacccacgcagaggttcccaagccgctccagggcatcgccgccaaggtggctgataccatcaggaccctggagggcctgggccagcgaaccgcgttccgagtggtgcagggtggcgacactgccagctccgcattccttaagccgggcacggcgggcatccactccacccagggcctcgacaccttggtccaggtacgcggcagcaccgcacctggtcgagttggcaccaacccggtgaccgtgctccacgaggcggtccacgctgccaccgtaggcgtgatgaacgccgccctgcgcaaccctggcgcgatgagtccgaaggtggctcaggccatgcagaccctggagaacgtccggggtaacgtgctcaacgccctgaagcaggaccgcgccgccggtcggcaactgtccgagttcgaagagacgctgctggccggcaactccaacaccctggcaaacgtcaaggagctggtggcctggggcctgacggatacccgcttccagcggaccctgaatcgcctccgctacagcgacggcgggccgggcctgtggacccgtttcgtggagggcatccgtagcctcctgggcctccggtctgatgccgacacggccctgagtcgcgtcctggccgcctctgagacgatcatggacgccatgccggggtacactaaggctcaggctaagtgggccaacaagggcgctccggtgaccgaggaggccagcctggagaccatcgtgcggaccaccagggagcgtgcccgcgagggtgcgggcttcgtgaaccggttcttcagcgaggcggacctactggcacagcccggagagggcgcacggcgcctcctgagccgtcttatcgacgaccctgtacgtcgggatgggttcagcacgaacgacaacgcagcgagctatttgcgccgttaccggaacgagttcgagggctacgtgaagtcctacgacgagatgatggccaaggcaatggctgagcagggcgtgggcctgacggcacgtgcgctgaactcccgccgcgccatggcagtccgggaccagcttaacgagcaggtcacccgcgagctgctgcgccgggaccgggagtggaccgcctacggcagcgtccgcgtagaccccaacctgccgccgaccatcaaggccctggccgaccgctcggacgagattcacggtctgatgggtcagcgtgccagggaagccggggtccggggcttcgaggacttcgctccgcgtcccggatacttccaccgctcgtggaactggtccaagatggcgcagatggatgaggccgcccctggcctggcccggcgtgctatcagcgaggccgtgttccggggcatccctgggctggagcgtgccgacgccgacaccatcgcacaggccattgtgcagcgggcacgggaccgggctaccggtatccgctccgagttcatgggcgcgatgggcgtggcggacacggcattcatccggcaggcgctggaggaggccaacgtgtcccaggccaagttcgacagcatcatggccaagatcgagcagaagcagtccgaccagggcaccgtcaaatacggcaagggccggctgtcgctggacatgaccgccgagatcaaccacaatggaaccgtgtaccgcgtgcaggacctgatcgaccgggacctagaccgcctgatggagaactacgccggcagtatgtcgggccgctcggcactggcccgcgcaggcatgcccggcgactccgaggtggaagccttcatccgtgagtaccagcgggaggccgcgcacctgggcaccgacaaggtgcaggagctgacgggccaactgcggggcgtcttcggggacttcaccggcaacgtgccgcgagagcatcagctcggccccgtcgcacagcgggccagcgggctgaccagcgccaccatgctgggattctccggcgtgtaccagcttgctgagctggccacgatggctcaccgccagggcgtcttcaacgtaatgaaggccatgctgaactcccgcctgggtgacttcgtaggtgccatgcgtcgagacccggacctcgctgatgagatgcagaccgtcctcggcctgaacctcgccaacgacattcggatgaagccctggaagcggcagttcgacaccttcctggccagccaagacaccttcatggatcgcttcctccacgcgggtaagcaggctgtcccggtgctcaacggcatgaagttcatccacaactggcaatcccgcatgaacgccaacctcaccttgaacaaggtggcgcgggcggcgcagggggatgaagcagcccttcgcgtgcttcagcagtacgggaaggacgtggactggacgccagtcctggcgcgggttcgcggttatgtcacatacagaggaaggaacgcccaatccatgaattggggcgcctggagccaagcagacgtgaacaccgtcatgaacaccgcattgcggatcatggacgactcactgctgtacggtcgagtcggtcagaactcgggctttgcccggtcacctgtcggccaaatcctggggcagttccgcagctttgtggccttcgcgcacaacaagctcctccggggaacctatgagaactccggcgtgcttggcgtggcctcgctcctcgcattccagtatccgctcaccgcgctgatgatgggtgccaaggcagcgatcaacggcaagttcgacacctctgatgaaggcatccgcaagatggccatcgacggcatcggttacactgccggcctcggcttcaccgccgacatgtggggcgtgatcaccggacactctaggatgtccgccccggtcttcggactggcggagcactccaacgaggtgttccgtggcgtcaaggacctagtaaccggcgacgaccccgcagccgccaccggcgatatcgtcaacggcgccgcaggggcactgcctttcgtcaacgtattcccggcgaccaagttgctgctggaatccatcaaaggggaataacgtggctcggttcaagaatcccgagaccatccacgttgcagatggggtcgaggctgtcttcagtctcgacttcccattcctgcggcgtgaggacgtattcgtccaggtcgataagatactcaccaccgactatacgtgggtggacaacaccaacattcaattggccgtggtgccgaagcagggccaagaggtccgcatcttccgcgacacgcctgcccaggtcccggacactcagttcagccagggcatcccattcctgccgcgctacatcgacgcgaacaacaagcagctcctgtacgctgtgcaggagggcatcaacaccgcgaacctcgccctggatggcgtactcgacgcgatccgtatcgccgaggaagctcgccgcctggcacaggaagcactcgacgccgccaatgaggcgctgcgccgtgccctgggcttcgctgagattcgcaccgtgaccgaggactcggacatcgatccgagctggcgtggttactggaaccgctgcatcaccgctgacaaacccctgaccttgaccatgcagatggaagacccggatgcaccctggatcgagttcagcgaggtccacttcgagcaggcaggcgtgcgcgacctcaacatcgtggccggccccggcgtgaccatcaaccggttgcagaacaccaccatgcagctctacggcgagaatggcgtgtgtaccctcaagcggctgggcgctaaccactggatcgtgttcggagccatggaggacgaataatgcgcggcattatcgcgggcatcatggcctcccaaatccggcgtccaaaaccaatcctggcgacgtacccgtatcccatcctagctacagacgacgcatggtcctgccggcccaacatagtggcggcgctgacacgcgacactctgcacgaggttgtgaaccagccaggagaggacacctaccacgcgacctccagcgtggtaagcgtactgctgcggtcgctgactcagctcggctacggcggtggcgatgggttcctgaccggacctgccgtcaatgcagccttgctgcgcgatacggtgaaggaatataccgcagagccttacgcattcctgtcgcagaccgcagtggccggcgcagaactgaaggttgtggttgtatactccgagtatatcgtggagccgtacgccttcgccacctcgacagcaattaaacaggcggaactgaccaatgtttgagacacgagttaagggtcgctacaccgtgacccatctgaaagccacgggtgaagtcctggcacagtacaccttcgacaacctcatcactaacgcgggtctcgactggatttgcgccatggacacctcagacctgttctcacaggccctggccgtgagtaccagcacagcagaccccaaccccgctgcaccctccctgccggaggaagtacgacggaccacctcgtacgccccgaacggggatgttacctcgggtctggatggggagtggatttactggcacaagcggtggcgcttcccgataggcacccttaccggacaggtactggccaccgtgggcatcgtggcccaatccgaagttgggttcgagagtaacaccggcgcgaagattccggcagggactccactgtcctacacccggatcaaggatgccgccggccaacccaccaccctggtggttcaggccgacgagattctcgacgtgcagtatgagctgcgcagcaaggctgtggcgatggccgaggccaagttcgtgatctctggagtcgagcgtaccatccgccttactccgctgcccttcgcgaaccggcgtaacctctacggtgagcgctacatcttctacaacgagagtcctcggattgacggtaagaatgcgtccggctcggatgtccaggatggccagtgggtgaagctgtacccgcgatatacgcggggcacctacaaggggcagctaatgctgcgggccaccgttgataacggcaacatgccgggaggcatcaccggctgcaaggacctgaagatttacaacggtcggaactacgcactcaccatcgacccgcctgtagtcaagaacaacacgcaggaattctccatcacgatggagttctcggtagcgagggcataacccatggcactgatctacgacttcaacctggacctcgatccgaaggctaagtccaagttcgtaggtgcgcgaggccgtagggacatcagcgacgtgctagacttctgcgacgggggcgtggccatccaggacccgtcgcagggtatgatggtccgcgtgtggcgaacagagcttcgccaggacgggacctacctggggcacgaggacggctcgaacgagattcgcatcggcggaggtatcgaagaaggtatctccacgatgtccctcgacttcgacagtaacatgaactacgtgtgtgctttcgtacgagccgatcgaactggtgcaatctcctacttcaacgtgcagcagggccgccggctcctcgtggagcttgggcaggttgactatgccaaggtggccttggacgataagcgtcctggagctactgcctgggcacaggtcatcgtaccttacacccgtaacggcaacctgtacgtccgcacacagaacgagaactatacggtagagcacctggaggtggataccggcaaggtattccgaccgctggtcaaatgcggtatgggcaccaacctccgcttccaagtccaattcagagggcacatgtaatgagcaaaaagcagaccgcgagtgctgagcggctgggcctgctacacgagctggtctgcaccgctatcgagcgcaacttcaagtggtacatggacaacgacatcccgatccccgcatcggatatcgctgccgccaccaagttcctcaaggacaacgagatcacctgtgatccgtccgacaccatcaacatcgaccggctccgcgaggagatgcggcaggcgcaggccgagaaccgccgcattgccttggagggcttcatcgccggtgagaccgacgacgagatggaacgcctgtacacccactaaggaggcagcatgacgccgcaagaacgattccagatagcccacgaagtgcgggacatgtacccgcgcttccgggacttctgcctggacgccatgctgttcctcggcttcaagatgacgtggatgcagctcgacatcgccgacttcatgcaggattcgcccaacaaggcgatggtcgctgcgcagcgtggcgaggccaagtccaccatcgcctgtatctttgtggtgtggtgcatcgtccagaacccggctacccgcgccatgctggtatccggctctggtgacaaggctgaagagaacggccagttgatcacgaagctgatcatgcactgggacctgctggcgtacctgcgccccgaggcccgaatgggtgaccgtacctcggccaccagcttcgacgtgaactgggcgttgaagggcgtcgagaaatcggcctccatcaactgcatcgggatcaccgccgccctccagggttaccgtgctgacatcctaatccctgacgacatcgagaccacgaagaacggcctcaccgccaccgagcgggccaagctgacgcggcagtcgcaggagttcacctctatctgcacccacgggaagattctgtacctgggcacgccgcagagtcgcgagtcgatctacaacggcctgcccgcacggggcttcctgctgcgcatctggccgggccggttcccgaccctggaagagcaagagcgctacggcgactggctcgcaccctccatcctggcacgtatcgcccgcctggaggagaaaggccacaacccgcgcaccggcaagggcctggacggcacccgtggctggccggcggaccctcagcgctacaacgaagaagacctgatcgacaaggaactcgaccaaggccccgagggcttccagcttcagtacatgctggacaccagcctcgccgacgagcagcgtatgcagctcaagctgcgcgacctgctgttcatcgacgccacgcatgagagcgtacccgagcaagtggcctgggctgccgacgagcgcttcaagctcaagttcgacgcccaccgattcccggtcatcaagcctgagctgtacctgccggcgctgatggctggcggctgggcaccgctccagcagatgacgatgttcgtggaccctgccggcgatggtggcgacgagctgtcgtatgcagtaggcggaactctcggcccgtacatccacgtcgtgagcatcggcggctggaagggtggatttgccgaggagaacctggagaaatgtattgccctggctgcgcgttacggcgtcaaggtgatctatgtcgagaaaaacctcggcgcgggtgcagttggccagctcttccgcaaccatatgcgatccatcgacccggacaccaacaagccccgctatgaggggatcggcgtagaagaccgccagaagtccggccaaaaggaacgtcgcatcatcgacaccctgcggcccatcatgcagcggcaccgtctgatcttccacgtctcggcgatggattccgaccacgtgtcctgccagcaatacccagcggacaagcgcaacgagcgctccgtgttccaccagattcacaacatcaccaccgaccgaggctcactgccgaaggacgaccggatcgatgcccttgagggccttgtccgcgagctagcacccacgctcgtaaaggacgacgaagccgcaacccgcgctcgtgaagaggctgccaagaaggaatggctgaacaacccgatgggttacactaagtctgtccttcggtctctcggcatgggccgggagcgtcgcaagggccgcccaaaaggacgaagactatgatgctcgataccgccaccgaggcgggcaaaggcaccctcgccgtcaccggcgtggggattgccgtttactcgccctatgagatcgccagcctctgtgctgcggtactcaccgcgctctacgtgggcgctcagctcatcaccctactcccgaagatgctcgatagcatcgcggagcttcgccggaggttcaagaagtgaacaagcccctgcgcggcgcagcccttgcggctgccctcgccggccttgtcgccctggaaggcagcgagaccaccgcctaccgggacatcgccggcgtacccaccatctgctctggcaccactgccggggtcaagatgggcgacaaagccacaccggagcagtgctaccagatgacgctcaaggactaccagcgcttcgagcgcattgtcctggacgccatcaaggtgccgctgaacgtcaacgagcaaaccgccctgacgttcttctgctacaacgtgggtccagtctgtacaaccagcacagcgttcaagcgcttcaaccaaggccgcgccaccgagggctgccaagccctggctatgtggaacaaggtcacgatcaacgaccagagggtcgtatccaagggcctcgtgaatcgccgcaacgcggagatcaagcaatgcctcgaaccatcgtcgcaatactcgtccttgctgtggtagccctgggagcctcatacggcttcgtccagagctaccgagccttgggtatagcccaggaggagatcaagcgtcagacggcccgtgcggaggccctggaggtgcgttacaccaccttacagcgccacgtccaggaggtcgccgccaagaccaacacccagcgccaggaggtggaccgtgccctggaccagaaccgcccgtgggctgaccggcctgtgcctgctactgtcgttgacagcctgtgcaaccgccccggcgcccgctgtgctgtgcgaacaccctctgattgaccctaccacccaggctggcctaatccgcgctgtagcggcctatcaggacgccctggacctatgcaacgccctgaatcaaggagactgacatggcgaacacccgtgatcaatacctcgctggccgtaacaccggcctgaccttctaccaggtctgccagcccggcaccgacaaccgcatcgccctgcacgacatggacgaggccgatgtcaaggctaaggccaccgctgtgattgcagcagcctctgccctgggcggcgagggtggcgctactccaccggacccgctcaccgcctacaaggtgaagaacggtgacaccctgcccgtggacggcggtggctccgtgaaggtgaccgtagccaacggtgccatcaccaaggtcgtgtacaccgcaccggcgggctgagctacagcccgtccaacctgatccacccataacacaaggaactgaaccatggcaaccttcgccgctgcaactcagaaagacctccgcgccttcgccggcaccatcgagaacctgatccgtccgctggaggaagcggccctgggttctggctacaacgagaccaagctgcgcgctgaactggtcgcgcacctcgacgagctgatggctgctgtcgagactgccaaggcgctggtctacaagtgatcgacgagtagctcaagccgagcacctgcacagtcgggtgctccactggaactactggaatttttattgagggctggctgtgggtgggagttggtagtggtgggcgggagtagttactccgggtctaattttggtatcgtcgtgtgagaaccctcccgactctgatcagcccacccttcccccgtaggccctccgcctggtgggccactgcctcgcattgcctgggtgttgcctgggtcatccctgggagcttccagctacgctgggtggtggtgggcttccctgccctgtcgctgtcctgtcgccgcccattctacgcatcctggcgggagtgtcaacccctgggtggtcggtgccttgctcggctacgctccagcgcttccgcgtggtcggctaggcggttggctcgccagcgcttcgcccactctacacctcgctccacctcggaccacttgtccgccagcatcatgcgctgccatgccgcgtcctgctgtagccatgccctgctggctctgtcctgtctgctcagcatcctctgtctcctctgtctggctccctggggcttccctggggcgctgctgtggtcctgtcgggtgatggtg

SEQ ID NO: 57 - DNA, 44479 bp, synthetic construct
  source 1..44479: mol_type = other DNA
tctaattttggtatcgtcgtgtgagaaccctcccgactctgatcagcccacccttcccccgtaggccctccgcctggtgggccactgcctcgcattgcctgggtgttgcctgggtcatccctgggagcttccagctacgctgggtggtggtgggcttccctgccctgtcgctgtcctgtcgccgcccattctacgcatcctggcgggagtgtcaacccctgggtggtcggtgccttgctcggctacgctccagcgcttccgcgtggtcggctaggcggttggctcgccagcgcttcgcccactctacacctcgctccacctcggaccacttgtccgccagcatcatgcgctgccatgccgcgtcctgctgtagccatgccctgctggctctgtcctgtctgctcagcatcctctgtctcctctgtctggctccctggggcttccctggggcgctgctgtggtcctgtcgggtgatggtgcgggagtggctggccttgcctcttgtgcctctgtacctgtggcattgccctggctctacctggctgctccctgggtattccctggggctgcctgggtggccctggccactccctctaggccacgtactctactcgcctccacctgtcctgtctagtcctgctctgctccctggagcttccctggatgctacctgggtgctggtctatctccctggctctgcctggcgctgtgctgtgctaccgctggtcctgctgtcttgcctcgccgctccctcgcctgctcggtcgcacctgcggcgctgatggactcctgtttgtccattgtgtgtgacataaccgcagccttagtgccatgcgggttccagggcgatgggtctggctggttggctgctccctgggtgggggctgtcgctccctggtaacgcaaatcctggctagctagactaagcctcgcgcatggggtctctatacgcgtgggaaggctccagggagcgcctggggaggggttgacacgttggcggtaggtctgtagagttcgccctgtcttcacgcaataccgccttcacaggcagcctggagacagggttgacacactacccgggcatcggtagagtacgcagccagaacgacgggagattgcaaccttccaagcgcggcacaagccataggcgcaagggacacggcaagctcttagggcaggaaccgcagtgtgtaaggccggcaggcatcactggggggattgacaaggtaatagatgcggtaagatgtgcggcgtcaagtggtcccgatgtacacactgtgaagggattacggcgcggtcagacagatgaccggcaccgcttgacactgtaaagctcagtcggtacgatgggcacccatagcggacgtgatggtccggggcgatgcggataggacgccttgtttataacctgaccgcaaagctgtgactccagccgataggactgacccaccacgtaaatacagacgggttgacacgacaaggccaagtcgataacatggccgccacaaagggaagcgatagcttcctggcggtagaggttcgaagcttcaccagcggtacatggactggtgcggtaggttgaccgaagctgcaactggttaggcagggtcccagggaatacctgtcgggtgctgaagactcacccaaaagagtctgagcgggaagcctccccgtccacggttaagcaaaggcacgttagtgccggtgggaacgaatagagtgtcagtgggatcgagaactagaaacctcggttaatcgcgactgacagtatgctgggtagtatcggtgggccgattgaacaaggccaggcagatagcgcaaagggtacgggggatgagtgaagacgatcccgaagagtatgcgcaggacaagccagaaccgctgatactacagggactatgccaatgccaaggtttgtcccttgaggcccttccaccgaggggattcaagagacagacctagttgaggaatgccgatggcacacttcaaggctaaggctcccaagtcgcccttcgctacccaggtagcgtactggcgggattgggaagccaaacgtactaagctcatcgcacaggataacgtcgaggggcgcaaagagcttcgcaagatgcgtgacgtgcgctacgctaccgacccggagccagcgccaggacgctaccataaccctgaacagaaagcgttcgtgaagggtagcgaaggcaaggcgcggaacatcctgaagggatggaacgctaagaagtcgcaagggaagggtttgtaatgccacgtgtgaatgaactgacgccgcgtcaacgcaaggccgccaaggctcgccgcgacaaggcacgccggattgatctagcgcacaagatgccgaaaggcgccgactgcccgatcttccgcaaggctgaacaggcgcaagctaagcagccccgcgtcgataccctgaccactccccgcagtgccggctacctggccgccgctgcttacctgaacaaatccatctgaggtacataccatgaccaacgcaatctccaaaaccgtaatcgcattccgtggcaccgaagagatcaatcgcgctatcgacgccatccgtgtccgtggcaaggaactcgacgaagccatccaactgaccggcctgtcgatcatccatcacatcgaccagtgtggtgacgtgaccgtggtcaaggcgctgtatgaagccatgccgaagggcagccgccgcaatgcgctggtcgagtggctggtgctgcacggcaaggtacaggtgaataccgacaagaagtcgaacaaggacctgcccttcctgtacaacaagttcggcaagaccgatctcgtaggcgccaccgacaacccgtggtacagcttcaagcctgagaaagcgctggaccaggagtttaacctggccgctgccctggccacgatcaaaaagcaggtgctccaggctcagaccaagggcaaggtgatcgtcggcatggaactgctgggtgatctggaagcgctggccgccaaggctgcacccatcgccgagcagagcaagcgcgctgccgcccattgactcaagtcgaacgcctgctaagcgggcgttccgctggaatcaatgacaactggagaaacacgatgagctttaagcaacgtctgcaacgtcaaatcgccctggcccaatacagccgcccggctcagttcccgtacggcgagcaggccgtccaggcgaagggagagtgaccatggacttctggattgccctccccttcctcgaactcggcctcaacctcggcgaggatgaactgcgcatgttgtggttcagcggcctgacggtattcttcatccacctcctgaagcggtgactcaagtcatggccctggcgggcgaccctcgcctactccggggccatcgctggactcatcacaagcgagaactaaaccatgcaagctttgaatactctgttgatcgcaatccccaaggacccgtcgaacgcattcaatgcagccgacaaggtgctgtgcgcccatggcttccgtatgggtgacctgaataccgcgcacgtgctgacccctggcgggttcgtagtagtgggcgccggcgtgaccgtcaaccgctacgacgaagcgtatcgtatgagccggaacctcgattccgaaggcttcgacgttctgctggtccagggcagtccactgtccgggcacgtcacctgccaggcgtacggctggatcaatgcggaataccgcaagggctgcgcgaacgggcgcccgatcttcgacattgcaggaacctcgtaccatgtcctcgcgtgatccctaccgtatcggccaccgcgtggggctggtgaactacagcgaccgctacctaggtgccgacgcggcaggcaccaagggcgtcattgaagccataacccgaccgtcccgctgtatgacgatctatcacgtacgctgtgagcggaccctgcgcttgatcgaggccgaggcccgtaacgtgcgattcatcagacagctaccgacccgcaaatgacgtggcgcataatcgtcgtcagcccatcaagcggctgcgccttcgtgtggagtctcaagcggcctgtgcggccagtgcgattctactcccgcaaggcagctaaacgctggctccgcaagcaccgccgacagggcttgcctggccactactacctcatcgtgaactggagcaaacgcctatgaatcctacttacgtcgtccgcctcaaggacggaaccacccgccaggtagtcgccgacagcatcgtcaccggccacgccttcgtcgaactctggttcctcggcggggcggtcgctatctacccggcctgcgaagtacaggaggtccaccgcactgacctcgtaaaggagggtggtgatgaatacccgcactgtatacgtcaagccgcacagttcgaggtgcccgccggtattgtccgcaggacgcctgaccccgggtgaactctaccacgtgatcgcacctgccgaggtcgaaggcgtcattgtgctggcaacttcaggcccgtggcacatccggtccgtggtggtgcatagcatgcacccctcggtatatcccgtagggatggctgtcactgacgattcctggcggttccgccgcctgggtgtgagcgagtacgtccaactaattcaagggtacgaacaatgatcgccatcctgttcgtactcggtctgtactgctgcctcggcctgctggcaggcgcctgctactgcatcgcagtggccccgccattcgagaacccgacggaagtgcagttccaggacgcatgcgtgatcgggtgcatctggccactcgtgatcctcgtcggcatattcctggcactccgtgcagtaggccggggcctgctgaccgggctgaagcgtcacctgaacatccaataacctaccggaggtaacatgatccgcacccatacccacaacaccgaccgcgaacagcgccgcatctacaagctcactgagctgacgtcgggtgagatgtacagtgtagtgcagcccgagtccaagcgtggcacgctggtggtcggagtagcaacctgggatagccagagccgacctgtagtgctgcccgtggtcattcacgatgtgggtgcgcatccctcgccctgtcccaccgtgctgcgcaacgacggctggcgcatggtgcttgccgccaagggcacccaggtaacactcaccgccgagtgaccaaggcgaaggctggtgcgccagccttccaccgtggccattccttgccgcgaaccaactcaaccgaggagctacaacatgaccaacgtcaacaccgccaccaccgagaccaccaccgctgctgccctgggcgccaagctcatcaagaagccggctaccgtggaagacttccgcaacaacgtggtcttccatcacaccgccctggccaagctgaccgaagtctacaacgaggcggtcgttgccctgcaaaccgccgagcgcctgtccagcctcgtcgccggtgacgtgatcaccttcgaccacggcaagggcgagaaagccgaagtgctgagcggcgaagtcatcagcgtggttgccggcgtttaccaggtgctggtccgcttcagcgacagcgcacctgccaagctgctggacgtgaaggccagcgccatccgcgccgtccagtcgtcggcagcccaggctgctaccctcgacgaagccatcgcccagggcgagtaaggcccgcacgtaataggcccggccctccgggcctattgcgagctagccataccataggaggagtcaccatgagcaagcgtaaccccgagcacatcagcggcgccgtgcgtagcgtcagcgtccagaagtcggcagccgtccaggaactggaggatcgtctggagtctgccctggccgtgtgccagcagcgggcggaagacatcgatctgctgagccgccgtctccaggccgccgagcgcgcccgccgctgggagatcgacgagattcgcaaccaccaggcgaccatccgcctgttgcagaacgacctgaacgctgcgcatgatgcccacgaggcacaagagcgccgcgctcgcaaggcaaccatcatggcctgggtatgcctgctgaccgcaggtttggccgtcaccctgaaactggcaggagtctgaccatgcagtgcaacgacctttacactaagctcgcagcgagcatgttcaacgtgccgtgctcccaggtgaccgccgagatgcgccgcgtagccaagagccgggcattcgcgtatgcttacactcccaagcgacaggcgtcgggtgggacgtacaccgcccgcgtgagcggcgtcacctgtgacggtggcaaggtggaggtacgtctggacaacgtggagcgcgccgacacctgtggctatgccaagctggaggcgctggaagcggtcagcctgtaccagggtgccgcgaagcgcgccgatgagtatgaaaagctactgctccaggcattcccggtggtggctaagcgtcgtgagcgcttgcgtatctccgggccgctgtcggcggaagacttccgggcaaacctgctcgggacgtgttccgcatatcggaatgccctcgacgccatacggggcgagattacctcgaccggcccgttgcggaaccgcatatgggcgctggtcgaacgtatgcaccgggccgagacgaagctcaggaatgctcagtcggagatcaaccgcctgcgggagcaggaactggaccgcctccgcaaggacatgtccagctactgcgccaacgacgttacctctacggtgagtgcagcatccgcgaaggataccctacgggtggcaaccttcgccgccgccctcgccggtggcgtcgtaggtagcgccctgatgttcctgctcagctagggcgaccagggcctactccggggtcaaatctgagggcgttcctagagcgccctctcgtgtgagtctggaggatcacgaacatgcaataccatttcacgcattacaacggataccgcttcggcgtcgagctggaagacgaggctgtcttcccgtgcatcgacggtaagcgggcgacctgggacaaggtggcggcgtgtgccggtagccttgtgcattacatggcgcaggacctgattgacttcggccagcgcaagttaagggagatcgaagatgagcaagacgagcctgtacccgctgagcctgcatcccggcctgattcaaatcaggacgattcacgtattcagcattcaagctccgagcaacgccgagaactggtggcaatggttcctctggcagcggaagtaccacccgctccgggagagcctgagtccagccggggaactgagtgcgagtatcgccgagtgtgtccaccgcctccgccagagtggctggcaagatagcgacatctggcgcaagaagggaggcgtgctggccctcggtgccttcgacctgtccggcctgatggtgggttcctgcctcgtagtaggcggtgagctgaaggccctgtgcgttgatgaccggcacagcaggcagggtatcggcgctgagctggtacgagctgccgagctggccggtgctgagcacctgacctgcttcgagttcctggagccgttctacgccggcttgggctggcgcaccgagcgccgtgaggcaaactggactgaaggcgagccggatgtgctgtacatgagggcacctggccatgacgcatgaggtgatggtatggcttatcgcgaacaaaccgctggtcatcggagtcgccttcagcctggtggccctgggcgtgctgctcacacagaacaacggcggcccgcctatggcgcccgcatgacctggcacctccaggacatgttcgaggcccgaggtgggctgaggcccttgtgggaggagtggtatcaatggcactgcgccgcgactcctggctaaagcaagcgcaatccctggcagtcggccaggcgggtcgattccgccacgtcctgggatgccagagcatgagccggggcgggaccaacatgacctgcaagaacctgcctgaccgctgggtggcatactgctactcctgtcaggaaggtggcgtggtcgagaaaacgcacgtgcggagggtgcaatgcgcggatcaagaacgcttcatgccctggcccgaggatgcctcggactggacgcaagccgactgctatcaatcgctatatggtttgctgctgtccaagggcatcgactacaacgtgatgacgccggggctgccgctgctctacagcgaaaggcagcatcggcttatcttccctaccgacgcgggctggattgggcgcgctactgccgaccaaaatcccaagtgggtgggctacgggtatcctgccccggactaccatggatggccccaggaatcatcaatgggcaggccatgggtgctgacggaagactacttgtcggcgctgaaggtgcggtgggcatgtcccgaagtcttcgctgtcggtctgaacggtacaaggctgcgcgacaggctggcggcgatcatgttgcagcagacctgcaagcgcgccttcatcttcttggatggcgaccgggcaggtgtccgtggtagtgcaggcgtgatgcgccggctccggtccctgcttatcgaaggccaagtcataccaacgccggacgggttcgaccccaaggacctgacccgcgagcagataaggagcctagtaattggacgtattgacgcttcacgcactgagtgaccgggaccgcttccgcacgttgcggagtgtggtgcccgaaggaatgatggggccggagacgtgcttcgtcatcgactggatcgagcagtattggaaggtctacccggtgcatcagaaggtagacccgcaggcactgcgcgaactgatcaagctgcgaggtggctaccagccagagcaactagcggtggtcctgaacctcgtcaaccaactggacaagccggtggacccggactcgctacagggcgttgtgtcccagctcaacgaactggatttctcagggcgggtggatgccctcctggcgcagtacaaccagggcgaggacatcgacctggcgtatgagctgcgccggctgagcgacgaggccctgcgccgcgagggggtcagcacgccgaccgactacgtgacggacgacgtgtttgatatcctcgcggaggagcagggtgaccacggcatcaagctgccggggctggtgctgccggcgtacatgaagggcctccacgccggggcctcggtgctggtggcggcgccgcctgatgcgggcaagacctcgttcatggcctggatcgctgtccatatcgcgccgcagctcaagcggtacttcgacccggggcggcccatcctgtggctgaacaacgagggcaagggtcggcggatcaagccgcgcctgtactcggcagccttgggcatgaccgtgggcgagattcttgccctggacccggaggaagttcgcaggatgtacgccgagaaaatcggcggcgactctgagctgatccgcatcaaggacttccacggtgggtcgctggctcaggctgaacaggtcatcgacgcgatgaagccagcggtggtgttttgggacatgatggcccacgtcaagggcggccagcgcaaggaccagaaccgtaccgacgagatggagtacaaggtggctgaggtccgcgagatggcggtacggcacgacttcatcagcttcatgacgtggcagattagcaacgacggccacgaccagttgttcccgccgcagtcctgcctcaaggattcgaagacagcggtacagggtgctgtggacgtgcaaatccacctgggccgtctcaacggcgcggatcaacaggtcatgcgtggcctgtccctgccgaagaacaagttccagatggacgggaagccttcgaacgtggaggcaatgattaacttcgacgccgcacggtgtcgtttctttgagagtgtggatcatgcaagctaagcatagccgggtgctcgaaggcaccaaagaaattccgctgggtagcatcgcactgttaccgggcaccgtcgcgggcctgctgctgtgcctgtactccgacgcaactcacgaggagggcgtcgccttggccggtgggttccctcgcgacttgctgcacggcgccactcccaaggacgtggatgttgccctgtacagcatgacctgggggcgggcagagcacctgatccagaaggcactcccggtcctgaaccccatcttcgtccgggatggtgggtggcgctcggactacgccgatggcggcgacggtggtatcttcaagggcgtgatgtccctcgtgggctgccgtgggttgaatggcatggacttggactttaactactacgacgccgacagcctcggtcgagtgatggagtcgttcgacttcaccatcaaccaggtaggcatcgcgtacaactggcccgaccccgaaggcggtccgcgcctgggtgcgtacctgcacaaggacgttacctggggcgtgaacagggaagtcggtaacggctcgcgactgccggagcgatgcgagaagatgcgggccaaggccgcgtattacggatgggagaacgtgtgatgagcaagcgcgacgtggtactggatatcgagaaaggcatctggcgcggcgtagaccagaacgacaaggccgtcgaggccatcatcaagaagcacgggtacgtgatcgtcgagcctaagatcgacgggtgccgtgccatcgtcggtgcgcatggcgtggtgtcccgaagcgggcgccgcttcccggccctggatagcttggaagaccgcatcatcgatcgactggcccgccccgggctggactccggcctggtgctggactgcgagatgtacctggccggcatgcccttcagcgaggcgactggccgcatgtcgcgcaagaccccactgaccgaggaagagctggggtgcctgcacttcgcggtgttcgacgccacccatatagacgtgctccgcaaggcgcgcacctcccacctggtatacgaagagcgccgcgccatggccagcagcctcctggcagcttgccgcctcagcgacactccgacgttcttccaggtaggctcgcaggtgtgtcggtcgatggaggaagtcttaggccggtactccctccaccgcgccatgggcttcgaagggtcgatggagaaagacccgagcatggtctaccgcaacggcaaggtcgccggctgctacaagcgcaagccggagatcaccgtagacgggcgcatcgtaggctacgtgccgggcaggaccggcaagaacgctggccgcatcgtgggctactatgtcgagttggaagacggctcgggcaccgtggccgccaccggtctgaccgaggagcacatcgagttcctgacccgtagccaatactactcgaccgtcaacgacacgatgccaaacttcggtcgcatcgtcgaggtctctgcgatggaacgctcggccaacaccctgcgccatcccagcttcagtcgcttccgcgaccttcccagcaatccaggagtcaaggtatgaagattcgaaagtcccgtaaccgcaactacccggaagatatggtgtaccacgccaccaaccgggattcactgctgtatccgaagtacgtcatgggttccgtgttcatcagccaggacggaacattccgcatctgcgtcatggcagggacctgggaccacgttgggtccgaagttctgcatcatgcacgggacatccaatcccttggcgccggtcgccgtaagttgcaccgggtcatgcgacggctgcgccgcaatctgcaacaggtaggagtcaaggtatgagaatgccaaccgaagaagaacgcacgatccgctgcctgctggcagatatccacgaacccttgaacctgctgttccccggtatccgtgtaaaggccgagacaatgcccttgggctggggagatagtatctgtgccctggtactccgggtgagctacgaacatcgcacgctgggtcgcctggagtacctgcacgaggtccccatcctgcacctgacgcagtggggccgggacggcatgctccagcacctgatgaacgagattccccgtcgggtgctggatggcatgctgcgccaggcacagaaatacagccagagcaactggtacagcaaatgacgactatccgaatcctcgacctcgaaaccgagagctacgagcacaaagggcgcaaagcgtcgccctttgacccccgcaactatatcgtcatggccggctggcgtgacgatgttgacggcaaggtcggccagaaggtggagcatcgcttccgcagccgggccgaagccgaagatccgaacaaccgctggttcaacctcgacggcgtggacgtgatcgtagcgcacaacgccatgttcgaatcgaactggttcttcacccgctaccgggacgagtacctggccttcctgcgacgtggtggccgggtctggtgtacccagcaggccgagtatctgctgagccatcagacgtggctgtacccggcactcgacgaactggccccgaagtacggcggcacccacaaggtggacggcatcaagctgctgtgggaccagggcgtgctcacctcggagatggaccaggacctgctgagcgagtacctgtccggcccgtgcggcgacatcgagaataccgccctcgtattctacggtcagttgatgaagctccaggcccgtggaatgtgggctggctacctggagcgctgcgaggccctgatcggtttctcggcgatggagtgcgccggcctgaaggtggacctcgaagtcgcccgggtgaaccacgccaagcaactggaagaggtggccgggatcgaggctgagctgaagaagctgatgcccgacttcccggaatacttcgagttcaagtataccagcctctaccatatgagcgcatggctctacggcggcgaggtgcggtacaagggccgggtgccctacgaagatggccggatggagaaagccgacttcgtgcgcttcggcacggccaagcgggggactcctatcgagagtacctcggtgcgggtcccgatccacgaagtgaccaaccagggtgagtggcactggcccaccatcaccgagctggcgaccaagcacggcccggtcatcacgttctccgccggcaagaacaagggcagcgtcaaggtgttccgtgaggatacggacatcccggcgaccaagtgggacgatgaccagcgattccgattccccgggctgatcaacctgaacaacctgccggaagtggtgcgcgagaaattcctaggcaagcgcccggagttccagtgcgccctcaccctggcggatggatcgcccgtgttcagcaccagcggcgacgccctccaggctctggagaaacagggcttcgaggcagccaagctgttgatgcgcctggccgagttgcacaaggacaactcctcgttctacatcacccacacctacaacaaggatgggacgatcaaggacacgaaggggatgcttcagtacgtggacgatgatggtatcatccaccactcgctgaatacgaccgcgacggccacgacccgactgtcgtccagccgcccgaacctccagcagctcccgtcaaaggacgaagacgacccggaagccggcagccgcgtgaaggagatgttcgtgtctcgcttcggcgcggacgggatgatcggcgagaccgactataccgccctggaggtggtgatgttggcggccctgtcgaaggaccggaacctcctggcgaagctgatggccggcacggacatgcacttgtaccgcctggcagggaagcacaacaactggaacgggttcgattacgaccagctcgtggccatcaagaaggaccccaaccatccgtggcacggtcgcatgatgcaggctcgaaagaacatcaagcccaaggcattctcggcgcagtacggtgcgagcgcggctggtatcgcattcaacaccggctgtaccgtggaagaggcccaggaattcctggacaacgaggcggccctgttccccgagtccatcgcattccggcagatcgtccgcgacagtgcagaggccaccagcctcgtgatgtacaaggccgaggaccagatgccggcgggcgccttcagcgagatggggtcggatggtaactggcgccagtaccgccgaggattctggcaagcgccgggaggcacctgctacagcttccgccaacaggaacgctgggacaaggaacagcgcaagacggtcatggacttcaaggacacgcagatcgccaactactggaaccagggcgaggctgggttcatgatgaccgtgagcgtggggcgcatcttccgttggatgctgcatcgcccgggattcatggtcaccgagttcctgatcaacaacgtacacgatgccgtgtacaccgactgccacaaggacaccgccgccgaggtcaacaagggcgtgcgcgacatcatggccgacgcggcccgctacatgagcgagcggctgggctacgacatcgccgacgttccattcccggcagtggctgagatggggccgaacatgttcaatatggaggtgatccagtgaaagaactgcatccgctgcacacgcccgagttcgtcaaaacattcctggaccagaccgggtgcctgcctggggtacgccgtacgggccgcaccaccggcattgctctacaggccatcggcatggcgctgtcccatccgagggaaaccctgacgttcgtggaccacccggacggcagctcggcagcactggtggccagcattgaaaccatactggcgaccctgggctaccggaacgtcctcgttcgacccacaacccgtgcggacgggcgcagcgtgaacatcgtcttcaagacgctgccgaacgcctgacgaccttccctactccggccttaaatcttccttcgacacaagagagaccacgtatgactcagcaactcaacgctctgcaagctgcactcgccctggccaacaaggctgccgagaccgcaaccatcgacatgtctgaaacctccaccggcggtggcggcggtcgaatcttcccggctggcaccgccatgggccgattctgcatctacatcgagctgggtgaccacgccaaggaattccagggcaagctcaagaacccggcgcctcaaatccgcctgggcttcgcactgtggggcgacgtgaacccgcaggccggtaatccgcagagccgcccggacgacctgttccacacctacgaggccgacggctcgatcaagcccggcctgttccgtaccttcgagatgaccctcggcaacaacgagaaatcgaagaccaagctcgccttcgacaagatgaactggagcgggcagcatacccacttcgctcagatgctcggccaggcgttcatcatcccgatcaagcgcaccaagatcaccaagggcaacaacgccggcaaggaacgcaacgacatcgattggggcggcatcatgaagccctacaatccggtcgatggcagcccgtacaacgtgccggaactgccgatggacctgttgcagtatttcttcttcgacgcgccgaccaaggagacctgggacgccctgcacatcgaaggcacctcggacaatggcaagtccaagaacttcctgcaagagaccattcgctcggccaccaacttccctggctcggccctgcacatcatgctgggcggcggcgacgatctgatcatcaagccgacgacccaggccgcaggcagcaacctgccggcagtgcccaacgtggccgccgatgcaggcgtagcagcagcccctgctgtcccggcagttccgcaggcagtgccgcagacggcccctagcgtgccccaggtggcgaatgtagctgcccctgtggtaggtactgccgaggcacagaacgtgctgcctgacgtaccgcaggtggctcaggtggcagctccggcggcggtcgaagtcccgtcggtcccggtagtgccggcagtaccgcaggtctaatgcgcctgccatcggaagagttcctggcaggactatccgcgcagttcgaccgcagcatggcaggcgggacgttggtgtgtgacgccgacggacccgcctacgtggctgcggccactgctaagaccttggacactgcactccggagattctggaagctcattttggagcagcagttcctagcgcactgcacggggacacgggttcacctcacggcagcaggtggggcgaaggcgtaccgggacacgtatccgaccatgaaaccctaccagggccagcgcaagggtaaggcaaagcccgcgctgctggagcctctgcgacgggccgtggcggacgtgcatgagcgcggcggcgcacccgaagggatcgatgtcatcctgcacacgttcttcgaggcggacgacggcatgatgatggacgcctacgccatgcaggacaaggccatcatccggtccgacgacaaagacctgcggatgacgatctacccgtattgggagatcgacacggcgtgtgtgagcaggatcgaaggcggcttcggctacctcaaggaggcatacacgccttccggccagttcaagctcaagggccacggacggaagttcttccttgcgcagtggctcggcggcgataccgctgacaacatccgagggatcgatcgattcaacgggaagctctgcgggatgaagacggccttcgatatcctccacccgatcacggacgaggatgaagccatcgacatgatcctggaggcgtacgccaagatcaagcaaaacccgctggcagaggccgaggtgctgtggatgcgccgaacgcctaccgacaacgcagcgcagtacctgttaagccgcgaccttcgtccggccttccgccagtggatcatcgagctggacgcctaccacgaggcgctgctccagaagcggagggagagtgactatgacgagtgagccgaaggtctaccagataccgcgcagccaacagcgcaccttcaccctgaagctgtgggccgagcagggcaagctatgcccgctctgcggtaagcccatcgatatcagcgtgaagggcgaggcggtgatggaccacgaccacgagacggggctggtgcggggcgtcctgcatcgatcctgtaacaccgcagaaggcaagatcacgaacgcggcgggttcctggggatgcaagtcgatgaagtacaccgacatcatcccctaccttcgtgccctcctgacgtacctggaggggccgaagcatccgctgatctaccccctgcacaagaccgacgaggagaaacacgaagcgaagctggccaagcgccggcaggcagccgccaaacgcaaggcggcgatggccgtcgcaaagcacaacgcgaggaacgtatgagcaaactccgcaagcaattcaccaatgagtacctgcgcaacgtctatgtcgagctgggtctcaagaagggcgccgagcatctgaccaggcattcgcgcttcggcgaagtgagccgccagtgcttccgcaactggtgcatcaagctgggcttccacgacagcaggacacgcggcacgtacgccaagaagggtgcgctgcactggctgggccgaaaggcggccgaggtagtgcgcaagttccctggcgccgtgggcaacgtggtcggccaagggccgaaggtgttgagcctggacatcgagacctcgcctatcgagggctgggtctggtcgctctggaagcagaacgtgggcctcaaccagatcaagcgggactggaccatcctgtcgttctgcgcgaagtggatgcacagcgacgaggtgatctacatggactgccagggcgaccccctggacgacatgcacctgctggtcgccctgcacaagctgttggacgaggccgacatcatcatcgtccagaacggcaagcgcttcgacgtgcccaagatcaacgcccggttcttcctgaacaagatgccgccgccacgaccgttcaaggtgatcgacaccttgatcatcgccaagcagcaattcgcgttcaccagccgcaagctggagtacatgacccacaaggcatgcaccatcaagaagcgcctccacggcaagttccccggattcgacctgtgggcagcctgcctccaggacaacccggaagcctgggaggagatgcgcctgtacaacatcgacgacgtacgatcgatggaggagctgtacatcctgatgcgcccgtggttcgtcggccatcccaacgtggccgtgtacttcaacgacgctgagccgactatccgatgcccgaagtgtggcgacacggatgtcaagcaagaaggctgggtgcatacgcagaccggcaagtacgagcactatcactgcggtggctgtggtggctggagccgagggcggtatacccgcaacacctcggaacagcgcaaggccctgctgagcaactaaggaggctatatgagcctggcgttctccgatccctacgaatctacgggcacccagcccggccagtaccgcaaaggcgcggccccggacgagcgaaaggccggcaagctcccgatgcacctggtggttgaaggcttcccgctgctaaagcgggagcttgcccgcatgatgcagtgggccgccgaggtcaagggctacaagccccacgactggaagaagatgtcggtgggcgagttcaaggccgcccaacaccggcacgaatcccaccgcctgctggacgggccgctggatgacgagtcgaacctgatgcacctcgtgcatgaggcattcaacgcaatggccgccgccgagcgtgccttgatggaccgggagaaaggcaatgagtaaaatctgttggtgtacccgaccgcacgagaccgacgaaggtgtacgtgtcatctgggccttcaacgagcggggcatcggggtaaactacgtcacggcgtacgtcacgccggcgatgatccaccacccggactggcgcgataccatcctcccggacatcctccaggagatggcggagcgcctggaccgcgaggttaagctggtggaattgcgctggttccgcgctgagattctgagctgcggggaatggcgtgactaccgagcaatgacgctggacggggcggtcagcctggccgaggccgagtggggtcccgaggatatcgggcgcgtaatcgaaagacgataggagacggaatggacctgatacagcagcagatcgcccacgaagaggcccttgtcggggcggcgcagaacgacgcccgcattgccttggaaaaggcgatagcccaagggtccatcgaccgcatcccgagggcacgcatcatgttgatgcggatgctccccatcgtgaccgaagcgatcttcgcccaccaggaagcgaaggcggcgggaccggcagcgaagctgcgacacctgctgcggatcatcgacgcccaggacctcgcggtcatggcgctacgggccgggctgtcgatgctcatcaactacccaacgatcaccgcgacgaagtattacacccatatgggcaagatgctctgccgcgagatcgaagtgcggttggccttcaaggtcaaccaaccctattacgaccggacgctggactacctcaagaccagcaggactcgcagcgtccggcacatccagaagacgatggacgcccttctggacgcggtactgcccgaggaggcacgtatcgacctgccggatggcgactacctgcgtctcggcaagttcatcggtgacccgctgatccaatgcggcctgttcgagccgaaccgcttcacaggccggggcggtacgagcgtccacctggagccgtcgccggaggccaaggagttcctgcaagacccgtcggcggcgatgacctggggaggcccaggccgtagcgtaatgctggcaccaccgagaccctggaacgactggtgcgatggcgggtactacagcgccaaggcgcagaagcatcacgtattggtgcgtcgtaccaaacaccagaccaagcgggcacgtcagatgcagctccgccacctgggccgggacaagatgcccaaggtatacgcggcggtcaacgcactgcaatcggtggcctacgagatcaaccacgacgtgtacgagatcatcgagcgcatcttcacttccggcggcggcgtgctgggtatcccgcagcgtacctacccggacaaacctgagttcccgctcggcgacgagtgggccaaggagaacgccagtgaacaagagctggaagccttcaaccgatggaagcgatccgtccaccgatggtacaccggggagcgggagcataccgccaagcttcgcgaatttgctgcactctaccgagttgttcgagagcatcatggcaaggcagtgtacttcccgatgcacgttgactcccgtggccgcatgtactattggggcacaccgaatccccaagggtccgacatcgccaaggcatgccttcagttccacgaaaagcgcgccctcggcaagcgcggcctgtactggctcaaggtccacgtcgccaactccctcggatgtgacaaggtgtacttcgacgaccgggcagcctgggtcgatgagcgatgggacgacttccagcgagcactcgacgaaggcccggagaactatccgaatctcttccccgaagacgagtcgcccctgtgcgccatcgccggtctgctggagctgcgggcggcctacgcatcaggccagccggagaattaccgaagtgggttcatcgtccatatggatgcaacctgctccggcctccagcactactcagccatcctccgagacgagatcggcggagcatacgtcaacctgttgccacctggacttgccaaagctgacatctactcccgagttctcggtctcgttgcagagtctctggcacgagacatcgagagtgctgaaggcgaggctcggggctacgctgtactgtgggataaggccggtcttgccaggagcctgacgaagaaaccctgcatgacgctggtgtacggaaccacgttcaagggtgttgtggaccactgcctggactacctggacgagtccggcctggagattcccgagggtatcccgtcataccgcctgggaagctacatggcaacgctcatactggacgcaattcgcgagacagtaccatcggcagtcttcgccatggaatggctccagcggctcgctaaggcccttcctgacgcatccaaggatttgcactggaccacgccactcggcatgcaggtcttccagtcctacccgaagaccgaggaggtccgggtgcggctgcgggccgaggctgtcgagtacgtcaccctgtacgaggccaaggacgagctggacccggtacgcaacgccaacggcatcgccccgaacttcgtccacgggctggatagcagccacctgggcctgacagccctggcatgcgcggcggagggaatcccgatccaggccatccacgacagcatgggcacctatgcggcagacgtggatcggatgcacgtccacatacgggagcagttcatcgccatgtacagtggcccctgtgtgctcgtagagctggcaaatcagcttggggtagaggctaccccgccccggaggggatcgttgaatctggaggctgtacgggactcctgggcgttcttctgctgaggtggattatgtcacccacataggagcaagtgcatccgtccaaggccctcgtagagggagcggggagagaggagaggtcagggaagacctggtagaggagaggtggagatgagaatggatgactacgaaggattctagatagaatagactaaccagcataggagatatgatagatggctactatgaagacccaccgccctacggttatgtcacccacagtggaaggatcgagaacaggcaagggtacggcccgtcctgtcacgttcacctctcagcagatcgagtggttagaacagaccttccccgaacatcagatcggtcctggaaccacgatggaagacatccagttccaggccggcaggcgagacgttgtgcgagcagtacgactgcgccgacgtgatgccatcgcagtggagctgaagtgatgagtaagtccatctggcgagtacacgcaaaggccggcactccctcggaactccagggcctgtgctggctggcaatacaggagctggaggagttcaccctcttccgctcgaaggacgacgccctgaatgcgatgctggacagtatcgagggcaacgatcgaaccgagctgttggtattccgcgatggtcagttggccggcggtgcctgcatcgtgttcgaggacgacccccacgtcggcccgtgcgtcacagcacagtggcagtacgtcctaccgcgctaccgcaatacaggcgtggtccgggagttcatccgcgaactccaccgtcaggccggctggggtcaaatccccctcgtgtgctggagccatcgtgaaagcgatagccggtacacgatccactaccggagagccaagccttatgggcaagaaagtcaagaaggtgctaggcaagaccatcatcggcaaactcgctgatggcctgctgggcaccgaccttagcggcgcacaatccgatgcccgcaagatggaagagcagaaccgcctaatgcagcagcaggcggaccagctcgcacgaaaccagcaggttgacctcaccgccgagaacgtggcgcaggttgacctaggagcgatggccgatgccactggcaccggcactcgacgacgccggaatcaggcgggcacaggcgtatcgcaaaccctcggtatcaactactgacgaggtacgccatgaaaaccaccgcagctatgctgtgggagaaacttcgggatgggagcgtggagagtcgagccatcgagttcgccaagaccacgctgccctacctgatggtcgatcccatgtccggcagtcggggagtcgtagagcatgacttccagtccgccggcgccctcctggtgaacaacctcgccgccaagctggcgagatcgctgttccccacggggattccgttcttccgatccgaactcactgatgcgatccgccgcgaggccgacagccgggacacagacattaccgaagtgaccgctgccttggctcgggtggatcgcaaagcaacacagcgcctgttccagaacgcctccctggcggtcctgacgcaggtgatcaagctactgatcgtgactggcaatgctctgctgtaccgagacagcgccgccgctacggtggtcgcatggtcgctccgctcttacgcggtgcgccgggatgcgactggccgctggatggatatcgtcctcaagcagcgctacaagtccaaggacctggatgaagagtacaagcaggacctgatgcgcgcaggccgcaacctgtccggttcgggcagcgtggacctgtacacccacgtacagcgcaagaagggcacggcgatggaatacgccgagctgtaccacgagatcgacggcgtgcgtgtgggcaaggagggccgctggcctatccacctgtgcccgtacatcgtgccgacctggaacctcgcccctggcgagcactacggtcgcggccacgtcgaggactacatcggcgacttcgccaagctgtccctgctgagtgagaaactcggcctgtacgagctggagtcgctggaggtcctgaacctcgtggacgaggccaagggtgcggtagtcgatgactaccaagacgccgagatgggcgattacgtgccaggcggtgcggaagccgtccgtgcttacgagcgtggcgactacaacaagatggctgctatccagcagagcttgcaagccgtggtcgtccgcctgaaccaggcgttcatgtacggtgccaaccagcgcgacgccgagcgcgtcactgccgaggaagtccgcatcactgcggaggaggcggagaacacgctgggcggtacttactcgctcctggccgagaaccttcagtcgccgctggcgtacgtctgcctgtccgaggtggacgatgcgctcctccagggcttgatcaccaagcagcacaagccggctatcgagacgggccttcccgccctgtcccgctccgccgctgtgcagagcatgctcaacgcttcccaggtcatcgctggcctggccccgattgctcagctcgatccccgcatctcgctaccgaagatgatggatacgatttgggcagccttcagtgtcgatacctcgcagttctacaagagcgaggcggagctacaggccgaggcagaacagcagcgccagcaggccgcacaggcccaggcagcgcaggaaaccttgctggaaggcgcttccgacatgaccaacgcactcgcaggagtctgatagatgacccaaccgaacgaacagcaactgccgccgggcctcgctaacctggttgccaacgtaccgcctgccgccgcaccgaccccgagtcatgtgcaggtgatgccgaacccggtgatccaaccgcaggccccggtccagcccggccaggtaggtgcgccgcagcaactggccatcccgacccagcagccgcaacccgttccgaccagcgccatgacgccgcactaccaaccggtagcggcacctgccgtgggtcaacccgttgttccgcaagcacccgctcagccggccccggtagctccgccggctgcgggtgcagttcttcccgagaacctggaagtcccgccgccgccggccttcactcccaacggggagatcgtgggcaccttggcagggaacctcgaaggcgacccgcagttggcgccctccatcagctatctggaggcgttctctgacaaactggataccgtccgagccttcggcaaggccgccgagaaccgcgatcctcggttcatcgacgagcactatctgaaggaagttctcggcccggcccaggcgcagcacgtcatcaacgtggccaagggcgtcctgacctatgtcgatgcgcaaaccaaggctgtcctgaaccagacctatgccgccgtcggtggcgaggccgtgctgaagcaggccgcaggcgtcttcaaccaacacgctgacccggccaccaaggccgccatcggtcggctgatggactctggcgatgcccaggccatgcagtacgcagcgaagcagatcattgccttcgcacaaggctccggtgccgttgtacaggctaccggccaacccctgggtgctgcggcacctgcactagcagccctgaccgctgagcagtaccgcgcagaagtgtcgaagctgccgctgaacgcatccgaagccgacatggctgcactgcgagagcgccgtaaggcaggcatggcgcagggtatctaacgaccctgccctactccggccttaaactcacatccaaaagagagagaatcgcatgagctttctgaacgacctgacccgtccgaactacgctggcaaggacgcggacgttgacatccacctggaagagcacctcggcatcgtcgacaagcacttcgcctacacctccaagttcgcaccgctgatgaacatccgcgacctgcgtggctcgaacgtggtccgcctggatcgcctgggtaacgtcaaggtcaagggtcgtcgcgccggtgaagagctggagcgcagccgagtcgtgaacgacaagtggaacctgaccgttgacaccctgctgtacctccgccaccagttcgaccaccaggacgagtggacccaatccttcgacatgcgcaaggaagtcgccgagctggacggccaggaactggctcgcaagttcgaccaagcctgcctgatccaggtgatcaaggctgccgcgatggacgcaccggtggacctggaagacgccttctcgccgggcgtgctggagaagctggacctgaccggcctgaccgccaagcaggctgccgagaagatcgtccgcatgcaccgccgcgtagtcgagaccttcatcgaccgcgacctgggcgatgcggtctactccgagggcctgaccccgatgtcgccacgtgtgttcagcctgctgctggaacacgacaagctgatgaacgtcgagtaccaggcaaccggcgcgaccaacgattacgtgaagtcgcgtgtggccgtcctcaacggcgtcaaggtgctggagactccgcgcttcgccaccgacgcaaacgcagcgcatccgctgggccgccacttcaacgtgagcgccgaggaggctgagcgtcagatcgccctgttcctcccgagcaagaccctgatcaccgcccaggtggcgccggttcaggccaagctgtgggaagaccacgataagttctcgtgggttctggataccttccagatgtacaacatcggtgcccgtcgcccggacacggctggtgcgatcgagctcaaaggtatcggcgccttcgacatcaccgcgtgacggctaaggatttaaggtaaggaggtttatttatgcaggataaaaagtctaaaagtaagactgccaagattgattggtctcactggacagtgacggtccctgaggagaacccggacaagccaggtaagccgtattcactgggttatccggagattctcaattatgcagaggacaaaatcgcgtcaaaatacatgtacgacgatccaaaggacaaaagtgtcgtgttctacgcattcccgtccggcgtgactaccgctaacacccattacagccggtcagagttacgggaaactatggagaccgggtcaaacaaagttaactggaccttcgctaagggtggcaaaatgcgtggtacttacgctatcgacgacatcagcaaagagccggatggtaagtattcccgcgtaattatcgcccaaatccacggcgtactgaccgacgagcaacgtgatcttattgggcaaaaggacaataatgcccctccgattctcaaggtgtactgggataaaggtaaaattcgggtaaaaacgaaagttttaaaggacctgaacgccccttacaaagagatgcttctggaacacgcttggggtgatgacgaaggccggaactttaaagagaagattgacttaaatacacggttcacattggaggttaaagtgagcgatgggcggatggaagtcattcttaacgacaccgaaagtttggtctatgacgacattcacatgaaaaaatggggcattttcgaaaactactttaaagcagggaactacttccagtctaaaactccgggcacttttgcaaaagttaaaatttattcacttcaggttacccactgatgccacgaaaccccgcacttcggtgtggggtttcttcaaagcctaacgacccgcgcagattccctgcgtgggtttttgcgctttaggagaaaccctatgctactactcgacgcagtgaatgtcatcctgcgcaagatcggcgagctgccgatcccgagcatggatgagacgtatcccaccatggccattgccctccctgagctggaggaccagcgcatccagttgctgacgcaaggctggtggttcaacacctggtggaagcacaagctgacacctgatcccacgggccgcatcaacctgcccaagggcaccttggcattctacccggattccccggacctccagtgggacggcctgggagtgcgcgacgccaacaccggcgacgaccgcatcggtaagtcggtcgagggccggctggtgctgtcccgcgagtgggaccgtatccccgagatcgcacagcgcgtcattgcgcaccaggccgcactcgcggtgtacacccacgagattggcccggacgagaccgcccaggtcatcgcccaggaattgcaggcgtatcagaacgaactgtcccgcatgcacacccgatcccgtccgctgaacacccaggccaagcgtagcttcagccggtggcggcgcagcttgaggacctgagcatgagctacaagcaatccgcgtatcccaatctgctgatgggtgtgagccagcaggtgcccttcgagcgcctacctggccagctcagcgagcagatcaacatggtatcagaccccgtgtcggggctgcggcggcgcagcggtatcgagctgatggcccacctgcataccgaccaaccctggccgaggccgttcctctaccacacgaaccttggtggccgcagcattgcgatgctggtggcgcagcaccgtggcgagctgtacctgttcgacgagcgggacggtcgcctgctgatgggtcagcccctggtgcatgactacctcaaggccaacgattacaggcagctacgggccgccacggtggccgatgacctattcatcgccaacctgagcgtgaagcccgaggccgaccgcaccgacatcaagggcgtggaccccaacaaggccggctggctgtacatcaaggcgggccagtattcgaaggcattctccatgaccatcaaggtcaaggacaacgccaccggcaccacctacagccacacggctacctacgtgacgccggacaacgccagcacgaaccccaaccttgcggaagcgcccttccaaacgagcgtaggctacatcgcctggcagctctacggcaagttcttcggtgcgccagagtacaccctgccgaactccacgaagaaatacccgaaggttaaccaggatgccgatgcggcaaccatagccggatacctcaaccagcgtggggtgcaggacgggtacatcgcattccggggagatgccgacatcaacgtcgaagtgtccacggacatgggcaacaactacggcatcgcgtcgggcggtatgagcctcaacgcaacggcggacctgccggccttgctgcctggtgcgggcgcacccggtgtgggtgttcagttcatggatggtgccgtcatggccaccggctcgaccaaggccccggtgtacttcgagtgggactccgctaaccgccgatgggcagagcgggccgcctacgggaccgattgggtcctgaagaagatgcccttggcgctacgctgggatgaggctaccgacacctacagcttgaacgagctggactatgatcggcgcggctccggcgacgaggacacgaaccccacgttcaacttcgtcacccgaggcatcaccggcatgacgaccttccagggtcgcctcgttctcctgtcgcaggagtacgtctgcatgtcagccagcaacaatccgcaccgctggttcaagaagtcggcagccgcgctgaacgacgacgatcctatcgagatcgccgctcagggcagcctgaccgagccgtacgagcatgcggtcaccttcaacaaggacttgatcgtcttcgccaagaagtatcaggccgtggtcccgggtggcggcatcgtgaccccgcgaacagcagtcatcagcatcaccacgcagtacgacctcgatacccgggcggcacctgctgtgactggacgcagcgtgtacttcgctgccgagcgtgccctgggtttcatgggcctgcacgagatggccccgtcgccgtccacggacagccactacgtcgccgaggacgttaccagccacatcccgagctacatgccggggccggctgagtacatccaggcggcggcctccagcggctacctggtgtttggcaccagcacggcggacgagatgatctgccaccagtacctctggcagggcaacgagaaagtccagaacgccttccaccgatggacgctgcggcatcagatcatcggcgcgtacttcaccggcgacaacctgatggtcctaatccagaagggccaggagatcgccttgggccggatgcacctgaatagcctgccagcccgcgagggtctgcaatatccgaagtacgactactggcggcgtatcgaggcgaccgtcgatggtgagctggagctgaccaagcagcactgggacctgatcaaggatgcctctgccgtataccagctccagcccgtggccggtgcctacatggaacgtacccatctcggcgtgaagcgcgagacgaatacgaaggtgttcctcgacgtgcccgaggccgtggtcgggtcggtgtacgtggtcggctgtgagttctggtccaaggtggagttcactccgccagtgctccgagaccacaatggcctgcccatgacctcgacccgcgcagtgcttcatcggtacaacgtaaacttcggctggaccggcgagttcctgtggcgcatcagcgacacagcccgacccaatcagccgtggtacgacacgacgcctctgcggttgttcagtcggcagctcaacgccggggaacctctggtggacagcgccgtggtgccgctgccggctcgggtcgatatggctacgtccaagttcgagttgagctgccatagtccgtacgacatgaacgtccgggctgtcgagtacaacttcaagtccaaccaaatctacaggagggtgtgatggctttctggctaccactattggccgctggcggcatgtccgcccttcagcagggattggccaacaaggaagagcgcaacaagatcaaggccgagaacaaggctcgactgaagacggacctcgacaacctgggcgccgccgcccgcgacatcgccaacctcggagtcatggccgctagctaccgcaagcaggccgtggcctcgcaggtggaggccaaacgccaggggatgctcgccggcggcagtgccgaggctcaggccggagcgttcggcgtcaagggcgcatccgttgatgcggtggccctggatatcgagcgggaggtcggcgaggctctgttccagattgacgacaacctggacaatcagatgtggaacctcgccgagcaggcgcactccatccaggcccaagctaaggccggcctgctgggacagaagagcaccactgcggggcaacgatccccgctggtggctggcctgatgtcggcgggttccctgtatgcaagtcaatacttcaagttcggcgccacgcctaaaggaggcaactgatggcggaatcgcaacgtgcttcccaagagcttgggatcaacgtcgggcagacgcaactccagccgggccagagtgcccggcgtggggtgcgcgactccgaagtcaactacagcgggccgagtgtaggctcacagattctcgacggcatcctcggcgccggtcagcaaatcgcaggcaagtggttcgagcacaacgtgcagcaggaagtgctgcgcggtgagcgtgcccgcatggccggcgaggccgaggaggcggtagacagcaacatcctggccaagcccttcgtgaagggcggctggcgtaagcaggactaccgtatcgctcaggcggacttcagcctgaagatgcagcagttcatcgccaacaagggccgggagatgactcccgaggagttccgcaaatacctgtcccaggaggctacgcacgtcctggactcgacaaagggcatgaaccccaacgacgccctacaggcgctggcgcagcagcagaaggccgaggagcagctcttcggcatgcaggccaaggcgtacatggactggtccatcgaccaggccgcacgaggcttccgcacccagggtaacagcatcctggccaaggctgtacaggcccaggccaccggcgacgaactgtcccgacaactcagcctggaagaggctggcctgttctataccaacatcatgacctccgaggatatcccgctggaggtgcgtgacaaggtgggcatgcagttcctggcagccagcctggacatgaaccagcggggcatctacgagagtctgcgcgatgccggcttcctggacagcatgtccttcgacgaccggcgtgcgctcaacggcctctatgaaaagtcgaaggcacagacccgggccaaggaatcgatggctaccctgcgggccgatgcggacttccagcagcgggtggctaacggggccatcacagaccttgccgaggtcgaggcgtactcccggggcatggtcgaggagggccgctggagcgacgcccaggccatctcgttcatgaccaaggccatgaccggcctgggcaacgctcagcgcatgcagggcatcatggcggccctggaggctggggacatcaacgccctgcacacgctggggacgaacgtctccgaggcactggagcagtgggacaagatgcaggcggccaacggctcaagcctgaccgatcgactcgtacagggcacgcagctcggcctgcgcctggggaccttccccaagacctacggcgagtccgtgggcagcgccgtgcggatgatccaggcggccaaggaaggcgaggcgaacccggagctggtcaatacgttgaacagcatcttcgagcaggtggcctcggcccaggagatcaacccctccgccggcaacgtgatgctatccggcatcccggaagccgagcagggcgctgtggcctgggcactcaagcagatgaagatgggcatcgccccagctcaagcactgcgcgagttcagtgccaacgccgaagtcgtgaagcagatggacgagttcgagaaaggacagaacaccaaggcattcaaggacaacctcggcaagcaggtcaacgacaagttcgtgaacaacatcttcggtcgggcctggaacatgctgaccggtgagagcgacctgagcaacaacgaggccgttctcagcatgtaccgtcgagcaaccatcgacgaggcgaactggctggccagcgaccgcaagcatgcgggtctgcttaccagtgacacgggccgcgaggccctgctggagatcgccgccgccaacgtgcgtaaccgcaccatccaggtaggcgaaggtcggaacctgaaggaaggggacctgttcagccgccgcgacagcgcgccactgatcctaccccgtggaaccaccgccgagcagctattcgggaccaacgataccgagaccatcgggaccgtcctggccgagcagcacaagccgcatgtcgaaggactcctcggttacaagtcggtagtcgccttcgagtacgaccgcaccagtggcagcctcctcgccgtcgagtacgatgagaacggtgtggccctggaccgcacgcgggtcgatccccaggcagtcggtaacgaggtgctcaagcgcaactcggacaagctgaacgcgatgcgaggtgccgagtacggtgccaacgtcaaggtcagcggcacggacattcgcatgaacggtggcaacagtgccggcatgctgaagcaggacgtgttcaactggcggaaggaactggctcagttcgaggcttaccgaggggaggcgtacaaggatgccgatggttatagtgtgggcctggggcattacctgggcagtggcaatgctggggcaggtactacagtcacgcctgagcaggccgcgcagtggttcgccgaagacaccgaccgcgcactcgaccagggtgtgaggttggccgacgagctgggcgttacgaacaatgcctctatcctgggcttggccggtatggccttccagatgggcgaggggcgtgcccggcagttccgtaacaccttccaggcgatcaaggatcgtaacaaggaagccttcgaggctggcgtacggaacagcaaatggtacacgcagacgcccaaccgggctgaggcattcatcaagcgcatggcgccccacttcgatacaccgagccaaatcggggtcgattggtacagcgccgcaacagcggagtaagacatggcacagcaattcaagggccgcatgacgcccaagtacccacttgaccaagcacagctcgacgaggcccaagtacagggccaactcgacgcagtgcctaccgtggggttcgacgccctgacgggtggcgagatcggagaacggaacgtggcagcgggccaacgagccaacgcgcgggaactggaacgcatcgtagcggaccaggaactgccggcccttgaccgtgcttccgcactctggaaccagtccaccctcgtcggacgctggggcgatgcgctccagctcgacgcggaccttgcggcgaacagcaccggcgaggtggaccccaacttcgacgccgggacctacggggtccaggcgctccaggcggcgggtatccagccgactgacaactatctccagatcatggcccgtgccggcaatgccgaggacgcggcctacctcctgtcgaggattcaacggtatgagcaggacgagcaaatcgtgcgggacaacccgtactggaacttcgcggctggcatgctggaccccgccgctctggcagttgatgcggttactttcggcgctggccgtgctctgcggctcggtcgtgctggcatggctgctgctggcggcgctgggcaagtcgggtatgttgctgggctggatgccgcaggggccgacgtggatgccggaacctacatcgtggcaggtgctcttggcgctggcgtgggtgctctgctggggtctggtgcgggacgcattgccgcagaggccccaacgcaaccgcatgtgcccgaagtatcggcgcctactgtcgggctgccagaagtagccatgaccgccgaggaggccgccgcacgcggcttcaaggccggtgacgtggtagacctgctggacgagggcaccgtgctgtcccgtgtcagctcccgtgtggagcaggccgagataccggccatcccgcgccgtgacactgccttcggcgacgagctgcacagcctgtcgggccggaagctgtccgaggtcctggaccacctcaagacccacgcagaggttcccaagccgctccagggcatcgccgccaaggtggctgataccatcaggaccctggagggcctgggccagcgaaccgcgttccgagtggtgcagggtggcgacactgccagctccgcattccttaagccgggcacggcgggcatccactccacccagggcctcgacaccttggtccaggtacgcggcagcaccgcacctggtcgagttggcaccaacccggtgaccgtgctccacgaggcggtccacgctgccaccgtaggcgtgatgaacgccgccctgcgcaaccctggcgcgatgagtccgaaggtggctcaggccatgcagaccctggagaacgtccggggtaacgtgctcaacgccctgaagcaggaccgcgccgccggtcggcaactgtccgagttcgaagagacgctgctggccggcaactccaacaccctggcaaacgtcaaggagctggtggcctggggcctgacggatacccgcttccagcggaccctgaatcgcctccgctacagcgacggcgggccgggcctgtggacccgtttcgtggagggcatccgtagcctcctgggcctccggtctgatgccgacacggccctgagtcgcgtcctggccgcctctgagacgatcatggacgccatgccggggtacactaaggctcaggctaagtgggccaacaagggcgctccggtgaccgaggaggccagcctggagaccatcgtgcggaccaccagggagcgtgcccgcgagggtgcgggcttcgtgaaccggttcttcagcgaggcggacctactggcacagcccggagagggcgcacggcgcctcctgagccgtcttatcgacgaccctgtacgtcgggatgggttcagcacgaacgacaacgcagcgagctatttgcgccgttaccggaacgagttcgagggctacgtgaagtcctacgacgagatgatggccaaggcaatggctgagcagggcgtgggcctgacggcacgtgcgctgaactcccgccgcgccatggcagtccgggaccagcttaacgagcaggtcacccgcgagctgctgcgccgggaccgggagtggaccgcctacggcagcgtccgcgtagaccccaacctgccgccgaccatcaaggccctggccgaccgctcggacgagattcacggtctgatgggtcagcgtgccagggaagccggggtccggggcttcgaggacttcgctccgcgtcccggatacttccaccgctcgtggaactggtccaagatggcgcagatggatgaggccgcccctggcctggcccggcgtgctatcagcgaggccgtgttccggggcatccctgggctggagcgtgccgacgccgacaccatcgcacaggccattgtgcagcgggcacgggaccgggctaccggtatccgctccgagttcatgggcgcgatgggcgtggcggacacggcattcatccggcaggcgctggaggaggccaacgtgtcccaggccaagttcgacagcatcatggccaagatcgagcagaagcagtccgaccagggcaccgtcaaatacggcaagggccggctgtcgctggacatgaccgccgagatcaaccacaatggaaccgtgtaccgcgtgcaggacctgatcgaccgggacctagaccgcctgatggagaactacgccggcagtatgtcgggccgctcggcactggcccgcgcaggcatgcccggcgactccgaggtggaagccttcatccgtgagtaccagcgggaggccgcgcacctgggcaccgacaaggtgcaggagctgacgggccaactgcggggcgtcttcggggacttcaccggcaacgtgccgcgagagcatcagctcggccccgtcgcacagcgggccagcgggctgaccagcgccaccatgctgggattctccggcgtgtaccagcttgctgagctggccacgatggctcaccgccagggcgtcttcaacgtaatgaaggccatgctgaactcccgcctgggtgacttcgtaggtgccatgcgtcgagacccggacctcgctgatgagatgcagaccgtcctcggcctgaacctcgccaacgacattcggatgaagccctggaagcggcagttcgacaccttcctggccagccaagacaccttcatggatcgcttcctccacgcgggtaagcaggctgtcccggtgctcaacggcatgaagttcatccacaactggcaatcccgcatgaacgccaacctcaccttgaacaaggtggcgcgggcggcgcagggggatgaagcagcccttcgcgtgcttcagcagtacgggaaggacgtggactggacgccagtcctggcgcgggttcgcggttatgtcacatacagaggaaggaacgcccaatccatgaattggggcgcctggagccaagcagacgtgaacaccgtcatgaacaccgcattgcggatcatggacgactcactgctgtacggtcgagtcggtcagaactcgggctttgcccggtcacctgtcggccaaatcctggggcagttccgcagctttgtggccttcgcgcacaacaagctcctccggggaacctatgagaactccggcgtgcttggcgtggcctcgctcctcgcattccagtatccgctcaccgcgctgatgatgggtgccaaggcagcgatcaacggcaagttcgacacctctgatgaaggcatccgcaagatggccatcgacggcatcggttacactgccggcctcggcttcaccgccgacatgtggggcgtgatcaccggacactctaggatgtccgccccggtcttcggactggcggagcactccaacgaggtgttccgtggcgtcaaggacctagtaaccggcgacgaccccgcagccgccaccggcgatatcgtcaacggcgccgcaggggcactgcctttcgtcaacgtattcccggcgaccaagttgctgctggaatccatcaaaggggaataacgtggctcggttcaagaatcccgagaccatccacgttgcagatggggtcgaggctgtcttcagtctcgacttcccattcctgcggcgtgaggacgtattcgtccaggtcgataagatactcaccaccgactatacgtgggtggacaacaccaacattcaattggccgtggtgccgaagcagggccaagaggtccgcatcttccgcgacacgcctgcccaggtcccggacactcagttcagccagggcatcccattcctgccgcgctacatcgacgcgaacaacaagcagctcctgtacgctgtgcaggagggcatcaacaccgcgaacctcgccctggatggcgtactcgacgcgatccgtatcgccgaggaagctcgccgcctggcacaggaagcactcgacgccgccaatgaggcgctgcgccgtgccctgggcttcgctgagattcgcaccgtgaccgaggactcggacatcgatccgagctggcgtggttactggaaccgctgcatcaccgctgacaaacccctgaccttgaccatgcagatggaagacccggatgcaccctggatcgagttcagcgaggtccacttcgagcaggcaggcgtgcgcgacctcaacatcgtggccggccccggcgtgaccatcaaccggttgcagaacaccaccatgcagctctacggcgagaatggcgtgtgtaccctcaagcggctgggcgctaaccactggatcgtgttcggagccatggaggacgaataatgcgcggcattatcgcgggcatcatggcctcccaaatccggcgtccaaaaccaatcctggcgacgtacccgtatcccatcctagctacagacgacgcatggtcctgccggcccaacatagtggcggcgctgacacgcgacactctgcacgaggttgtgaaccagccaggagaggacacctaccacgcgacctccagcgtggtaagcgtactgctgcggtcgctgactcagctcggctacggcggtggcgatgggttcctgaccggacctgccgtcaatgcagccttgctgcgcgatacggtgaaggaatataccgcagagccttacgcattcctgtcgcagaccgcagtggccggcgcagaactgaaggttgtggttgtatactccgagtatatcgtggagccgtacgccttcgccacctcgacagcaattaaacaggcggaactgaccaatgtttgagacacgagttaagggtcgctacaccgtgacccatctgaaagccacgggtgaagtcctggcacagtacaccttcgacaacctcatcactaacgcgggtctcgactggatttgcgccatggacacctcagacctgttctcacaggccctggccgtgagtaccagcacagcagaccccaaccccgctgcaccctccctgccggaggaagtacgacggaccacctcgtacgccccgaacggggatgttacctcgggtctggatggggagtggatttactggcacaagcggtggcgcttcccgataggcacccttaccggacaggtactggccaccgtgggcatcgtggcccaatccgaagttgggttcgagagtaacaccggcgcgaagattccggcagggactccactgtcctacacccggatcaaggatgccgccggccaacccaccaccctggtggttcaggccgacgagattctcgacgtgcagtatgagctgcgcagcaaggctgtggcgatggccgaggccaagttcgtgatctctggagtcgagcgtaccatccgccttactccgctgcccttcgcgaaccggcgtaacctctacggtgagcgctacatcttctacaacgagagtcctcggattgacggtaagaatgcgtccggctcggatgtccaggatggccagtgggtgaagctgtacccgcgatatacgcggggcacctacaaggggcagctaatgctgcgggccaccgttgataacggcaacatgccgggaggcatcaccggctgcaaggacctgaagatttacaacggtcggaactacgcactcaccatcgacccgcctgtagtcaagaacaacacgcaggaattctccatcacgatggagttctcggtagcgagggcataacccatggcactgatctacgacttcaacctggacctcgatccgaaggctaagtccaagttcgtaggtgcgcgaggccgtagggacatcagcgacgtgctagacttctgcgacgggggcgtggccatccaggacccgtcgcagggtatgatggtccgcgtgtggcgaacagagcttcgccaggacgggacctacctggggcacgaggacggctcgaacgagattcgcatcggcggaggtatcgaagaaggtatctccacgatgtccctcgacttcgacagtaacatgaactacgtgtgtgctttcgtacgagccgatcgaactggtgcaatctcctacttcaacgtgcagcagggccgccggctcctcgtggagcttgggcaggttgactatgccaaggtggccttggacgataagcgtcctggagctactgcctgggcacaggtcatcgtaccttacacccgtaacggcaacctgtacgtccgcacacagaacgagaactatacggtagagcacctggaggtggataccggcaaggtattccgaccgctggtcaaatgcggtatgggcaccaacctccgcttccaagtccaattcagagggcacatgtaatgagcaaaaagcagaccgcgagtgctgagcggctgggcctgctacacgagctggtctgcaccgctatcgagcgcaacttcaagtggtacatggacaacgacatcccgatccccgcatcggatatcgctgccgccaccaagttcctcaaggacaacgagatcacctgtgatccgtccgacaccatcaacatcgaccggctccgcgaggagatgcggcaggcgcaggccgagaaccgccgcattgccttggagggcttcatcgccggtgagaccgacgacgagatggaacgcctgtacacccactaaggaggcagcatgacgccgcaagaacgattccagatagcccacgaagtgcgggacatgtacccgcgcttccgggacttctgcctggacgccatgctgttcctcggcttcaagatgacgtggatgcagctcgacatcgccgacttcatgcaggattcgcccaacaaggcgatggtcgctgcgcagcgtggcgaggccaagtccaccatcgcctgtatctttgtggtgtggtgcatcgtccagaacccggctacccgcgccatgctggtatccggctctggtgacaaggctgaagagaacggccagttgatcacgaagctgatcatgcactgggacctgctggcgtacctgcgccccgaggcccgaatgggtgaccgtacctcggccaccagcttcgacgtgaactgggcgttgaagggcgtcgagaaatcggcctccatcaactgcatcgggatcaccgccgccctccagggttaccgtgctgacatcctaatccctgacgacatcgagaccacgaagaacggcctcaccgccaccgagcgggccaagctgacgcggcagtcgcaggagttcacctctatctgcacccacgggaagattctgtacctgggcacgccgcagagtcgcgagtcgatctacaacggcctgcccgcacggggcttcctgctgcgcatctggccgggccggttcccgaccctggaagagcaagagcgctacggcgactggctcgcaccctccatcctggcacgtatcgcccgcctggaggagaaaggccacaacccgcgcaccggcaagggcctggacggcacccgtggctggccggcggaccctcagcgctacaacgaagaagacctgatcgacaaggaactcgaccaaggccccgagggcttccagcttcagtacatgctggacaccagcctcgccgacgagcagcgtatgcagctcaagctgcgcgacctgctgttcatcgacgccacgcatgagagcgtacccgagcaagtggcctgggctgccgacgagcgcttcaagctcaagttcgacgcccaccgattcccggtcatcaagcctgagctgtacctgccggcgctgatggctggcggctgggcaccgctccagcagatgacgatgttcgtggaccctgccggcgatggtggcgacgagctgtcgtatgcagtaggcggaactctcggcccgtacatccacgtcgtgagcatcggcggctggaagggtggatttgccgaggagaacctggagaaatgtattgccctggctgcgcgttacggcgtcaaggtgatctatgtcgagaaaaacctcggcgcgggtgcagttggccagctcttccgcaaccatatgcgatccatcgacccggacaccaacaagccccgctatgaggggatcggcgtagaagaccgccagaagtccggccaaaaggaacgtcgcatcatcgacaccctgcggcccatcatgcagcggcaccgtctgatcttccacgtctcggcgatggattccgaccacgtgtcctgccagcaatacccagcggacaagcgcaacgagcgctccgtgttccaccagattcacaacatcaccaccgaccgaggctcactgccgaaggacgaccggatcgatgcccttgagggccttgtccgcgagctagcacccacgctcgtaaaggacgacgaagccgcaacccgcgctcgtgaagaggctgccaagaaggaatggctgaacaacccgatgggttacactaagtctgtccttcggtctctcggcatgggccgggagcgtcgcaagggccgcccaaaaggacgaagactatgatgctcgataccgccaccgaggcgggcaaaggcaccctcgccgtcaccggcgtggggattgccgtttactcgccctatgagatcgccagcctctgtgctgcggtactcaccgcgctctacgtgggcgctcagctcatcaccctactcccgaagatgctcgatagcatcgcggagcttcgccggaggttcaagaagtgaacaagcccctgcgcggcgcagcccttgcggctgccctcgccggccttgtcgccctggaaggcagcgagaccaccgcctaccgggacatcgccggcgtacccaccatctgctctggcaccactgccggggtcaagatgggcgacaaagccacaccggagcagtgctaccagatgacgctcaaggactaccagcgcttcgagcgcattgtcctggacgccatcaaggtgccgctgaacgtcaacgagcaaaccgccctgacgttcttctgctacaacgtgggtccagtctgtacaaccagcacagcgttcaagcgcttcaaccaaggccgcgccaccgagggctgccaagccctggctatgtggaacaaggtcacgatcaacgaccagagggtcgtatccaagggcctcgtgaatcgccgcaacgcggagatcaagcaatgcctcgaaccatcgtcgcaatactcgtccttgctgtggtagccctgggagcctcatacggcttcgtccagagctaccgagccttgggtatagcccaggaggagatcaagcgtcagacggcccgtgcggaggccctggaggtgcgttacaccaccttacagcgccacgtccaggaggtcgccgccaagaccaacacccagcgccaggaggtggaccgtgccctggaccagaaccgcccgtgggctgaccggcctgtgcctgctactgtcgttgacagcctgtgcaaccgccccggcgcccgctgtgctgtgcgaacaccctctgattgaccctaccacccaggctggcctaatccgcgctgtagcggcctatcaggacgccctggacctatgcaacgccctgaatcaaggagactgacatggcgaacacccgtgatcaatacctcgctggccgtaacaccggcctgaccttctaccaggtctgccagcccggcaccgacaaccgcatcgccctgcacgacatggacgaggccgatgtcaaggctaaggccaccgctgtgattgcagcagcctctgccctgggcggcgagggtggcgctactccaccggacccgctcaccgcctacaaggtgaagaacggtgacaccctgcccgtggacggcggtggctccgtgaaggtgaccgtagccaacggtgccatcaccaaggtcgtgtacaccgcaccggcgggctgagctacagcccgtccaacctgatccacccataacacaaggaactgaaccatggcaaccttcgccgctgcaactcagaaagacctccgcgccttcgccggcaccatcgagaacctgatccgtccgctggaggaagcggccctgggttctggctacaacgagaccaagctgcgcgctgaactggtcgcgcacctcgacgagctgatggctgctgtcgagactgccaaggcgctggtctacaagtgatcgacgagtagctcaagccgagcacctgcacagtcgggtgctccactggaactactggaatttttattgagggctggctgtgggtgggagttggtagtggtgggcgggagtagttactccgggtctaattttggtatcgtcgtgtgagaaccctcccgactctgatcagcccacccttcccccgtaggccctccgcctggtgggccactgcctcgcattgcctgggtgttgcctgggtcatccctgggagcttccagctacgctgggtggtggtgggcttccctgccctgtcgctgtcctgtcgccgcccattctacgcatcctggcgggagtgtcaacccctgggtggtcggtgccttgctcggctacgctccagcgcttccgcgtggtcggctaggcggttggctcgccagcgcttcgcccactctacacctcgctccacctcggaccacttgtccgccagcatcatgcgctgccatgccgcgtcctgctgtagccatgccctgctggctctgtcctgtctgctcagcatcctctgtctcctctgtctggctccctggggcttccctggggcgctgctgtggtcctgtcgggtgatggtg

SEQ ID NO: 58 - DNA, 44816 bp, synthetic construct
  source 1..44816: mol_type = other DNA
tcagcccacccttcccccgtaggccctccgcctggtgggccatcgcctcgcattgcctgggtggtgctgcctgtcctcctgggagcttccggcttcgccggggtggcggtggcttccttgcccttcgccgcccattctacgcatcctgccgggagtgtcaacccttgggctatcgctgtcactctaccgggcttggccgtagtgcctggagcgctctatcgcctcctggtgcctggctacggctagcgctcggtctgcctctagggtcctggctacgcctgggtagtgcctggcatcttccctagcccacttggctagcctgcgctgccaagctgcctcgtgctggtgccaggctcgctcggctcggtcctgtctgctcagcatccttgtgcctcctgtggtggtctgcggtcctgtcgggtggtggtgcgggagtggctggccttgcctctacgctctgccctgcctcctgtgcctggcattgcctcctggctctacctggcgttgcctgggtggtcctggctctgcctggggcctacctggccactccctctaggccacgtactctactcgcctgcctctgccttgtctagtccctcctggctggtgcctgggtgctggtctgtctcacctggctcactctgtccctacctgtgccctgcctggctctgtcctggctaccgctggtcctgctgtcttgcctcgccgctccctcgcctgctcggtcgcacctgcggcgctgatggactcctgtttgtccattgtgtgtgacataaccgcagccttagtgccatgcgggttccagggtggtaggtctggctggtcgggtggtgcctgggtgatgggctatcgctccctggtaacgcaaatcctggctagctagactaagcctcgcgcatggggtctctatacgcgtggggctcctggcagggccataggagggagttgacacgtaggcggtaggtctgtagagttcgccctgtcttcacgcaataccgccttcacaggcagcctggagacagggttgacacactgccagggcatcggtagagtgcgcagccagaacgacgggagattgcaaccttccaagcgcggcacaagccataggcgcaagggacacggcaaactcttagggcaggaaccgcagtgtgtaaggccggcaggcatcactgaggggattgacaaggtaataagatgcggtaagatgtgcggcgtcaagtggtcccgatgtacacactgtgaagggattacggcgcggtcagacagatgaccggcaccgcttgacactgtaaagctcagtcggtacgatgggcacccatagcggacgtgatggtccggggcgatgcggataggacgccttgtttataacctgaccgcaaagctgtgactccagccgataggactgacccaccacgtaaatacagacgggttgacacgacaaggccaagtcgataacatggccgccacaaagggaagcgatagcttcctggcggtagaggatcaaagcttcacctgcggaacatggacaggtgcggtggcgaaccgaagctgcaactggttaggcagggtcccagggaatacctgtcgggtgctgaagactcacccaaaagagtctgagcgggaagcctccccgtccacggttaagcaaaggcacgttagtgccggtgggaacgaatagagtgtcagtgggatcgagaactagaaacctcggttaatcgcgactgacagtatgctgggtagtatcggcgggccgattgaacaaggccaggcagatagcgcaaagggtacgggggatgagtgaagacgatcccgaagagtatgcgcaggacaagccagaaccgctgatactacagggactatgccaatgccaaggtttgtcccttgaggcccttccaccgaggggattcaagagacagacctagttgaggaatgccgatggcacacttcaaggctaaggctcccaagtcgcccttcgctacccaggtagcgtactggcgggattgggaagccaaacgtactaagctcatcgcacaggataacgtcgaggggcgcaaagagcttcgcaagatgcgtgacgtgcgctacgctaccgacccggagccagcgccaggacgctaccacaaccctgaacagaaggcgttcgtgaagggtagcgaaggcaaggcgcggaacatcctgaagggatggaacgctaagaagtcgcaagggaagggtttgtaatgccacgtgtgaatgaactgacgccgcgtcaacgcaaagccgccaaggctcgccgcgacaaggcacgccggattgatctagcgcacaagatgccgaaaggcgccgactgcccgatcttccgcaaggctgaacaggcgcaagctaagcagccccgcgtcgataccctgaccactccccgcagtgccggctacctggccgccgctgcatacctgaacaaatccatctgaggtacataccatgaccaacgcaatctccaaaaccgtaatcgcattccgtggcaccgaagagatcaaccgcgctatcgacgccatccgtgtccgtggcaaggaactcgacgaagccatccaactgaccggcctgtcgatcatccatcacatcgaccagtgcggtgacgtgaccgtggtcaaggcgctgtatgaagccatgccgaagggcagccgccgcaatgcgctggtcgagtggctggtgctgcacggcaaggtacaggtgaataccgacaagaagtcgaacaaggacctgcccttcctgtacaacaagtttggcaagaccgatctcgtcggcgccaccaacagcccgtggtacagcttcaaacctgagaaagcgctggaccaggagtttaacctggccgctgccctggccacgatcaaaaagcaggtgcttcaggctcagaccaagggcaaggtgatcgtcggcatggaactcctgggtgatctggaagcgctggccgccaaggctgcacccatcgccgagcagagcaagcgcgctgccgcccattgactcaagtcgaacgcctgctaagcgggcgttccgctggaatcaatgacaactggagaaacacgatgagctttaagcaacgtctgcaacgtcaaatcgccctggcccaatacagccgcccggctcagttcccgtacggcgagcaagccgtccaggcgaagggggagtgaccatggatttctggatcgccatcccgttcctcgaactcggcctcaacctcggcgaggatgaactgcgcatgctgtggttcagcggcctgacggtattcttcatccacctcctcaagcggtgactcaagtcatggccctggcgggcgaccctcgcctactccggggccatcgctggactcatcacaagcgagaactagaccatgcaagctttgaacactctgttgatcgcaatccccaaggacccgtcgaacgcattcaatgcagccgacaaggctctgtgcgcccacggcttccgtatgggtgacctgaacaccgcgcacgtcctgacccccggcgggttcgtggtagtgggcgctggcgtgactgtgaaccgctacgacgaagcgtaccgtatgagtcggaacctcgactccgaaggcttcgacgtgctgctggttcagggcagcccgctggcgggtcgcgtcacctgccaggcgtacggctggatcaacgctgaataccgcaagggctgcgcgaacgggcgcccgatcttcgacattgcaggaacctcgtaccatgtcctcgcgtgatccctaccacatcggccaccgcgttgggctggtgaactacagcgaccgctacctcggtgccgacgcggcaggcaccaagggcatcattgaagccataacccgaccgtcccgctgtatgacgatctatcacgtacgctgcgagcggactctgcgcctgatcgaggccgaggcccgtaacgtgcgattcatcagacagctaccgatccgcaaatgacgtggcgcataatcgtcgtcagcccatcaagcggctgcgccttcgtgtggagtctcaagcggcctgtgcggcccgtgcgattctactcccgtaaggcagctaaatgctggctccgcaagcaccgccgacagggcttgcctggccactactacctcatcgtgaactggagcaaacgcctatgaatcctacttacgtcgtccgcctcaaggacggaaccacccgccaggtagtcgccgacagcatcgtcaccggccacgccttcgtcgaactctggttcctcggaggcgcggtcgctatctacccgacctgcgaagtacaggaggtccaccgcactgacctcgtaaaggaggggtggtgttgaatacccgcactgtatacgtcaagccgcacagttcgaggtgcccgccggtattgtccgcaggacgcctgaccccgggtgaactctaccacgtgatcgcacctgccgaggtcgaaggcgtcattgtgctggcaacttcaggcccgtggcacatccggtccgtggtggtgcatagcatgcacccctcggtatatcccgtagggatggctgtcactgacgattcctggcggttccgccgcctgggcgtgagcgagtacgtccaactaattcaagggtacgaacaatgatcgccgcactgatcctgatcgcgatcgcctacatccttgtaggcgcccttgtgttgaccctctactgcttggtagtgtcgccgcccttcgagaaccctacagaagagcaattcgaggacgcttgcctggccggctgcatctggccctcttgatcgtagtcatgatctaccaggcggtgcgtggcttcctacagggcgtacgtggcgggttgtaccgtcacctgttcaacaaatcgacgaggaattgagatgatccgcacccatacccacaagtcccaccgcgaacaaggtcgtctctacgatctcacagacctgaactccggtgagatgtaccaggtagtacagcctgagtccaagcgaggcacgctggtggtcggcgtggcggcttggaacagccagggccgccccgtagtgctccccgtggtcatccacgacagtggcgacgccaaggtgactggtccacggcccaccgtgctgcgcaacgacggctggcgcatggtgctcgccgacaagggcacccaggtaacactcaccgccgagtgaccaaggcgaaggctggcgcaccagccttccaccgtggccattccttgccgcgaaccaactcaaccgaggagctacaacatgaccaacgtcaacaccaccaccgccaccgagaccaccaccgctgctgtcctgggtgccaagctgatcaagaagccggccaccgtcgaggacttccgcaacaacgtggtcttccatcacaacgccttggccaagctgaccgaggtctacaacgaatcggtcctcgccctgcataccgccgagcgtctgtccagcctcgttgccggcgacgtaatcaccttcgaccacggcaagggcgagaaagccgaggtgctgagcggcgaagtcatcagcgtggtcgccggcgtctaccaggtactggtccgcttcagcgacaacgcgccggccaagctgctggacgtgaaagccagcgccatccgcgctgtccaggcaccggcaaactcggctgaatgcctcgacgaggccctggcccaaggcgagtaaggcccgcacgtaataggcccggccctccgggcctattgcgagctagccataccataggaggagtcaccatgagcaagcgtaaccccgagcacatcagcggcgctgtgcgtagcgtcagcgtccagaagtcggcagccgtccaggaactggaggatcgactggagtctgccctggccgtgtgccagcagcgggcggaagacatcgatctgctgagccgccgtctccaggccgcagagcgcgcccgccgctgggagatcgacgagattcgcaaccaccaggcgaccatccgcctgttgcagaacgacctgaacgctgcgcatgatgcccacgaggcacaagagcgccgcgctcgtaaggcaaccttcatggcctgggtatgcctgctgaccgcaggattggccgtcaccctgaaactggcaggagtctaaccatgcagtgcaacgatcactacactaagcttgcagcgagcatgttcaacgtaccgtgctcccaggtgaccgccgagatgcgccgcgtagccaagagccgggccttcgcggaggcgtacacgcccaagaagcaggcgtcgggtgggacgtataccgcccgcgtgagcggcgtcacctgcgagggcggtaaggtcgaggtgcggctggataacgtggagcgggtcacctcctgtaactatgccaagctggaggcgctggaagcggccagcctgtaccaggccgccgcgaagcgtgccgatgagtacgaaaagctcctcctccaggtattccccgatatggcgcggaaggacggcccgctggtcgccaaggacttcgcagcgcgattgaacatgctgcgcgtgaccagtctatcggtaaggcgtgccctacgggatgccgggatagaggcagacggcccgctgtaccatcgcgtacggaagctggctgaccggaataacgtgatgagcgccgagctgttcagcctcaagcagggcttggcacaactggtcgaagtgggacaaaaggccggactgtactgggatggcgcggagactcagcgcttactgacggtagccccaaccaaggccctctgtcatctcaccagcaagttgaccggcgtgcggtatacctaccgatctgtcgtgagcaaggccgaagcggcggctcgcacactggcactggcccaagccaaggataccctgcgtgtggccaccttcgcagccaccatcgccggcggcatcgtgggtagcgtgctgacgtacctgctcgtctaagcgaccagggcctactccggggtcaaatccgagggcgttcctagagcgccctctcgtgtgagtctggaggatcacgaacatgcaataccacttcacgcattacaacggataccgcttcggcgtcgagctggaggacgaagccgtcttcccgtgcatcgacggcaagcgggcaacctgggacaaggtggcggcgtgtgccggtagccttgtgcattacatggcgcaggacctgattgacttcggccagcgcaaattgagggatttggaagatgagcaagacgagtctgtacccgctgagccttcatcccggcctgatctcaatcaggacgatacacgtattcagcatccaagctccgacgagcgccgcgaactggtggcagtggttcctctggcagcggaagtaccacccgctccgggagagcctcagcccagccggggaactgagtgcgaatatcgccgagtgtgtgctccacctccgccggaatggctggcacgatagcgacatctggcgcaagaagggcggcgtgctcgccctcggtgccttcagcctcgccggtgagatggtcggttcctgcctcgtagtgggtggtgagctgaaggcactgtgcgtggacgaccggtacagtggccagggtatcggcgctgaactggtccgggccgctgagctggccggtgccgagcatctgacctgcttcgagttcctggagccgttctacgccggcctaggctggagcaccgtccgccgggaggcgaactggaccgaaggtgagccggacgtgctgcacatgagggcacccggccatgacgcatgaggtgatgacatggcttatcgcgaacaaaccgctggtcatcggagccgccttcagtctggtggccctgggcgtgctgctcacacagaacaacggcggcccgcctacggcacccgcatgacctggcatcttcaggacatgttcgaggcccgtggtgggcttcggcccttgtgggaggagtggtatcaatggcactgcgccgagactcctggctaaagcaagcgcaatccctggcagtcggccagacggggcgattccgccacgtcctgggatgcaagagcatgagccggggcgggaccaatatgacctgcaagaacctgcctgaccgctgggtagcatactgctactcctgtcaggagggtggcgtggtcgagaaaacgcatgtgcggagggtacaatgcgcggatcaagaacggttcatgccctggcccgaggatgcctcggactggacgcaggccgactgctatcaatcgctctatggtttgctgctgtccaagggcatcgactacaacgtgatgacgccagggctgccgctgctgtacagcgaaaggcagcatcggcttatcttccctaccgacgcgggctggattgggcgcgctactgccgaccaaaatcccaagtgggtgggctacgggtatcctgccccggactaccatggatggccccaggaattatcaacgggcagaccatgggtgctgacggaagactacttgtcggcgctgaaggtgcggtgggcctgtcccgaagtctttgctgtcggtctgaacggtacaaggctgcgcgacaggctggcggcagtcatgttgcagcagacctgcaagcgcgccttcatcttcttggatggcgacccggcaggtgtccgtggtagtgcaggcgtgatgcgccggctccggtccctgcttatcgaaggccaagtcataccaacgccggacgggttcgatccgaaggacctgacccgcgagcagataaggagcctagtaattggacgtattgacgcttcacgcactgagtgaccgggaccgcttccgcacgttgcggagtgtggtccctgaagggatgatggggccggagacgtgcttcgtcatcgactggatcgagcagtattggaaggtctacccggttcatcagaaggtagacccgcaggcactgcgcgaactcatcaagctgcgaggtggctaccagccggaacaactggcggtggtcctgaacctcgtcaaccaactggacaagccggtggacccggactcgctacaaggcgtcgtatcccagctcaacgaactggacttctccgggcgggtggatgccctcctggcgcagtacaaccagggcgaggacatcgacctggcgtatgagctgcgacgcctgagcgacgaggccctgcgccgcgagggggtcagcacgccaaccgactacgtgacggacgacgtgtttgatatcctggcggaagagcagggtgaccacggcatcaagctgccaggactggtgctgccggcgtatatgaagggtctccacgctggggcctcggtgctggtggcggcgccgccggatgcgggcaagacctcgttcatggcctggatcgctgtacacatcgcgccgcagctcaagcggtacttcgaccctggccggcccatcctgtggctgaacaacgagggcaagggacgacggatcaagccgcgtctgtactcggcggccctgggcatgaccgtgggtgagattctcgccctggacccggaagaggttcgccggatgtacgctgagaagatcggcggtgactccgagctgatccgcatcaaggacttccacggcgggtcgctggctcaggccgagcaggtcatcgacgcaatgaagccggcggtggtgttttgggacatgatggctcacgtcaagggtggccagcgcaaggaccagaaccgcaccgatgagatggagtacaaggtggccgaggtccgcgagatggcggtgcgccacgatttcatcagcttcatgacgtggcagattagcaacgacggccacgaccagttgttcccgccgcagtcctgcctcaaggattcgaagacggcggtacagggcgctgtggacgtgcaaatccacctgggccgtctcaacggtgcggatcaacaggtcatgcgtggcctgtccctgccgaagaacaagttccagatggacgggaagccttcgaacgtggaggccatgattaacttcgacgccgcacggtgtcgtttctttgagagtgtagaccatgcaagttaagcactacgatctgttgaaaggcaccaaggagattccatgcgtcgagctgtccagccagatggagcagctcctcctgcgcctgtactccgacgttacccacttcgaaggtgtggccctggccggcggctgcctgcgggacctgatgcacggcgccgagccgaaggacttggacgtggccctgtacagcatgtcccagcgccgcgctgaacaactggtggccgacatgctgggcttcctggacccgctcatcctgcgcggtggtggctggtcttctcagtacgccgactgcggcgagagcggcatcttcgtgggcgtcatgcaactcatcggctgccgtgggctgggcgggtgcgacgtggacttcaactactacaacgccgacagcctaggccgcgtcctggaatccttcgacttcaccatcaaccaggttgccgccacctaccagtggccgaacccggaagacggtccgaagctgggcacctacctgcacaaggacgttacctggggcgtgaacaaggaggtcggagtaggctccaggcgtcccgaacgtcgtgagaagatgctggccaaggccgcgtattacggatgggagaacgtgtgatgagcaagcgcgacgtggtactggatatcgagaaaggcatctggcgcggtgttgaccagaacgacaaggccgtcgaggccataatcaagaagcacgggtacgtgatcgtcgagcctaagatcgacgggtgccgtgccatcgtgggtgcgcatggcgtggtatcccgcagcggccgccgcttccctgccctggacggcctggaggatcgcatcatcgcgaaactgtcccagtccggcctggactccggtctggtgctggactgtgagatgtacctggaaggcatgcccttcagtgaggcgaccgggcgtatggcccgcaaggccccgctgacagaggccgagctgaagtgcctgcacttcgcggtattcgacgccacccatatcggcgtgctccgcaagtcgcgcaagtcccacctcgtgtacgatgagcgccgcgccatggtccgcagcctcatggaagattgccggcggggcgacaccccgtacttcttccaggtagccgcacaatcctgccgttctatggaggcggtactacgctggtacggctaccaccgcgccatgggcttcgaggggtcgatggagaaagacccgagcctgacctaccgcaacggcaaggttgctggctgctacaaacgcaagccggagatcaccgtggacgggcgtatcgtcgggtacgtgatgggcaagactggcaagaacgtgggccgcgtcgtgggctaccgtgtggagctggaagatggttccggcaccgtgggcgccaccggcctgagtgaggagcacatccagctcctgacctgcgcccacctcaacggctgcatcgacgaggccatgccgaactatgggcgcatcgccgaggtctccgcgatggagcgctcggccaacaccctccgccatcccagcttcagtcgcttccgcgacctggccagtaaccctggagtgaaggtatgaagattcgaaagtcccataaccgcaactacccggaagatatggtgtaccacgccaccaaccgggattcactgctgtatccgaagtacgtcatgggttccgtgttcatcagccaggacggaacattccgtatctgcgtcatggcagggacttgggaccacgttgggtccgaagttcggcatcatgcgcgggacatccaatccctcggcgccggtcgccgtaagttgcaccgggtcatgcgacggctgcgtcgcaatctgcaacaggtaggagtcaaggtatgagaatgccaaccgaagaagaacgcacgatccgctgcctcctggcagacatccatgaacccttgaacctgctgttccccggtatccgtgtgaaggccgagacactgcccttgggctggggcgatgatatctgcgccctggtactccgggtgagctacgagcatctcacgctgggtcgcctggagtacatgcacgaggtccccatcctgcacctgacgcagtggggccgggacggcatgctccagcacctgatgaacgagattccccgtcgggtactggacggcatgctgcgccaggcgcagaagtacagtcagagcaactggtacagcaaatgacgactatccgaatcctcgacctcgaaaccgagagctacgagcacaaagggcgcaaggcgtcgccctttgacccccgcaactacatcgtcatggccggctggcgtgacgacgttgacggcaaggtcggccagaaggtggagcatcgcttccgcagtcgggccgaagccgaggacccgaacaaccgctggttcaacctcgacggcgtggacgtgatcgtagctcacaacgccatgttcgaatcgaactggttcttcacccgctaccgggacgagtacctggccttcctgcgacgcggtggccgggtctggtgtacccagcaggccgagtatctgctgagccatcagacgtggctgtacccggcgctcgacgagctggctccgaagtacggcggcacccacaaggtggacggcatcaagatgctgtgggaccaaggcgtgctcacctcggagatggaccaagacctgctgagcgagtacctgtccggcccctgcggcgatatcgagaacaccgccctcgtgttctatggccagttgatgaagctccaggcccgtggcatgtgggctggctacctggagcgttgcgaggccctgatcggtttctccgcgatggagtgcgccggcctgaaggtggacctcgaagtcgccaaggtgaaccacgccaagcaactggaggaggtggccggaatcgaggctgagctgaagaagctgatgcccgacttcccggaatacttcgagttcaagtataccagcctctaccatatgagcgcatggctctacggcggcgaggtgcggtacaagggccgggtgctgtacgaagatggccggatggagaaggccgacttcgtacgcttcgggacggccaagcgggggactcccatcgagagtacctcggtgcgggtcccactccacgaagtgaccgaggacggcggccactggaactggcacgccatcaccgagctggccagaaaatacggcccggtcatcaccttctccgccggcaagaacaagggcagcatcaaggtattccgcgaggacacagacattccggcgaccaagtgggatgacgaccagcgcttcaagttccccggcctaatcaacctgaacaacctgccggaagtggtgcgcgagaagttcctgggcaagcgcccggagttccagtgcgccctcaccctagcggacggatcgcccgtgttcagcaccagcggtgacgccctcacggctctggagaaacagggcttcgaggcggccaagctgctgattcgcctggccgagctacacaaggataactcctcgttctacatcacccacacctacaacaaggatgggacgattaaggacacgaaggggatgcttcagtacgtggacgatgacggcatcatccaccactcgctgaacacgaccgcgacggccacgactcgactgtcgtccagccgcccgaacctccagcagctcccgtcgaaggacgaggatgacccggaggccggcagccgcgtgaaggagatgttcgtgtcccgcttcggcgcggacgggatgatcggcgagaccgactataccgccctggaggtggtgatgttggcggctctgtcgaaggaccggaacctcctggcgaagctgatggccggcacggacatgcacttgtaccgcctggccgggaagcacaacaactggaacggcttcgattacgaccagctcgtggccatcaagaaggaccccagccacccatggcacggtcgcatgatgcaggcccgaaagaacatcaagcccaaggcgttctcggcgcagtacggcgcgagtgcggcaggtatcgcattcaacaccggctgtaccgtggaagaggcgcaggagttcttggacaacgaggcggccctgttccccgagtccatcgcattccggcagatcgtccgcgacagtgcagaggccaccagcctcgtgatgtacaaggccgaggaccagatgccggcaggcgccttcagcgagatggggccggatggcaactggcggcagtaccgccgagggttctggcaagcgccgggaggcacctgctacagcttccgccaacaggagcgctgggacaaggaacagcgcaagacggtcatggacttcaaggacacgcagatcgccaactactggaaccagggcgaggctgggttcatgatgaccgtgagcgtagggcgcatcttccgttggatgctgcatcgcccaggattcatggttaccgagttcctgatcaacaacgtacacgatgccgtgtacactgactgccacaaggacaccgccgccgaggtcaacaagggcgtgcgcgacatcatggccgacgctgcccgctacatgagcgagcgattgggctacgacatcgcggacgtccccttcccggcggtggccgagatgggacccaacatgttcaacatggacgtgatccgggactaggccgaccctagcctactccggccttaaatcttcattcgacacgagagagaccacgcatgactcaacaactcaacgctctgcaagccgccctcgccctggccaacaaggctgccgagaccgcaaccatcgacatgtccgaaacctccaccggcggtggcggcggtcgcatcttcccggcgggcaccgccatgggccgcttctgcatctacatcgagctgggtgaccacgccaaggaattccagggcaagctcaagaatccggcgcctcaaatccgcctgggcttcgcattgtggggcgacgtgaacccgcaggccggtaacccgcagagccgcccggacgacctgttccacacctacgaggccgacggctcgatcaagcccggcctgttccgtaccttcgagatgaccctcggcaacaacgaaaagtccaagaccaagctggccttcgacaagatgaactggagcgggcagcatacccacttcgctcagatgctcggccaggcgttcatcatcccgatcaagcgcaccaagatcaccaagggcaacaacgctggtaaggaacgcaacgacatcgattggggcggcatcatgaagccctataacccggtcgatggcagcccgtataacgtgccggaactgccgatggacctgttgcagtatttcttcttcgacgcgccgaccaaggagacctgggacgccctgttcatcgaaggcacctcggacaacggcaagtccaagaacttcctgcaagagaccattcgctcggccaccaacttccccggctcggccctgcacatcatgttgggcggcggcgacgatctgatcatcaagccgacgacccaggccgcaggcagcaacctgccggcagtgcccaacgtggccgccgacgccggcgtagcggcagcaccggctgtcccggctgttccccaggcagtggctcagacggcccccagcgtgccccaggtggcgaatgtggccgcccctgtggtaggtactgccgaggcacagaacgtgctgcctgacgtgccccaggtggctcagacggcggctccggcagcggtcgaagtcccggcggtcccggtagtgccggcagtaccgcaggtctaatgcgcctgccatcggaagagttcctggcaggactatccgcgcagttcgaccgcagcatggcaggcgggacgttggtgtgtgacgccgacggacccgcctacgtggctgcggccactgctaagaccctggacactgcactccgaagattctggaagctcattttggagcagcagttcctagcgcactgcacagggacacgggttcacctcacggcagcaggtggggcgaaggcgtaccgcgacacgtatccgaccatgaaaccgtaccagggccagcgcaagggcaaggcaaagcccgcgctgctggagccactgcggcgggccgtggcggacgtgcatgagcgaggcggggcgccggaggggatcgatgtcatcctgcacacattcttcgaggcggacgacggcatgatgatggacgcctacgccatgcaggacaaggccatcatccggtccgacgacaaagacctgcggatgacgatctacccgtattgggagatcgatacggcatgtgtgagcaggatcgagggtggcttcggctacctcaaggaagcgtacacgccttccggccagttcaagctcaagggccatggacggaagttcttcttggcgcagtggctcggcggcgacaccgctgacaacatccgagggatcgatcgattcaacggtaagctctgcggtatgaagacggccttcgacatcctccatccgatcacggatgaggacgaggccatcgacatgatcctggaggcgtacgccaagatcaagcaaaacccgctggcagaggccgaggtgctgtggatgcgccgaacgcctaccgacaacgcagcgcagtatctgttaagccgcgaccttcgtccggccttccgccagtggatcatcgagctggacgcctaccacgaggcgctgctccagaagcggagggagagcgattatgacgagtgagccgaaggtctaccagataccgcgcagtcaacagcgcaccttcaccctgaagctatgggccgggcagaacaagctgtgcccgctctgcggcaagcccatcgatatcagcgtgaagggcgaagcggtgatggaccacgaccacgaaacggggctggtgcggggcgtcctgcaccggtcctgtaacaccgcagaaggcaagataacgaatgcggcaggttcctggggatgcaagtcgatgaagtattccgacattatcccctaccttcgtgccctcctgacgtatctggaggggccgaagcatccgctgatctaccccctgcacaagaccgacgaggagaaacacgaagcgaagctggccaagcgccggcaggcagccgccaaacgcaaggcggcgatggccgtcgcaaagcacaacgcgaggaacgtatgagcaaactccgcaagcaattcaccaatgagtacctgcgaaacgtctatgtcgagctgggtctcaagaagggcgccgagcatctgaccaggcattcgcgcttcggcgaagtgagccgccagtgcttccgcaactggtgcatcaagctgggcttccacgacagcaggacacgcggcacgtacgccaagaagggcgctctgcactggctgggccgaaaggccgccgaggtagtgcgcaagttccctggcgccgtgggcaacgtggtcggccagggtccgaaggtactgagcctggacatcgagacctcgcctatcgagggttgggtctggtcgctctggaagcagaacgttggcctcaaccagatcaagcgggactggaccatcctgtcgttctgcgcgaagtggatgcacagcgacgaggtgatctacatggactgccagggtgatcccttggacgatatgcacctgctggtcgccctgcataagctgctggacgaagccgacatcatcatcgtccagaacggcaagcgcttcgacgtgcctaagatcaacgcccggttcttcctgaacaagatgccgccgccacgaccgttcaaggtgatcgataccttgatcatcgccaagcagcaattcgcgttcaccagccgcaagctggagtacatgacccacaaggcatgcaccatcaagaagcgcctccacggcaagttccccggattcgacctgtgggcagcctgcctccaggacaacccggaagcctgggaggagatgcgcctgtacaacatcgacgacgtacgatcgatggaggagctgtacatcctgatgcgcccgtggttcgtcggccatcccaacgtggccgtgtacttcaatgacgccgagccgaccatccgatgcccgaagtgtggcgacacggatgtcaagcaagaaggctgggtgcatacgcagaccggcaagtacgagcactatcactgcggcggctgcggtggctggagccgagggcggtacacccgcaacacctcggaacagcgcaaggccctgctgagcaactaaggaggtagcatgagcctagcattcccggactcttacgggccgacgatcacgactgaaacgtaccgcaaaggtgcgagtctggaagaacgcaaggttggcaagcttcccatgcacctggtagtcgaggggttcccgctgctgaagcgggagcttgctcgaatgatgcaatgggctgccgaggtcaaggggtatctgccgcacgactggaagaagatgacggtgggtgagttcaagtccgcccaacacaggcacgagtccaagcggctgatcgacgggccgctggatgacgagtccaacctgatgcacctggtgcatgaggcattcaacgcaatggccgccgccgagcgtgccctgatggaccgggagaaaggcaatgagtaaaatctgttggtgtacccgaccgcacgagaccgatgaaggtgtccgtgtcatctgggccttcaacgagcggggcatcggggtaaactacgtcacggcgtacatcacgccggcgatgatccaccacccggactggagcgatgccatcctcccggacatcctccaggagatggcggagcgcctggaccgagaggttaagctggtggaattgcgctggttccgcgctgagattctgagctgcggggaatggcgcgactaccgagcaatgacgctggacggggcggttagcctggccgaggccgagtggggtcccgaggatatcgggcgtgtaatcgaaagacgataggagacggaatggacctgatacagcagcagatcgcccacgaagaggcccttgtcggggcggcgcagaacgacgcccgcattgccttggaaaaggcgattgcccaagggtccatcgaccgcatcccgagggcacgcatcatgctgatgcggatgctccccatcgtgaccgaagcgatcttcgcccaccaggaagcgaaggcggcggggccggcagcaaagctgcggcacctgctgaggatcatcgacgcccaggacctcgcagtcatggcgctgcgggccgggctgtcgatgctcatcaactacccaacgatcaccgcgacgaagtattacacccatatgggcaagatgctctgtcgcgagatcgaagtgcggttggccttcaaggtcaaccaaccctattacgaccggacgctggactacctcaagaccagcaggactcgcagcgtccggcacatccagaagacgatggacgctcttctggacgcggtactgccggaagaggcacgtatcgacctgccggatggcgactacctgcgcctcggcaagttcatcggcgacccgctgatccaatgcggcctgttcgagccgaaccgcttcacagggcggggcggtacgagcgtccacctggagccgtcgccggaggccaaggagttcctgcaagacccttcggcggcgatgacctggggaggcccaggccgtagcgtgatgctggcgccgcctcgaccctggaacgactggtgcgatggcgggtactacagcaccaaggcacagaagcaccatgtgttggtacggcgcaccaagcaccagaccaagcgggcacgccagatgcagctccgccacctgggccgggacaagatgcccaaggtgtacgaggcggtcaacgcgctgcaatcggtggcctacgagatcaaccacgacgtgtacgagatcatcgagcgcgtcttcacttccggcggcggcgtgcttggcatcccgcagcgcacctacccggagaaacctgagttcccgctcggcgacgagtgggccaaggagaacgccagtgaacaagagctggaagccttcaaccgatggaagcgatccgtccaccgatggtacaccggagagcgggagcataccgccaagcttcgcgagtttgctgcactctaccgagttgttcgagagcatcatggcaaggcagtgtacttcccgatgcacgttgactcccgtggccgcatgtactattggggcacaccgaatccccaagggtccgacatcgccaaggcatgccttcagttccacgaaaagcgcgccctcggcaagcgcggcctgtactggctcaaggtccacgtcgccaactccctcggatgtgacaaggtgtacttcgacgaccgggcagcctgggtcgatgagcgatgggacgacttccagcgggcactcgacgaaggcccggagaactatccgagtctcttcccggaagacgagtcgcccctgtgcgccatcgcaggtctgctggagctgcgggcggcctacgcatcaggccagccggaggcttaccgaagtgggttcatcgtccacatggatgcaacctgctccggcctccagcactactcagccattctccgagacgagatcggcggagcctacgtcaacctgttgccacctggacttgccaaagctgacatctactcccgagttctcggtctcgttgcagagtctctggcacgagacagagaaagtgctgaaggcgaggctcggggctacgctgtactgtgggataaggctggtctatcccgaagcctgacgaagaagccctgcatgacgctggtatacggcaccacgttcaagggcgtggtagaccactgcctggactacctggacgagtccggcctggagattcccgagggtatcccgtcataccgcctgggaagctacatggcaacgctcatactggacgcaatccgcgagacagtaccatcggcagtcttcgccatggaatggctccagcggctcgctaaggcccttccggacgcatccaaggatttgcactggatcacgccactcggcatgcaggtcttccagtcgtacccgaagaccgaggaggtgcgggttaggctgcgggcagaggctgtcgagtacgtcaccctgtacgaggccaaagatgagctggacccggtacgcaacgccaacggcatcgctccgaacttcgttcacgggctggacagcagccacctgggcctgacggccctggcctgtgcggcagagggtatcccgatacaggccatccacgacagcatgggcacctatgcggcagacgtggatcggatgcacgtccacatccgggagcagttcatcgccatgtacagtggcccctgtgtgctcgtagagctggcaaaacagcttgggatagaggctaccccgcccaagagaggatcgttgaatctggaggctgtacgggactcctgggcgttcttctgctgaggtggattatgtcacccacataggagcaagtgcatccgtccaaggccctcgtagagggagcagggagagagaggggtcagggaagaccagagggtagaagaagagtagagggagagtagaagatgagactagatgactacgaaggattctagatagagtagactaaccaacgtaggagatatgatagatggctactatgaagacccaccgccctatggttatgtcacccacagtggaaggatcgagaacaggcaagggtacggcccgccctgtcacgttcacctctcagcagatcgagtggttagaacagaccttccccgaacatcagatcggccctggaaccactatggaagacatccagttccaggccggtaggcgagacgtggtgcgagcagtgcgcctgcgccgacgcgatgccatcgcagtggagctgaagtgatgaacaagtccatctggcgagtccacgcaaaggccggcactccctcggaactccagggcctgtgctggctggcaatacaggagttggaggagttcaccctcttccgctcgaaagacgacgccctgaatacgatgctggacagtatcgagggcaatgatcgaaccgagctgttggtattccgcgatggccagttggccggcggtgcctgcattgtgttcgaggacgatccccacgtcggcccgtgcgtcacagcacagtggcagtacgtcctaccgcgctaccgcaatacaggcgtggtccgggagttcatccgcgaactccaccgtcaggccggctggggtcaaatccccctcgtgtgctggagccatcgtgaaagcgatagccggtacacgatccactaccggagagccaagccttatgggcaagaaagtcaagaaggtgctaggcaagaccatcatcggcaaactcgctgatggcctgctgggcaccgatctgagcggcgcacaatctgatgcccgcaagatggaagagcagaaccgcctcatgcagcagcaggcggaccagctcgcacgaaaccagcaggttgacctcaccgccgagaacgtggcgcaggttgacctaggagcgatggccgatgccactggcaccggcacgcgacggcgccggaatcaggcgggcacaggcgtatcgcaaaccctcggtatcaactactgacgaggtacgccatgaaaaccaccgcagctatgctgtgggagaaacttcgggatgggagcgtggagagtcgagccatcgagttcgccaagaccacgctgccctacctgatggtcgatcccatgtccggcagccggggagtcgtagagcatgacttccagtccgccggtgccctcctggtgaacaacctcgccgccaagctggccaggtctctgttccccacgggcatcccgttcttccgatccgaactcaccgacgcgattcgccgcgaggccgacagccgggacactgacatcaccgaagtgaccgctgccctggctcgggtggatcgcaaagcaacacagcgcctgttccagaatgcctccctggcagttctgacgcaggtgatcaagctgctgatcgtgactggcaacgccctgctttaccgcgacagcgccgctgccaccgtggttgcatggtcgctccgctcctatgcggtgcgccgcgatgcgactggccggtggatggatatcgtcctaaagcagcgctacaagtccaaggacctggacgaggagtacaagcaggacctgatgcgcgcaggtcgcaacctgtccggttcgggtagcgttgacctgtacacccacgtacagcgcaagaagggcacggcgatggaatacgccgagctgtaccacgagatcgacggcgtgcgtgtgggcaaggaaggccgatggcctatccacctgtgcccgtacatcgtgccgacctggaacctcgcccctggcgagcactacggtcgcggccacgtcgaggactacatcggtgacttcgccaagctgtccctgctgagtgagaaactcggcctgtacgagctggagtcgctggaggtcctgaacctcgtggacgaggccaagggtgcggtagtcgatgactaccaagacgccgagatgggcgactacgtgccaggtggtgcggaagccgtccgtgcgtacgagcgtggcgactacaacaagatggctgctatccagcagagcttgcaagccgtagtcgtccgactgaaccaggcgttcatgtacggtgccaaccagcgagacgccgagcgcgtcactgccgaggaagtccgcatcactgcggaggaggcggagaacacgctgggtggcacatactcgctcttggccgagaaccttcagtcgccgttggcgtacgtctgcctgtccgaggtggacgatgcgctcctccagggcttgatcaccaagcagcacaagccggctatcgagacgggccttcccgccctgtcccggtccgctgctgtgcagagcatgctcaacgcttcccaggtcattgctggcctggccccgattgctcagctcgatccacgcatctcgctaccgaagatgatggacacgatttgggcagccttcagcgtcgatacctcgcagttctacaagagcgaggcagagctacaggccgaggcagagcagcagcgccagcaggccgcacaggctcaggcagcccaggagaccttgctggaaggcgcttccgatatgaccaacgcactcgcaggagtctgatagatgtctcaacagaacgaacagcaactgccgccgggcctcgctaacctggttgccaacgtaccgccggctgccgcgccgaccccgagtcatgtgcaggtgatgccgaatccggtgatccagccgcaggccccggtccaacccggccaggtgggttcgccgcagcaactggccatcccgacccagcagccgcaacccgttccgaccagcgccatgacgccccactaccagccggtagcggtgcccgtcgccggtcaacccgttgttccgcaagcacccgctcagccggccccggtagctccgccggctgcgggtgcagttcttcccgagaacctggaagtcccgccgccgccggccttcactcccaacggggagatcgtaggcaccctggcagggaacctcgaaggcgacccgcagttggcgccctctatcagctatctggaagcattctctgacaagctggataccgtccgtgccttcggcaaggccgccgagaaccgcgatccgcgattcatcgacgagcactatctgaaggaaatcctgggtccggcccaggcacagcacgtcatcaacgtggccaagggcgtcctgacttacgtcgatgcgcagaccaaggccgtcctgaatcagacctatgccgccgtcggtggtgaggccgtcctgaagcaggctgccggcgtcttcaaccaacacgctgacccggccaccaaggccgccatcggtcggctgatggactcgggcgatgcccaggccatgcagtacgcagcgaagcagatcatcgctttcgcacaaggctccggcgccgttgtacaggctaccggccaacccctgggtgctgcggcacctgcactcgcagccctgaccgctgagcagtaccgcgcagaggtatcaaagctgccgctgaacgcatccgaagccgacatggctgcgctgcgcgagcgccgtaaggcaggtatggcgcagggtatctaacgaccctgccctactccggccttaaactcacatccaaaagagagagaatcgcatgagctttctgaacgacctgactcgtccgaactacgctggcaagaacgcggacgttgacatccacctggaagagcacctcggcatcgtcgacaagcacttcgcctacacctccaagttcgcaccgctgatgaacatccgcgacctgcgtggctcgaacgtggtccgcctggatcgcctgggcaacgtcgaggccaagggccgccgtgccggcgaagagctggagcgcagccgagtcgtgaacgacaagtggaacctgaccgttgacaccctgctgtacctccgccaccagttcgaccaccaggacgagtggacccaatccttcgacatgcgcaaggaagtcgccgagctggacggccaggaactggcccgtaagttcgaccaggcgtgcctgatccaggtgatcaaggctgccgcgatggacgccccggtggacctggaagacgcgttctcgccgggcgtgctggagaaactggacctgaccggcctgaccgccaagcaggctgccgacaagatcgtccgtatgcaccgccgcgtagtcgagaccttcatcgaccgcgacctgggcgatgcggtctactccgagggcctgaccccgatgtcgccgcgtgtgttcagcctgctgctggagcacgacaagctgatgaacgtcgagtaccaggcaaccggcgcgaccaacgactacgtgaagtcccgcgtggccatcctcaacggcgtcaaggtgctggagactccgcgcttcgccaccaaggcaatcgcagcccacccgctgggccgtcacttcaacgtgagcgccgaggagtccgagcgccagatcgccctgttcctcccgagcaagaccctgatcaccgcccaagtggcgccggtccaggccaagctgtgggaagacaacgagaaattctcgtgggtcctggataccttccagatgtacaacatcggtgcccgtcgtccggacaccgctggtgccatcgagctgaagggtatcggcgccttcgacatcaccgcgtgatgccacgaaaccccgcacttcggtgtggggtttcttcaaagcctaacgacccgcgcagattccctgcgtgggtttttgcgctttaggagaaaccctatgctactactcgacgcagtgaatgtcatcctgcgcaagatcggcgagctgccgatcccgagcatggatgaaacgtacccaactatggccattgccctcccggagctggaggaccagcgcatccagttgctgacgcaaggctggtggttcaacacctggtggaagcacaagctgacacctgacccacagggtcgcatcaacctacccaaggataccttggcattctacccggactccccggacctccagtgggacggccagggagtgcgagacgccaacaccggcgacgaccgcatcggtaagccggtcgagggtcggctggtactgtccagggagtgggaccgtatcccggagatcgcacagcgcgtcattgcgcaccaggccgcactcgcggtgtacacccacgagattggcccggacgagaccgcccagggcatcgcccaggaattgcaggcgtatcagaacgaactgtcccgcatgcacacccgatcccgtccgctgaacacccaggccaagcgtagcttcagccggtggcggcgcagcttgaggacctgagcaatgagctacaagcaatccgcgtatcccaatctgctgatgggtgtgagccagcaggtgccattcgagcgcctgcccggccagctcagtgagcagatcaacatggtatccgaccccgtgtcaggactgcgccgccgtagcggtatcgagctgatggctcacctgctgcataccgaccagccctggccgaggccgttcctctaccacacaaacctcggtggccgtagcattgcgatgctggtagctcagcaccgtggcgagctgtacctgttcgacgagcgggatggccgcctgctgatgggtcagcccctggtgcatgactacctcaaggccgacgattaccggcagctacgggccgccacggtggctgacgacctgttcatcgccaacctgagcgtgaagcccgaggctgaccgcaccgatgtcaagggcgtggaccccaacaaggccggctggctgtacatcaaggcggggcagtattcgaaggcattctccatgaccatcaagatcaaggacaacgccaccggcaccacctacagccacacggccacctacgtgacgccggacaacgccagcagtaaccccaaccttgccgaggcgccgttccagacgagcgtgggctacatcgcgtggcagctctacggcaaattcttcggtgcgccggaatacaccctgcccaactccacgaagaagtacccgaaggtggacccggacgccaacgcggcgaccatcgccggctacctcaaccaacgtggagtgcaggacgggtacatcgcattccgtggcgacgccgacatccacgtcgaagtgtccacggacatgggcaacaactacggcatcgcgtcaggcggtatgagcctcaacgccacggcggacctgccggccttgctgccgggcgcgggtactcctggcgtaggcgtacagttcatggacggcgcggtcatggccaccggctccaccaaggccccggtgtacttcgagtgggattccgctaaccgccgctgggcagagcgggccgcctacggcaccgattgggtcctgaagaagatgcccttagccttgcgctgggacgaggccaccgacacctacagcttgaacgagctggactacgaccggcgcggctccggcgacgaggacacgaaccccacgttcaacttcgtcacccgaggcatcaccggcatgacgaccttccagggtcgcctcgttctcctgtcgcaggagtacgtctgcatgtcggccagcaacaatccgcaccgctggttcaagaagtcggcagccgcgctgaacgacgacgaccctatcgagatcgccgcccagggcagcttgaccgagccgtacgagcatgcggtcaccttcaacaaggacttgatcgtcttcgccaagaagtaccaggccgtggtcccaggtggcggcatcgtgactccccgaacggcagtcatcagcatcaccacgcagtacgacctcgacaccagggcggcgcctgccgtgactggccgcagtgtgtacttcgccgccgaacgtgccctgggcttcatgggcctccacgagatggccccgtcgccgtccacggacagccactacgtcgccgaggacgttaccagccacatcccgagctacatgcctgggcctgctgagtacatccaggctgcggcctccagcggctacctggtgttcggcaccagcacggcggacgagatgatctgccaccagtacctctggcagggcaacgagaaagtccagaacgccttccaccgctggacgctgcggcatcagatcatcggcgcgtacttcaccggcgacaacctgatggtcctgatccagaagggccaggagatcgccctgggccggatgcacctgaacagcctgccagcccgtgagggtctgcaatatccgaagtacgactattggcgccgtatcgaggcgaccgtcgagggcgagttggaactgaccaagcagcattgggacctgatcaaggacgcccctgccgtgtaccagctccagcctgtagccggggcctacatggagcgctaccaactcggcgtgaagcgcgagacgaatacgaaggtgttcctcgacgtgcccgaggctgtagtcggttcggtgtacgtggtcggctgtgagttctggtccaaggtggagttcactccgccggtgctccgggaccacaatgggctgcccatgaccgcgacccgcgcagtgctccaccggtacagcgtgaacttcggatggactggcgagttcctgtggcgcatcagcgacacggcccggcctaaccagccgtggtatgacacgacgccgctgcggctgttcagtcggcaactcaacgccggcgagccgctggtggatagcgccgtagtgccgctgccggccagggtggacatggccacgtccaagttcgagttgagctgccatagtccgtacgacatgaacgtccgggctgtcgagtacaacttcaagtccaaccaaatctaccggagggtgtgatggctttctggctaccactattggccgctggcggcatgtcagcccttcagcagggaatggccaacaaggaagagcgcaagaagatcaaggctgagaacaaggctcgactgaaggcggacctcgacaacctgggcgccgctgcccgcgacatcgccaacctgggcgtcatggccgctagctaccgcaagcaggctgtggcctcgcaggtggaggccaagcgccaggggatgctcgccggcggcagtgccgaggctcaggccggcgcgttcggcgtcaagggtgcatccgtggatgcggtggccctggacatcgagcgcgaggtcggggaggccctgatccagattgacgacaacctggacaatcagatgtggaacctcgccgagcaggcgcactccatccaggctcaggcgaaggccggcctgctggggcagaagagtaccacggcggggcaacggtccccgctggtggccggcctgatgtcggcgggttccctgtacgcaagtcaatacttcaagttcggcgccacgcctaaaggaggcaactgatggcggaatcgcaacgtgcttcccaagagcttgggatcaacgtcggacagacgcaactccagccgggccagagtgcccggcgaggggtgcgcgactccgaagtcaactacagcgggccgagtgtaggctcacagattctcgacggcatcctgggtgccggtcagcagatcgctggcaagtggttcgagcacaacgtgcagcaagaggtgctgcgcggcgagcgtgcccgtatggcgggcgaggccgaggaggccgtcgatagcaacatcctggccaagcccttcgtgaagggcggctggcgcaagcaggactaccgtatcgctcaggccgacttcagcctcaagatgcagcagttcatcgccaacaagggccgggagatgactcccgaggagttccgcaagtacctgtcccaggaggctacacacgtcctggactcgaccgagggcatgaaccccaacgatgctctacaggcgctggcgcagcagcagaaggccgaggagcagctattcggtatgcaggccaaggcgtacatggactggtccatcgaccaggccgcccgaggcttccgcacccaaggtaacagcatcctggccaaggctgtgcaggctcaggccaccggcgacgaactgtcccgccagctcagcttggaagaggccggcctgttctacacgaacatcatgacctccgaggatatcccgctggaggtgcgtgacaaggtaggcatgcagttcctggcggccagcctggacatgaaccagcggggcatctacgagagcctgcgcgatgccggcttcctggacagcatgtccttcgacgaccggcgcgccctcaacggcctctatgagaagtcgaaggcgcagacccgtgccaaggagtcgatggctaccctacgggccgatgcggacttccagcagcgggtcgccaacggcgccatcacggatcttgccgaggtcgaggcgtactcgcggggcatggtcgaggaaggccgctggagcgacgcacaggccatctcgttcatgaccaaggccatgaccggcctgggcaacgcgcagcgcatgcaaggcatcatggcggccctggaggccggggacatcaacgctctgcacacgctgggtacgaacgtctccgaggccctggagcagtgggacaagatgcaggcggccaacggctcaagcctgaccgatcgactcgtgcagggcacgcagctcggcctgcgcctggggaccttccccaagacctacggcgagtccgtgggcagcgccgtgcggatgatccaggcggccaaagaaggcgaggcgaaccctgagctggtcaacacgctgaacagcatcttcgaacaggtggcagcggctcaggagatcaacccctccgccggcaacgtgatgctatccggcatcccggaggccgagcagggtgccgtggcctgggcactcaagcagatgaagatgggcatcgccccagctcaagcactgcgcgagttcagtgccaacgccgaagtcgtgaagcagatggacgagttcgagaaaggccagaacaccaaggcgttcaaggacaacctcggtaagcaggtcaacgacaagttcgtgaacaacatcttcggtcgggcctggaacatgctgaccggtgagagcgacctgagcaacaacgaggccgtcctcagcatgtaccgccgagcgaccatcgacgaggcgaactggctggccagcgaccgcaagcacgccgggctactcaccagcgacacgggccgcgaagccctgctggagatcgccgccgccaacgtgcgcaaccgcaccatccaggtgggcgagggccgcaacctgaaggaaggggacctgttcagccgccgcgacagcgcgccgctgatcctgcctcgcgggaccactgccgagcagctattcgggaccaacgataccgagaccatcgggaccgtcctggccgagcagcacaagcctcgcgtggagggcctcctgggctacaagtcggccgtcgccttcgaatacgaccgcaccagcggtagactcctcgccgtcgagtacgacgagaacggcgtggccctggaccgcacacgggtcgatccccaggcagtcggcaacgaggtgctcaagcgcaactcggacaagctgaatgcgatgcggggtgccgagtacggtgccaacgtcaaggtcagcggcacggacattcgcatgaacggtggtaacagcgccggcatgctgaagcaggacgtgttcaactggcgtaaggaactggctcagttcgaagcctaccgaggagaggcgtacaaggatgccgatggttatagcgtgggcctggggcattacctgggcagtggcaatgctggggcaggtactacagtcacgcctgagcaggccgcgcagtggttcgccgaggacaccgaccgcgcactcgaccagggtgtgaggttggccgacgagctgggcgttacgaacaatgcctctatcctgggcttggccggtatggccttccagatgggcgaggggcgtgcccggcagttccgtaacaccttccaggcgatcaaggatcgtaacaaggaagccttcgaggctggcgtacggaacagcaaatggtacacgcagacgcccaatcgggctgaggcattcatcaagcgcatggcgccccacttcgacactccgagccagatcggggtcgattggtacagcgccgcaacagcggagtaagacatggcacagcaattcaagggccgcatgacgcccaagtatcccctagaccaagcacagctcgacgaggcccaagtacagggccaactcgacgccgtgcctaccgtggggttcgacgccctgacgggtggcgagatcggagaacggaacgtggcagcgggccaacgagccaatgcgcgggaactggaacgcatcgtagcggaccaggaactgccggcccttgaccgtgcttccgcactctggaaccagtccaccctcgtcggacgctggggcgatgcgctccagctcgacgcggacctggcggcgaacagcaccggcgaggtggaccctaacttcgacgccgggacctacggggtccaggcgctccaggcggcgggtatccagccgactgacaactacctccagatcatggcccgtgccggcaatgccgaggacgcggcctacctcctgtcgaggattcaacggtatgagcaggacgagcaaatcgtgcgggacaacccgtactggaacttcgcggctggcatgcttgaccctgctgccctggcagttgatgcggttactttcggcgctggccgtgctctgcggctcgggcgtgctggcatggctgctgctggcggcgctgggcaagtcgggtatgttgctgggctggatgccgcaggggccgacgtggatgccggaacctacatcgtgtcgggtgctcttggcgctggcgtgggtgctctgctggggtctggtgcgggacgcattgccgcagaggccccgacgcagccgcatgtgcccgaagtatcggcgcctactgtcgggctgccagaagtagcgatgaccgccgaggaggccgcagcacgcggcttcaaggccggtgacgtggtagacctgctggacgagggcactgtgctgtcccgtgtcagctcccgtgtggagcaggccgagataccggctatcccacgacgcgacactgccttcggcgacgagctgcacagcctgtcgggccggaagctgtccgaggtcctggaccacctcaagacccacgcagaggtgcccaagccgctccagggcatcgccgccaaggtggccgataccatcaggaccctggagggcctggggcagcgcaccgcgttccgcgtggtgcagggcggcgacaccgccagctccgcattcctcaagccgggtacggcggggattcactccacccagggcctcgataccctggtgcaggtgcgtggcagcaccgcgcccggacgagtcggcaccaacccggtgaccgtgctccacgaggcggtccacgctgccaccgtaggcgtgatgaacgctgccctgcgcaaccccggtgcgatgagtccgaaggtggctcaggccatgcagaccctggagaacgtccggggtaacgtgctcaacgctctgaagcaggaccgcgccgccggtcggcaactgtccgagttcgaggagacgctgctggccggtaactccaacaccctggccaacgtcaaggaactggtggcctggggcctgacggatacccgcttccaacggaccttgaaccgcttgcgctacagcgacggtgggccgggcctgtggtcccgcttcgtggaaggcatccgcaccctgctgggcctgcggtctgatgccgacacggccttgagccgcgtcctggccgcctctgagacgattatggaggccatgccgggctacacgaaggcgcaggctaagtgggccaacaagggcgctccagtgaccgaggaggccagcctggagaccatcgtccggtccaccagggaccgtgcccgtgagggtgccggcttcgtgaaccggttcttcagcgaggcggacctcctggcccagcctggagagggcgcacggcgcctcctgagccgtcttatcgacgaccctgtacgtcgggatggattcagcacgaacgacaacgcagcgagctatctgcgccgttaccggaacgagttcgaaggttacgtgaagtcctacgacgagatgatggccaaagcgatggctgagcagggcgtgggcctgacggcacgggcactgaactcccgccgcgccatggcagtccgggaccagcttaacgagcaggtcacccgcgagctactgcgccgggaccgggagtggaccgcctacggcagcgtccgtgtagacccgaacctgccgccgaccatcaaggccctagccgaccgctcagacgagattcatggtctgatgggtcagcgtgccagggaagccggcgtccgtggcttcgaggacttcgcaccgcgaccgggatacttccaccgctcgtggaactggtcgaagatggcgcagatggacgaggccgcccctggcctggcccgccgcgccatcagcgaggccgtgttccgtggcatccctgggctggagcgcgccgacgccgataccatcgcacaggccattgtgcagcgggcgcgggatcgggccaccggcatccgatccgagttcatgggagcgatgggcgtggcggacacggcattcatccggcaagcgctggaggaggccaacgtgtcccaggccaagttcgacagcatcatggccaagatcgagcagaagcagtccgaccagggcaccgtcaagtacggcaagggccggctgtcgctggacatgaccgccgagatcaaccacaacggcaccgtgtatcgggtgcaggacctgatcgaccgagacctggaccggctgatggagaactacgccggcagtatgtcgggccgctcagcattggcccgcgcaggcatgccgggggactcggagatcgaagccttcatccgggagtaccagcgagaggcagcccacctgggcaccgataaggtgcaggagctgacggggcaactgcggggagtcttcggggacttcaccggcaacgtgccgagggagcatcagctcggcccggttgctcagcgggccagcggactgaccagcgccaccatgctgggattctcaggcgtgtatcagctcgccgagctggccacgatggcgcaccgccaaggcgtcttcaacgtcatgaaggccatgctgaactcccgcctgggagacttcgtgggcgccatgcgtcgcgacccggacctcgctgacgagatgcagaccgtcctcggcctgaacctcgccaacgatatccggatgaagccctggaagcggcagttcgacaccttcctggccagccaagacaccttcatagatcgcttcctccacgcaggtaagcaggctgtcccggtgctcaacggcatgaagttcatccacaactggcaatcccgcatgaacgccaacctcaccttgaacaaggtggcgcgggcggcgcagggggatgaggcggcccttcgagtgctccagcagtacgggaaggacgtggactggacgccagtattggcgcgggttcgcggttatgtcacatacagaggaaggaacgcccaatccatgaattggggcgcctggagccaagcagacgtgaacaccgtcatgaacaccgcactgcggatcatggacgactcactcctgtacggcagggtcggtcagaactcgggcttcgctcggtctccggtcggtcaaatcctgggtcagttccgcagctttgtggccttcgcacacaacaagctactccggggaacctacgagaactccggcgtgcttggcgtggcctcgctcctcgcattccagtatccgctcaccgcgctgatgatgggtgccaaggcagcgatcaacggcaagttcgacacctctgacgaaggcatccgcaagatggccatcgacggcatcggttacactgccggcctcggcttcaccgctgatatgtggggcgtgatcaccgggcactcccggatgtccgccccggtcttcggactggcggagcactccaacgaggtgttccgtggcgtcaaggacctagtaaccggcgacgaccccgcagcagccactggcgatatcgtcaacggcgccgcaggggcactgcctttcgtcaacgtattcccggcgaccaagttgctgctggaatccatcaaaggggaataacgtggctcggttcaagaatcccgagaccatccacgttgcagatggggtcgaggctgtcttcagtctcgacttcccgttcctgcggcgtgaggacgtattcgtccaggtcgataagatactcgtcaccgactatacgtgggtggacgacaccaacatccaattggccgtggtgccgaagaaggaccaagaggtccgcatcttccgcgacacgcccgcccaggtcccggacacacagttcagccagggcatcccgttcctgcctcgatacatcgacgcgaacaacaagcagctcctgtacgccgtgcaggagggcatcaacaccgcgaacctcgctctcgacggcgtactcgacgcgatccgtatcgcggaggaagcccgtcgcctggcacaggaagcactcgacgccgccaatgaggcgctgcgccgtgccctgggcttcgccgagattcgcaccgtgaccgaggactcggacatcgatccgagctggcgtggctactggaaccgctgcatcaccgccgacaagcccctgaccttgaccatgcagatggaagacccggatgcaccgtgggtcgagttcagcgaggttcacttcgagcaggccggtgtgcgcgacctgaacatcgtagccggtccgggcgttaccatcaaccgtttgcagaacaccaccatgcagctctacggcgagaatggcgtgtgtaccctcaagcggctgggcgctaaccactggatcgtgttcggagccatggaggacgaataatgcgcggcattatcgcgggcatcatggcctcccaaattcgacggcccaagcccatcctggcgacctacccgtatcccattctggctacggacgacgcatgggctactaagcctaacatagtggcggcgctgacacgcgacactttgcacgaggttgtgaaccagccaggagaggacacctaccacgcaacctccagtgtggtcaatgtgctgcttcggtcgctgactcagctcggctacgggggtggcgacgggttcctgaccgcacctgccgtccatgcagccctactgcgcgatacggttaagagttacaccgcagagccttacgccttcttgtcgcagaccgcagtggccggcgcagagcttaaggttgtggtcgtctactctgagtacatcgtggagccgtacgccttcgccacttcgacagcaattaaacaggcggaactgaccaatgtttgagacacgtgttaagggtcgctacaccgtgacccatctgaaagccacgggtgaagtcctggcacagtacaccttcgacaacctcatcactaacgcgggccttgactggatttgcgccatgaatacctcggacctgttctcacaggccctggccgtgagcaccagtacggcagaccctaaccccgccgcaccttccctgcccgaagaagtccggcgaaccacttcctatgccccgaacggggacgtaacctcgggtctggacggggagtggatttactggcacaagcggtggcgcttcccgataggcactcttaccgggcaggtactggccaccgtgggtattgtggcccaatccgaggtcgggttcgagagtaacactggcgcgaagattccggcagggactccgctatcctacacccggatcaaggatgccgccggccaacctaccaccttggtagttcaggccgacgagactctcgacgtacagtatgagctgcgcagcaaggccgtggcgatggccgaggccaagttcgtgatctccggggtcgagcgcaccatccgacttactccgctgcccttcgcgaaccgtcgtaacctctacggcgagcgctacatccgctacaacgagagtccgcggatcgacggcaagaatgcgtcgggtgcggatgtccaagacggccaatgggtgaagctgtacccgcgatatactcgcggcacctacaagggccagcttatgctacgggccaccgtagataacggcaacatgccggggggtatcaccgggtgtaaggacctgaagatttacaacggtcggaactacgcactcaccatcgaccctcctgtagtcaagaacaacactcaggagttctccattacgatggagttctcggtggcgagggcataacccatggcactgatctacgacttcaacccagacctcgatccgaaggctaagtccaagttcgtaggtgcgcgaggccgtagggacatcagcgatgtgctggacttctgcgacgggggcgtggccatccaggacccatcgcagggtatgatggtccgagtgtggcgaacagagcttcgccaggacgggacctacctggggcacgaggacggctcaaacgagattcgcatcggtggcggtatcgctgacggtatctccacgatgtcgctcgacttcgacagcaacatgaactatgtgtgtgctttcgtacgggctgatcgtaccggtgcaatctcctacttcaacgtgcagcagggtcgccggctcctcgtagagctaggtcaggttgactatgccaaggtggccttggacgacaaacgtccaggggctaccgcctgggcgcaggtcatcgtaccctacacccgtaacggcaacctgtacgttcgcacacagaacgagaactatacggaagagcacctggaggtagataccggcaaggtattccgcccgctggtcaaatgcggtatgggcaccaacctccgcttccaagtccaattcagagggcatatgtaatgagcaaaaagcagaccgcgagtgctgagcggctgggcctgcttcacgagctggtctgcaccgctatcgagcgcaacttcaagtggtacatggacaacgacatcccgatccccgcgtcggatatcgccgccgccaccaagttcctcaaggacaacgagatcacctgtgatccgtccgacacgatcaacatcgaccgtctccgcgaggagatgcggcaggcgcaggccgagaaccgccgtatcgcgctggagggcttcatcgccggtgagaccgacgacgagatggaacgtctgtacactcactaaggaggcagcatgacgccgcaagaacgattccagatagcccacgaagtgcgggacatgtacccgcgcttccgggacttctgcctggacgccatgctgttcctcggcttcaagatgacgtggatgcagctcgacatcgccgacttcatgcaggactcgcccaataaggcgatggtcgctgcacagcgtggcgaagccaagtccaccatcgcctgtatctacgtggtctggtgcatcactcagaacccggctacccgcgccatgctggtatccggctccggtgacaaggccgaggagaacggccagttgatcacgaagctgatcatgcactgggacctgctggcatacctacgccccgaggcccgcatgggtgaccgtacctcggccaccagcttcgacgtgaactgggcgttgaagggcgtcgagaaatcggcctctatcaactgcatcgggatcaccgctgccctccagggctaccgggctgatatcctgattcctgacgacatcgagaccacgaagaacggcctcaccgccaccgagcgggccaagctgacgcggcagtcgcaggagttcacctctatctgtacccacggtaagattctctacctgggcacgccgcagtcccgtgagtcgatctacaacggtctgccggcgcggggcttcctgatgcgcatctggccgggccgcttcccgaccctggatgagcaggaacgctacggtgactggctcgcaccttccatcctggcgcgcattgcccgcctggaggagaaaggccacaacccgcgcaccggcaagggcctggatgggacccgtggctgggctgctgatccgcagcgctacaacgaagaggacctgctcgacaaggagctcgaccaaggccccgagggcttccagcttcagtacatgctggacaccagcctcgccgacgagcagcgtatgcagctcaagctgcgcgacctgctgttcatcgacgccacgcatgagagcgtgccggagcaagtggcctgggctgccgatgagcgcttcaagctcaagttcgacgcccaccgattcccggtcatcaaacctgagctgtacctgccggcgctgatggctggcggctgggcaccactccagcagatgacgatgttcgtggaccctgccggcgacggtggcgacgagctgtcgtatgctgtgggcgggactcttggcccgtacatccacgtcgtgagcatcggcggctggaagggtggctttgccgaggagaacctggagaaatgtattgccctggctgcgcgttatggcgtcaaggtgatctatgtcgagaaaaacctcggcgctggtgcagttggccagctcttccgcaaccacatgcgatccatcgacccggacaccaacaagccccgctatgaggggatcggcgtagaagaccgccagaagtccggacagaaagagcgtcgcatcatcgacaccctgcggcccatcatgcagcggcaccgtctgatcttccacgtatcggcgatggattccgaccacgtggcctgtcagcagtacccagcggacaagcgcaatgagcgctccgtgttccaccagattcacaacatcaccaccgaccaaggctcactgccgaaggacgaccggatcgatgcccttgagggccttgtccgcgagctagcacccacgctcgtgaaggacgacgaagccgctacccgcgctcgtgaagaggccgccaagaaggaatggctgaacaacccgatgggttacactaagtctgtccttcggtctctcggcatgggccgggagcgtcgcaagggccgcccaaaaggacgaagactatgatgctcgataccgccaccgaggcgggcaaaggcaccctcgccgtcaccggcgtggggatcgccgtttactcgccctatgagatcgccagcctctgtgctgcggtactcaccgcgctctacgtgggcgcccagctcatcaccctgctcccgaagatgctcgatagcatcgcggagcttcgccggaggttcaagaagtgaacaagcccctgcgcggcgcagcccttgcggctgccctcgccggccttgtcgccctggaaggtagcgagaccactgcctaccgagacatcgccggcgtacccaccatctgttctggcaccactgccggggtcaagatgggtgacaaagccacaccggagcagtgctaccagatgacgctcaaggactaccagcgcttcgagcgcatcgtcctggacgccatcaaggtgccgctgaacgtcaacgagcaaaccgccctgacgttcttctgctacaacgtgggtccagtctgtacaaccagcacagcgttcaagcgcttcaaccaaggccgcgccactgagggctgccaagccctggccatgtggaacaaggtcacgatcaacggccagaaggtcgtatccaagggcctcgtgaatcgccgcaacgcggagatcaaacaatgcctcgaaccatcgtcgcaatactcgtccttgctgtggtagccctgggagcctcgtacggcttcgtccagagctaccgggccttgggtatcgcccaggaggagatcaagcggcagacggcccgtgcggaggccctggaggtgcggtacgccaccttgcagcgccacgtcaaggaggtcgctgccaagaccaacacccagcgccaggaggtggaccgtgccctggaccagaaccgcccgtgggctgaccggcctgtgcctgctgctgtcgttgacagcctgtgcaaccgccccggcgcccgctgtgctgtgcgaacacccactgattgaccctaccacccaggctggcctaatccgcgctgtagcggcctatcaggacgccctggacctatgcaacgccctgaatcaaggagattgacatggcgaacacccgtgagcaatacctcgctggccgtaacaccagcctgaccttctaccaggtctgccagcccggcaccgacaaccgcatctccctgcacgacatggacgaggccgatgtcaaggccaaggccaccgctgtgatcgcagcagccaccgccctgggcggcgagggtggcgctactccaccggacccgctcaccgcctacaaggtgaagaacggtgacaccctgcccgtggacggcggtggttccgtgaaggtgaccgtagccaacggtgctatcaccaaggtcgtatacaccgcaccggcgggctgagctacagcccgtccaacctgactccatccatagcacaaggaactgaaccatggcaaccttcgccgctgcaactcagaaagacctccgcgccttcgccggcactatcgagaacctgatccgccctctggaagaagcggccctgggttcgggctacaacgccaccttcaaggaggtggagaaggacgatccggacaaccctggtcagaagatcaaggtgcaggtcatcgacaagcgcatcctgcgccccgaactcgtggctaacctcgacgccctgatggccgctgtcgagaccgccaaggccctcgtgttcaagtaaggagacaccatggataagcgctataccctgggcatctgccactactccgcagtggacaagcagacgcccgtcaccttccggtgcagctcgctggccgaggtggaagccatcaaggagcagtggactggcggcaagctcgcacagtaccactaccacctggtagaccattgggcgaacgggcacccggattgtccctgctgctgctctgagtagctcaagccgagcacctgcatagtcgaccctgccctactccggccttaaacccacatccaaaagagagagaatcgcatggacgtgaaggcgcgccggacgttcctgcaatcggggcaactcgacgaccgcctcaaagcggcgctccccaaagagtacgactgcaccaccgaagcgaccccgaacccccagcaaggggaaatggtgatcccccgccggtatctctccgggaatcatggccccgtgaaccccgattacgaacccgtggtcaccctctatcgggatttcgaaaaaatctcggcgacgctgggcaatctgtatgtcgcgaccggcaagccggtgtacgcgacgtgcctcctgaacatgctcgacaaatgggccaaggcggatgccctcctgaattatgaccccaagagccagtcctggtatcaggtcgaatggtcggccgcgacggccgccttcgccctcagcaccatgatggcggagcccaatgtggatacggcccaacgcgaacgcgtcgtcaagtggctgaatcgggtggcccgccatcagaccagcttcccggggggcgacacgagctgctgcaataaccattcctattggcgggggcaggaggcgaccatcatcggcgtgatctccaaagacgatgaactcttccgctgggggctcgggcgctacgtgcaggccatgggcctgatcaatgaagacgggtcgttcgtgcatgagatgacccggcatgaacagagcctccattaccagaattacgcgatgctcccgctgacgatgatcgcggagacggcgagccgccagggcatcgatctgtatgcgtataaggaaaacggccgggatatccattcggcccgcaaattcgtgttcgcggcggtcaagaatccggacctcatcaaaaaatacgcctccgaaccccaggacacgcgcgcgttcaaacccgggcggggggacctcaactggatcgaataccagcgggcgcgcttcgggttcgccgacgagctcgggttcatgaccgtcccgatcttcgatccgcggaccggggggtccggcacgctgctcgcctaatgccacgaaaccccgcacttcggtgtggggtttcttcaaagcctaacgacccgcgcagattccctgcgtgggtttttgcgctttaggagaaaccctcggcgggtgctccactggaactactggaatttttattgaggttggctggcggctggtctgtggctggcatctggctgggagtagttactccgggtccaattttgatatcgtcgtgtgagaaccctcccgactctgatcagcccacccttcccccgtaggccctccgcctggtgggccatcgcctcgcattgcctgggtggtgctgcctgtcctcctgggagcttccggcttcgccggggtggcggtggcttccttgcccttcgccgcccattctacgcatcctgccgggagtgtcaacccttgggctatcgctgtcactctaccgggcttggccgtagtgcctggagcgctctatcgcctcctggtgcctggctacggctagcgctcggtctgcctctagggtcctggctacgcctgggtagtgcctggcatcttccctagcccacttggctagcctgcgctgccaagctgcctcgtgctggtgccaggctcgctcggctcggtcctgtctgctcagcatccttgtgcctcctgtggtggtctgcggtcctgtcgggtggtggtg

SEQ ID NO: 59 - DNA, 996 bp, Sphingomonas sp.
  source 1..996: mol_type = genomic DNA
atggacgtgaaggcgcgccggacgttcctgcaatcggggcaactcgacgaccgcctcaaagcggcgctccccaaagagtacgactgcaccaccgaagcgaccccgaacccccagcaaggggaaatggtgatcccccgccggtatctctccgggaatcatggccccgtgaaccccgattacgaacccgtggtcaccctctatcgggatttcgaaaaaatctcggcgacgctgggcaatctgtatgtcgcgaccggcaagccggtgtacgcgacgtgcctcctgaacatgctcgacaaatgggccaaggcggatgccctcctgaattatgaccccaagagccagtcctggtatcaggtcgaatggtcggccgcgacggccgccttcgccctcagcaccatgatggcggagcccaatgtggatacggcccaacgcgaacgcgtcgtcaagtggctgaatcgggtggcccgccatcagaccagcttcccggggggcgacacgagctgctgcaataaccattcctattggcgggggcaggaggcgaccatcatcggcgtgatctccaaagacgatgaactcttccgctgggggctcgggcgctacgtgcaggccatgggcctgatcaatgaagacgggtcgttcgtgcatgagatgacccggcatgaacagagcctccattaccagaattacgcgatgctcccgctgacgatgatcgcggagacggcgagccgccagggcatcgatctgtatgcgtataaggaaaacggccgggatatccattcggcccgcaaattcgtgttcgcggcggtcaagaatccggacctcatcaaaaaatacgcctccgaaccccaggacacgcgcgcgttcaaacccgggcggggggacctcaactggatcgaataccagcgggcgcgcttcgggttcgccgacgagctcgggttcatgaccgtcccgatcttcgatccgcggaccggggggtccggcacgctgctcgcctaa

SEQ ID NO: 60 - DNA, 94773 bp, synthetic construct
  source 1..94773: mol_type = other DNA
gcttacatccgctcccattttgcaatggaaattgcatacagttcatcatgcgcttcaaaagtgacttcactttgcatgcggatgcatgctatagtataccctgtgatagctccgctatcccgttttgcatggcacacgaattgcataagcatgacaagggtaaccctcgaaagcggagctttcaaagtgtaggctgagtgtgggctctacctctattatatttgcgaccggaagtagtgacactgaaaacgttgactctagcccagtaaatacgttaaactaaaaggttgatagctgccgctatcgagtaaccaacattcacacaaggaggcacaatgacaagcaacaatcatgccaagattcacatccattacgctaagcaaatctactacgccatgcgtaaacgtgccatcgcaagcgatgagatatgcaaggaatgggccaagcccaagacaggctttgaagcgttctatgattgggtggtgaatgtgtcagggtacgccgtaggctaccgcctagacaggaatatcctcttcccgggaaacaagctctatgctccgcatacatgtgagttcacacctacatacatgcatactctattcaccaactgcgacaagacaagcaataaccgtgccaacaatgatctacctctaggcgtccgcctagcccgtcatgacaagtacggaatgccagtatacgtctcacagtgcaggacactaggcaagcagtctacccttggatcgttcgacgatccgatgcaagcccatgcggcatggcaacatgccaaggtagcagccatcctcgaatgtattgatctctatcagatggaggatgttcacagtgtaaacgttgttcaagcgttgcttgaaagagtggacaaacttggcaaggatattgcacagggaaaagagacaacccttttgcaatgatttgatggggtcgatggtcaaccctctgagagtgcgagaactccgccagagtaatccgatagcgaagctatcaaacgtatatgcatattccatgccaacatgtggaaagatttcacccggcagggcgggagcccgttggcattagttttgcatagcttagctgtcgctaagaaggaaagaccacggccacccattattttggatttactaagggttagggtagcgaggtgggttcgtggttaagtagctcggaaataaatccataactggcagaaggcgaaccagcagagggcaggcccgctccctccattattttcccagcagtagaggaggcacactctacaaacgtatcactctattcggcgggggtttaggattcgaatatacctttagcggctaaatgccatcattgcttatttcctattttcgtgctataatccttataggatgttcttattcttcattatagctggataagcgatggttgtatagattcaccacaaatagaaggaatatagaatggaagataatattcaagctccgcttgcagctagtgcaggtggcaaattcgcaactgtatacgaagctattgtcgcactcggagtagaaggggctgccgctgtgtacagggtaggtgtagggaatagattgacaacagctagaccatcggcgtggtaaagagaagccccgggcagcgaaagctgatcccggggctttttattgccttgagtttatgtatgaagagattccagttgtctctgctcttccatatactccctagtggcgtagttcatcatgaggttgcaatactcttcgtttatctggtccatgtattgcaacactttctccatgctctggcatggactaaatccattatgacggagaatcttgcttagattaccctcattccagaagtctctggcccaagcctccaaagctactgcgtagaggcttttgatgcacccgataggggatggataccaatattgctcagacattagaccctccaaacgcagcaaacaccccttgcttagctaggatagtctttagctcctccagtgaaatggtctcgtctcctacgaccacatacttgtctgccttccctagagtcatcacacacttagtctggaaggtaggccgatacaagtcatacacatcgggttgccacttgcttcgcaggccagttccgtagctaatgaaccggtcttcgggatgatcccggatgtataggcaccggggactatcatctggcccatctacggagatagggtgttccatccactccctgatcttatcaacgacgccctctcctaccttcaattgagcgtactgacagtactcaaggaacgcatcaaactgttcggcagtgaaattgctgacatcgatctctttagttttcattctcttcctccatgtctgcaatgatttccttcaacgcttgaagcgtgtaggtgccatttagctctgtagtaggaccagtgtcacactcatgaagcgtgtacgcggtcactttcttctcagtgacgaaatggaagtctacccttcggaagtcgtaggtcgatttcgagtatccaatggcctctttgagttcttcctcgtaccacaggaatgtcattggacttccgtcgcttttacgagtgtagtccagcagattatctccaacccacagtagcacttgagccttgtcgtacatgaagccgtttccgctcccaaactcgataccataagccttaaggtgctgttgtactgcaatgttctcttcgggggtcttcacaatagtgtaaaacttcaccaaacgctctttcaatttcagtcctcctgtctgtgttttatgggagtgtaaaacgttcccagtccattgtcaagccttctgtggtgatagtctgttccagacgctctctagctccttttagaatgatatcccactcatctccttcttggacccctacatacttctccatcatcagcgcacgatcaacaagcccagctctgtagttctgtcgctcttttctacgcgatagcactcttgagatatggtccttcttcttcgccaacacgctgatagctttccttgccataagagttgcatactcgctctcctcggcggtcatccattcctgatacagcagccctagacgagtgtcatgctgtacgagtggaaggtctttccatatgatacctactcgtccagtatcagagacggctttccattccagcgtagtgccgccggtcttatagtcggtgatctttacattctccgagttagattgagactggaaagcgtgcctccagtctcggtatacagtccaccgtttccagtcgaagaatgtctcacagatggctttaacaggttctccgattttaccctccagttctttcaggcggttctcctgctcagcactcatgtatttgataggtcgggaggctggatcgtagcactcctctacctgaaactcctcagcccgagactccaacactttaggctcatcgttactttcttcctctcggaaccatgcgaacagcttcttaaacatattcagtcctcctctcctgtgatagctaccctagtcagtctccacacttttctaggtagactaacgaggaatagcatagccataaacggtacggcgataggccagaatattccagctaacaccgctcgggcctctttcttacgcctctccgtactttctcccctccacccaagaaggggtcgtagagattcccatacgaacatccctatcacagagtagaacaataggcagaccactccgacgactatgcatactagaatgagaagccctacttgttccatggtgcgatcctcttaagtagtttacggctgttccagatagacagagcccacttaggtaacaacaccactttcaaaacgctgtatgttgcgtagagtagcagaaagctagcatacactgtgaatgtaataggccatagcagtcccagtacaatggcaaaagcctcgataccctctctgtgatctttagtcgcactagctgggaagttatctttgaaatactccgtgatacccatgtaggtccacatgaacgcaattccccacgcgagcgcgaggacgaatagcattgggattatctccattactcccctccttttcgaatcaagtcgaagtaggcccacacgtagaagttgcaccacgctctgcctatggcccagccttcccaatagtcttcccagtccttgttcggagggttattctcgaacatggataacacgcatgaatcagctacttcgtccaagaggtgcattaccgaattaagcggcccgattccaaaggtcttatctagccaccccttaaatcgtcccacgtctgagacggtgacgctggagtcactgcacagtgccaatctctccagaatgtagcacatgtaaggctcttcttcgttctcgaagaatgcccgcatgccttccttgattagtggtgcaatactattagagttcattttccctcctttcggatcaggtcgaaataagaccagacataaaagttcatccagttcgtctcagtgtctcttagacaattgcgatgaagataagagataactgattcccacgacgtaatcccgtgctgctctattagccactctctgaatgaccgatactctccgtgggtgatttgcccttcttctactaggtcactcaggatataacacatatatgtgtcccgggcgtttaccgagtaatcttccagtccgatctttatcaactctgcaactgatctcattgtttcctcctctgagagccccactagggctctaaatttttggttcgacctgcggtcagcacatcacaacccagttgtacaggtcggcctcctcataagctgatgggtagcgattgtactccaagaagaacgcgtggtcaatagctgagtatttggttgcgaaactcgtaatgtaagtcagaaacccgttgtcctctttcctgaacagggcgtattcttcagtaccgtccttaaacgtatctagcgagatagtatacttgtcgaagatcacagcatttcctcccggctaatgtagtagttgtagttgtcctcttggacgaggaacgcacgatagaagcctttctcaaagtctcccttgaccagcaccagattgccctccaccttgcatgtatagatatacatggtgtttgctactcggataacaggatcatccccgggacgaacatccagagcagagagcatagcctccattggcatgcttgtcaagtgtgcaactacagccgagcagtattctgcatcgcggccagaagtgtcctctgcataagcaggagcgaccccgcacgaatgcagggcgagtgtaaacgcaatagctacgagtttcttgaacatactaaccctcctcttggtctgtctggggaacatccggctttgggtagacgaatgtctctggatacttcatgcatcttagctcatctttgcagaacccgtcaatcaatttctcatgtgcgaattccgcagccttgtagtagcgattagcctgtcttgcctccactcgaaggaggtggcttatcgtgtgagcgttgatattactaagacttgcaaaaattgtcaagagcttttttgcagaaagaggaatcgacctttcatcgggtctgtaccagtccagccgggcaactccttggagaacgtcgtctacccacaacgggtagtctccgtctagctcgaccatgacttcgtacatttcaggctgaacagcgttgaaaaagaaagagggctttcgccctctgctggtatctagaggaggaacaagccccctctccaccttgtgaatcaaccgatcagcattcgcccctatccgagactttagctcctcgatctcttcacatgtcaacatacggagggcacaccttagatttctcgatagtgaacacgccttcgcatgtcaggttagcaggtccataccacttgaacatgttgttgatatcgtatcgaatcaactggcggaacttctgcccgtcgcacatatccacgtcgaaccacgccacgacccatctgacgtaatcttcagggtcgttctcttctcgccatctgcactctagatcaacgtgactgggctctagaacgtaaatgtcttcgaaccctgtactctggttgttcttaagtcggatgattcgagcgcgaatccattgcatgcacctgcggtttgggtctgtgatatcgcagactaccggaacctctggaacctcaactgtatacatgattgtacctctatttgttttacaagaacgccatgattctgtctctgtctgcatggcggtacagattgaagcaaggcacgcctctagaggacgccagttgccaagcggtcctagtcccgccttctggaatcccgttgtggtctgtcttgctccagcacaccaagaacttgctaggcgtgttgagatcgattcccagcacttggaaaacgttccgagtgtgggctcgtcttgcgaacgggcttagaacggacctcccgtcatttctgacagagttccaagccggatgaatttgactggcaatgcctttagcttcttcccattcagccggcaactcttcctctggcaggatggtagctccgagcgtctccgttatctggtactggttgaagccgggagacggaagatagatttctgccgtagttcctcccttgttattggatatataatccagccagcccgattcgaacgctgagtccgctcccttcgctcctcctgaccgaagaataaaaccttgttctgccagtttacggcctacctctcgaaggatgccccactctctgtttggcgtatccctacttccgactcctgtgtaatacttcataagatcaccatttcggatagctcttctggtgttacccattgatgccggtattctccgttcttcgggttagaatattccaatagaacagggtaatactcgtctcggtaatcggtgtctataacctcgcagttccaacctacagggataggacaagaacgccccttgggggccatcttagttccaatagacaacctgccttgactagccgcctcattgacgcttatcaggctgtatctgtgttttaacgcttcaactaccttgacttggaggtctaaaagttcctcgattgtaaagtggcttacatcgattgtcatattactccctcccttccagtttcttgaattctttgtccagcttagctagatgcttatccaacttgtctagctttttatcctgataaagctggaaagcctccgagcccggggccaaccaagtccccttatacttaattgcaccccggatcatatctcctcctattacagttcgtaaacgtatacctgaaactggccgagcgtctcctcgataagaggctcgacattgctccagtcctctccggctaaaccgcagccaatcttcggcagacctacacacaactccgaggtaggaatcgcccgagcgtcagcctctgcctcaaggaacagagacatagtgtacagggcttggcccagtgcgtcaagctgagtgtagactcgtccctcttctcggccatagttgtactgcccgtacagattgtaaatcgatccatactcgttaattgtgaaggtgagggagccgagtttgcctcgatcccctttcaccgttgcttggtctgcctcgtaggcctccgggaattgctcccggatttgcttagcaatgccgctgcccatggtgttgaagcaattagcctgatgtgcaatagcgtgcaactctttgtttttgaacgcggcgagcaggtcgccctttcggtatttaatcatttgaacctctctacacttgtgaatctgacttcagagcctctcgctccgtgagcaatgtccgcgtacattgagttaatggcagcaaacggggaccaatactccttctcccagattttgaacttgaacattttgtgccctttattttctgggcgaccttgttcgcagaaggttgtaaagtaatatttagctaacacctttatcctccttatactccgttcttaatccgataacggatagatgccaagtcattgttcttcaggtcttcggtgtcccatttcccgtctttgaagaacgtccgcaaggaaccagtagcctcctcctcttcagatacattatctttcaactggaggaatcgcccattttgcaggtctcggtacactttcaggaggcctttagccgacttcttcttgctgtcagttttcgggtctttgaagattgcaatgccttcaccgttcacttccgtgtaggtagctttcactgcgaatccgaaagtatcccgggtgttgcactggtaagtgtaactgccaactccaaacactacgttcagggaagcgaaacctttctccttcaagcgctccaagattttagctgctcggcgagttgtaatggaatctccatagatcaaaccgatatgagaatcgagcatcttatagcctgcttcgttcacagtaccgccgaaggtttcccacagaacttggatagctcctttcacctgcgcctcgctcacttcttcaagtttatagccaattacatactcgtattgatcccactcagtgggaataaccttgaagtacttatcttcaaagttcagaacaaatgcatcgtttccatttactgcatccatgatatcccagtgttcgagcgactcgacaacttcaatatcacccagtccgcagataacctctacaggatcaccagagtctggacgaacaaccagcttgccgtcacgttccatgatctgatccttgatggacggcagaatgtcagtaagcacgccccagaagtcgaagctgtctgccacgtaagacagaataccactcgggaacttacccatcagttcaacaaggaatcgacgttctgcttcctcacggccacctttaccttctccatccttcatttctttctcaatgcggaggatgttactagtagctacagcgtgttcagtcgcaggaacggagcaagctaccaaaccagtcgcgttatagtagtcctcagcataaatagctgctgccaatgtgtccgaacctacgaacgaggtcaagtgaccaacaccactacgggctgcgtcttcgatcccgctcataccccgggcactgaagtcgtggaactgaacggacagcaggaagtcgtcatagcatccagtgtgattcgcgtagtatcggcccatagctgcgtattctgcggcgatagtggcgttagtcgcggtcttccaagtcatagcagaaatcagtgtttcgtggtagttcactagccagtagaactccggcagggtgttcttgatggtgagaacaggcacgcccatcggtacactgacgccttcagtcagagacttgacctccagaggcagatagccgagcttgtgtagggctcgaagctgctccacagcctccatttcccggccaaaatagccagtcaggaaccgggcataccggccaacggcgttctcttcttcagccgcgaagaagccttcccaagactctacgatctccatccaagcggcccgtccgccgacccacttgagagtgccgtcgtagaagtcggtggcatgcgtctttcgataaatcttatcggagcgaggggtcaggttgctatagacaagctgagtcccttccgagtacatggaaccgtgtccaatcttataaccatcggtggaaagatgtggcagaattttcatgttatttcctcctgttgtgttgaataggcccagactacatcaatctgggcctcctgtcaatattcgacttcttctactggcagcgtcagcacagggtagatgcatggaaggcgcagcaatggttgcttcttgctgtggaagtcttcccaaaacttatcgtgcatcgtcttgtaccgagcgtccagttcctccttggtgtcgaactcctccaccttgacaaccctcttctctggagccgaacgcttatactctacaatccagatactcaagctcacaggcgttccgccttggagtattcaaccggaatgacagtcagcgcttcgtgctctttttgagggagcgtatccgaggtgtagatgcatccgaaggaatccagcaagcagtcgatacccttactgaagattccatgagtgacgaacaggtcagggagcactttactgtactctcttagggccttagacacgcttcggaatgtagcacctccgtcacagatatcgtcgatcaccagaagcggaagttcaggatcgatatccgaaggattcagaatttcaaagccttcgattttaccggtctggagatcgcgcttcttattgcaacgaattacagcggctgctccggccttctttgcaaaatcctcggtccgctttgttgctccgatatcaggggctacgagttgatattgctcccactctgaacggctcagtaggccaccgaagaccgaagattgacggacaacttcgacgttgttaatcaggtgcagagttgcgtcgctgtgagggtccacaacgataactcggtcatatccggcagagttcagcatgtttgcaaacactttcaaactgaaggcgtcgcccggattgcaccgacggtcttggcgagcatacgggacataacccagcagaagagtcatgtgcggattaatcatttctgctcggatcgcctcggtgacgttgagaagagccatgatatcatcactattctgaatctgagctttaacgtttacgaacgcatggctttcgatgccgcccacattaacgcccacttcgccgcccgggaacgtccacacttttgcctcttgccacggacggctcataacaccttccatttcctgaaggcaacctacagcataactaatcatacatcctcctcacagtttcacagagaagcgattccgcattgcttccatcgtgctctcgggaacatcgtgtacagacttattcccatgacgattctctacaatcagagagataacagtgtagccaaactcttcagccatgtcaatgtatggtgctacctctcgctcccgggtactagtattggatacgataaccgcatctagtcctatctccatagaccgtcgcgctttgtccatgcactttttgtgagattcaactaccctctcagctttccacacatacttgccgaactccatttggtaatcgtccgcttcgcagatagacgcctgccggcctgactcccaagttttgttatacagaatctcggcaagagaggacttcccggagcccgggagtcctcgaatgatatacatgatcttttcttgcatacttcctcctttaaattcgagccatatcgaagtaggtttcgatcagaagtcgtcgctgtgcatcggtcatttctgagaaccgagcctcatccacttcatttaccaagaagtctaccagaggatagaactcttcgtcaagcgtctgcttgaatccagccgggtcttggtacatcgcattgaccttcttactacccatcctcatgataaacttcttgccgaggtagtgagttgacttgcacttcactgtccctagccctgtttgtaccatgtaaccttctttctcacaagaactcagaagaccctttgcatgttcccagctacactctatgtgctctggacgaagaatctttacagaactgtggtccgttacacctagggcgtgagagtcaagaatatattctgaaagctggcccccagtgaagatatcgcggataccgatcaaatatgccccttcttcttcctcgacaatgtgagggtcgtctggagagcatatctcgaagttatatgtgaagcctgcgatgtaatcatctgggttattcgacacatacttctgaccaagggcaacgtaatcgccggtcaatgaccccgtagtactgaagataagggagccattgtgcttagtcacggagaacatgaatccattcactttctcaatcagccgcacacggaatttaggatggaggaaactcccagcaccattctctcccagattaaacaccttctcgaaggggcgtacaatacaatcaccggagtgctggtcaaatacatgaccccgtgcctccagaagaagcgggtgcttgttccacaagttgtcgtagaataccttacgagcgtatttaataaccgacataccgttgaagtgcttaacagtcaccagcttattagcgatcaggtctttgtacatctcaatatggagtttaccttccatcctattcctccttattctacttctacaatcgggcagaatttagacttcttcgctttcaaatacgacaagaaaatcccatcctttttatcgggcctcttagacatcagtcgagcgagccgatagaagaccgatacaccatagaatacagccgctacggcaatccatataaaccccataatagccaaagtcccgcctagaatgtagccggtcgcgggtccaagtagcagtgcatacaggctggagcctataaccgatgcaaatgcgactgaactgagggctagccacactacaagaaagaccgtttgccagaaataagagcagagagtaacgctcttccatccgctggaaatgtccaagtaggtaggactttcgaatttacgatgcaggcgcatatgccacgaattcttattaatcttcatgcttgttcctccgggaagatgttgaaattgagtacgttgtgctcttcgagttcgaaagaagctaccatcttgtagcctccgagcttgtcaacgatctccagtatactctcgatagagaatttgtcaacatgctgcttcatcagattagagattcgactctgatgagtaccacatctctcagctacttcccgctgagtgaggcccgactgagaaatatagtgtgcagccactgccattacagcctttttgaaatcttgaactgggttgctcatgttaatcctccttattactcagtgtaatttttccgctaaagactcgaaactggctgatctcgaactggtcagtccagcgagcgtcttcgaaagccactccttcgaaagttccatcaaacttgacgtctgaagtcatcagtacaatgaaaggcacgccttcatcgtggatcagctctacaagagtattagccttgggtgtaataccgttttcttcacgtgaaatcaacacattaaccatattatcctctctgtccgtcatggtgatctactaccacaaattcttgattccgcatgtattctctcacttcatcgtaagagaatacctgatgatctgggtgattgtcaatacctacatcaagcctctttcctttggaaggcaagctgccgtgagtgtggccgtgtagatgccaagcaccatgatgagcagtattccacgtctcgaaagggtagtggcacatcacgatcttcactccgtcaattcgaatctccttgtactcacgaatgtcttctacgtgagagagattgctatcagcgatcaacttccacagacgagagtcgcaatggtttcccttcaggaaggtgatacggccattcaactgcttgatgatatccagcacaggctggagcttgttctttcctgcaaatgcgaagtctcccagatggtacacttcgtctacccgacctacccgggagttccaccgagaaataagctcctcagtttgctcctcgaaagtccaaggcctgttgcagtattcgatcacattcttatggaagaagtggagatcggaagagaaaaatacagacattatgcctccttttcaaattcataaatcttgttgatcctgcggatcagtcgaatagcagcccctcccagcagatgctctcgatccggtttcatatgggccattgccttgaactctgacagcatatctcggcgttcatagtggaagtctactacccagtaggtgtctgcattaatcttaccctctcggtacaggtgcccttcaacaccaagccagtggtctactgcgtctttcttcagtaactctttcggagaccacttgtctacaccccgcaacttctcgaagaaagagtaaggacgagaatagttgttgatggcttcctctacagccgactcagcctgcaatttaatgaactcccatcttgcaagaacttctttaatctcctcggtggtggctggggtgtagctgtactgctctttatattcattccacattatactgttctcctacgtagcctttgaatttgtcggaacgggttgtcttcttctgtgccttgttttccagaaccgatgcttccctttcgagcatgctcagttggttgctatacttcttgatccgtttcgcattgccactcatcacagaatttgtaagattggcaatagtgtcgcagattttaacctcttttgcaaccggatgattacggcaaccctcgatatacttccgatagctttcagctcggtttttgtcaagaatgaccagagcctctacgatatgcggcatcacgcccatagactctaagtcctcctctgtcaggtcggtatcctcaagaacgtcatggaggaagcagaccgctagaagggtgtccatgtacggaaagtccgagaaggcctgattcgggtccatatccttcggagcattacgtgctacgcagattgtatgcacttggttcagatggtaggcatacggatagttggtctctccataccgctgaccttcatgggccgagagtgcgatctcgatagcaataccgagctgagttttcatgttaatctcctttgtagaatgtgtggttgcctatcttgatggtacgcttgtacttccgagcccaccgagggagcctgccattattggctctccttacctttctctcgttcaggtagtggtccgctcctcccgttggatcaacagtatacccatacagagcgttgtatgcaacatgttttgctgtctcccacttgtcgggctccttgacgccctgccgcatgctaccatcgcaggtgtacgaatattgacatttgaagtataacactccagctacggtgctgggccacctgtcgtgctgcatcctgttgatgacggtatgagctacagcaatctgcccgatttccggctctccacgggcttcgaagtagaccgcttctgccagcagtctgcaaggctttctgtactcgcacagtgttcgcttgctttctatgatttgagcgggactggcttggaactccactacaggctccgtgccgtattttagacgagagtattccatgtcgaggaacatcccaatgaaggctagaaggatcgacaaaacgagagcttctaaggtttccataacacctccttagacaaagaagcccgccttgtgggcgggctgtatatcactcggctattatacttcagcccaagttgtaacgacgggcgtagtctttgttggggaactcgaccatcatcgactgaatgtgaatgttgcctttacgatccttctggattttggcatttttcacaatcttacaggcctgcgccttagccataagctcagggcttacaaccagatcgatgaaccctgcactccgatacccgcatccggcaggggcccagaagccgtgctgggtcatcgtcgagccgggaacgaggtacaggttgtgcagacgcacagcagtgttgaaactcagcttgctgatatgcttcgcttcccgagtttgggtttcaaaacacccagtcgtgtagttgaatttgtaagtgagagcatccatgaactgaatgacgcttcgaatctggatagcagaagtatccaagagctggaactcctcagccgcgtcgattgcagtggtcacgttgacagacttagcgttgaacattttatatcctccttattcttcagggacaaatacaccgccgattacccagccagcgcgaattagtttaccagttgggaactgagcacgcaaggtctttttgaaacgactttgaatttgcacagttagccacttaccccggtagttctcaaaattagtgatctgatccttgcgttcgtcaaagtcaccgtacgtcacttcaagcagctcttgaggtacagggtcaaacaccaccagaacagcgttcccattcttgtctaccacgtagttcacgatctgcatttccatatcgaagaactctttgtacttctggagaccgctggagcgcttaccagattcgtacaagccctctgggctgcgccacatgataccctcataaccgttctgacggtacacgtcgtgaagacgtttgaggtcttcgaaagtggagcagaatacgtactcaacgaatcgaatactccccagatcactgtgtagtgcagactggaactggaagtctaccagacgctccttgaatgtcaagccttctttcacgatatcgaatacgtgaaattccagtcgctgccgcagtccgtaaataaacgatgtgctatctacttccttaaggagccgatcatactcctcctctccgtcttcaataggataggcgtccagagctttctcggccttcatccacttgtcgtaagcatcctcccgcttaaccgcagagttgatatcttccagcacctccccatggacgtacagttcgccgtcccacacatcaccctcttgcatgatctcttcgagttctttgatgatgtgcggtacattgtaaggtttacccatgcgagacgctagcgtaactacgccattggctttcttagccatgcaacgcaggccgtctagtttaggagagccatacccctctttgtatttagcgggatcaagcggttttgcgagcatagccataacagggagatcgttgagttcttccttggttgcacgataacccttgtccaactgcttgctcaccttggactgagcctcagacacggcctgctcctctacagagcgtttctgcttaccaactcggatgttggtaacctgagaggtcatggctccatgttctttgccgtatttcacgacgatattgaagctaccgtcttcctctccgaccacctctacagtccactccttgaacccgcctttcttgtcgagtccatacagtcgttgaaaataactcattgatcctcctcgtatttgatgacaagaacatcattctcccgtaggtgcctaagaccttcgtcgagccgatattcgtgcttatagtacactactttgatcccagcttcaaccaccgagatagcacaatttttacagcaagagtgagtgacgaacagggtagccccttgggcactctcagggctgcgtataagggccctcagtgcgttttcttcggcatgcctcacctctgccttggttactcccgtttcgtcctccagcggcccgtttaagtgctctggaagggcattatacccgcaactgatgatacggttacgttttactagaactgcaccaaccttggaacgagtcgagtcgctgcacttagcgaaggcctcagcggcctccatgtaagctttaatatgcttaaccttcacacctagcctccgccgacgaggacagcaatctcctcgtactcttcagtggatgcgaactccatgtaatagtcgtccgtatctgacaggtaaacaacgataggcggataataactccatacagggtctccgtgttcgatttcagctaccctcacattgccatacactgtgcgaagagtctgtagagcttcgatcacatcgtcaatacgcattacagttggttcagtcatacctgcctcctcagttttctactttacaaacggcatcgccgcgtcgaaggaacacttgcactgacggctttccgctccacttgtcccacgcttcagctttaacactgacagtcttaggattgatggcaaccacctcgcctaccagcataaccattccagttccgcctaggcagaatgctactgcgtcgccgatctcgatatcccttcctgctacgtccttcatttgtactctccatctacacccttgattaaaataacgaagtccgaggggtcatcactgccgtaggcctttgcccgaaactcctgctcgtatttattcaccgcctccggatcacttttaacctcaagctcttggtagaggtcttccataaaccaacccaagtccgtggtcgcagccgaagccgagaggtgaccaagaagtcctaccagcatattgatctcgtcgctctccaactccaacttgtgaccgttacgttttactactttcatatttcctcctatcgcttctgtccgcgacgagtggctacgccgtaagctggcttgctcccctcgcccgtgttgtgtttcttctgcactcggctggcattgacggtgtaacgccctttgccatactcttcatctatccacgcttgggccttagctcgctgagacgtgtggacaaagatgtagtagccagatgcatccttgataaaccaagtggccgggggctggaagtccagacgtgaaaactcttcatagtcgatcacagtcaccttctgcttagccactgtatactgccccactaccgactcttttgcaatgattttatcaatcatctgagttgaaagatcagagttcttcgaggtcaatttctacctcctttcctagtccagtatctgcaaagaagctatcgagactcagagcgtggtattgagacactttgtaaccaccactcttcagaaggctgtgagcggcctcctctactttgtcctctgtcagtctccagtccgcacctaggagtacttcagctaactgctctacactcggagggttcccaatccacagacccattctactgtcaggctcgtaatcttcttcccatacaagttcccacactaggttactcattggtacacctccttcttacgaatagaatacataacccactcgtcttttcctgtcttcccgcacggaatgtctacttcacactctgcgtttacaatcaggcccgctacgatgaaatcaagaagctcctcgtctggctctggtaagcccgggtaggacgatacaaccctgcggatagtctccgatttggtattgcccagtaccccaagcatgtggaggtcaaactctccactgtagtcgtcccagagttgtccaaatatcacccatacactattcatacctagtaatcctcctttagcttgttggtgtccattaggcagcctccttcttcttgtccagcaacttcaggcatcgtttgcaggtgatatgattgcggtagcgggagaagttcttctcctcgaagtcgccatcggtgccacagaagacgtcatatggttcttcactgtccgcttctgtgccgccgtcccactcgtcgtagtgaactgctcgcgtcgccattcacttcacctcgattccggcttgctggagggcttcgacgcactcatctcgataagcttgaaggtcttcgtcgaatatgactctcggcaggtccaccctcagagccgcgcggctggctttccatgcctgccacatcagcgagtagcggtgtgctgcttctataagagccacgtatacgtggacgttatcggtcttcacaggaaagtagtcggtgttacgccactcgacaccgccgggaatcgggaaacagttttcgaactcctctctcatactccgcaatcctcctgaatttctttaagaagctcagagggcataaccgacagagccagttcctccagagcatggatgtaatcctcgacatatttccattcctttctgatcttctgaaggtacacgccttctttgctgttgtcgatagcctgaccttccagctcctgcatcagttcgaacattttgtatatcctcctatggccgcaaaaatggccggcgactactgtcccggcctgatgatactactctgaaatttcttccattgcaagtcgtttcttttcaaagaaatcgctgagcttgtcttctagctcttcgccaccgatgtaaagctcttcccctgcctttacacgctctagctccttctcagtcaagaagtcactgtagacgtgatctacccatttatcgcaccacgctgagctaaacgctgcattcctcaggctattcctgaaatcagcagatacaacgccaaaagaaggcgcgtggatcatgaaatatgtgaactggtcgatctcaacggagtcgcaggctagcgcgatggcagtcatggcagacgcacactcaccttcgagacgagcatgcactggagcttgacactccttgatcgctcggattatagcgttggcggtctctacctgtccaccgcatccgttaatggtgatgtacacttcatcattctgacctgcattttcaagggtccaaagctcctctgtgagttcttcgaggctctttattacgtatggcagaaggatggagtaacgattgctaacactttgtgtacatgaaacaggcataatacctcctttacaaaaatgggcccgaaagggcccttattactgaatcactcctcgctttctttctggccagagcccagcattgcaaagaatggaaggaggattgtgctcagctctccgctgacagcttcaccaacttctgcaccagcctgagctacactcaggaactcttcagtgcgtacaaacttgtcaaccttaacgagggttttaaagtctactcgttccaagaacgcagcgccggctgcttccgccagaggttcgaggtttacgacttccatagcgcgatccagagcttcctgattgatctctaggccgttctgtgcggcaacctgcatcagggtagacttcacagtctggattgcgtagtctttgaaaaactcacgttgtgctttgttaaacttcattcacttttctcctttgtagtacgacgacggcgggtttttggtttatcttccgattcagtctcttggacttcctctacaggaacttccttagctacttctgtagccttttcctcagtctgcttctctgcaccttctcggaccatcttgacagacttgagagcgaaattcatgttagcgaagtgcgggtcttccacatcaattcggaagccttggtcaaaggcgttctgcatgcccatcagaagactgaaaacgtcccattcttgcacaatgacttcattgccgtcaagctctttttcgatttcctcagaaacgccttcctgacggaacatctggacttgacagagggtgccatacacaggatagccttcgatggagcggacgactcggaaaccttccttcatgtgggcgtgaatcgagcgaagccagacgatagggttgtattctacgatattgataacttgcatattctttttactccttgcgggttagtgttttacaataataccacgtttctcaggaatgtcaacccattttgttctggtagaggcttgacatagaggaaatctgtggtattatcaatattcagcgtgggagagatatgtctgaaagcactcaccggcccacgcctagcgcctatgaagaggaatccacaagggcaacctgaactcgaatgctgttaaagggtggagacgacgcgaaagcggaatgacagcaatccgatgcagcctacatgctgcccctcaccgaactcatctgcatgagtaagaggaattggatagagccaaggcacgtcttaggcagattaaattctgtatggcgagccttgggacgactctatccttccctagccgaatctatctgcatggggtgttctcctgatacacatacacaaatacccaccacagataatccatcaatcaacccataaggaatttctatgagatgtaagtgctgtgatagcgaactctcgtttgagactccagtcatcaataaacatactggtaaggaggacgatctctgctcctcttgccgtaggtttgctctcaatcctacactggatcatgagtattttggtggttggtatccaagcgaaggggttaccgctcctctccctaccggggactgacattgtatatagagtgcgcgtactctgacaatatgtataaatagtagattacggtgcgaataattctttaagggcttgacaacaggagatttcgtgctataatcggagtatatggggcttacaaagcttcagaggatttaatatgactcaagaaagaaacaagggcggtcgccctacgaatgccgagctagaagcccggggtatcattcagacagacctgaaagcagggcttagacttctaaagaagagctttgcagagaacatcagattcctccaagagcaatctgacaacccagaggtctctctacagatgagaatcaagctcaagaaagagctttctgacatgttcgtcgcttactacaaagctgacattgcactcaaaaaagagcttgcaaaaggaacagaatcaggagataatgagaactctgaagaggacaagactcccggagtcgttctcgcgttttgattaattgccgcttcgttcaatggtaggacgccagactttgaatctggagatgatggttcgatcccatcagcggctgccaaatgtagtaaaagaacattcacccgacaaggaatgtgtctcgctcagaggacagcgagtaataagtgtcctccagaattaagggtcggtgagcgtaattggcaacctactggattccaaatcctcgtattctctgttcgaatcggagtcggcccgccaaattagtgttgacaggagcaaagacctcttgtatagttacaccaactgctcgtatagtgtaatggacagcacaacggtcttctaagccgtaaggtctaggttcgaatcctagtatgagcgccaaattagatggacggaagctaaagtggataggcatcgggcttttaaggaggagatatgaagctgtgccctcgctgcacaatcgagaagccagttgaagacttctccagaaacaaaagaaagaaggatggtttacagacatactgtaaggaatgttattctgccatcaatgcagacacgtataagcgtctacctaaacgtaggtccaagatactacaatcgaacaaggatactattgcacgcaacagaaagttcttgggaaggttgagaagaatgtttggttgtaggttttgtggagagaatgagcctgttgctttagactttcaccacatcgaccaaacacaaaaagataccgaggtcgtgaagcttgtttcgtacagcagactcaggctgaaagaagagattagaaagtgtgccatcctgtgttcaaactgccacaggaagctgcatgctggtattgaaggatatgagattgtagtttagcgtctgcacacatgtctttttaagtcggattgcggtgagttcgagtctcacccgttcaaccaaatttagtgagtaaatcagataggttctgaggctccctgctaaggagtacgtctgctaacgcggatgtggatcgagaccactgctcactgccaaaataagtgattttaagtgttgacaaactgaatttttcatgttttaatacacttatcagatgaagaaacaattagcgagtagccctgagtaggtcgggaactagtctagaaaactaggccactgcgatgagcggtgagggttcaactcctttactcgctgccaaattaaggccctgtggtggaattggtatacacatcagtcttagaaactgacgccgagaggattgagggttcaagtccctccggggccaccaaattaagaatctcttttgctatttggttagggttcgagtccctacccggcgactatggccggtctatggcggccaaatagtgagagagctaggggacatgacgaaggtagcgctgctttccgatctccccggcgctataaaagttatcatgaaggggttgacaaacaagaaattcatgataatataggtacatagagtaacaaacaatgtagccgggtagctcaattggtagagcacccgaccgataatcgggtggttgaaggttcaagtccttctctggctaccagaatttaaaggcccattagctcagtctggactagagcaagcccctgtctagggcaaggtcgtcggttcgaatccgacatgggtcgccaacaaggtcgttgtagagatagatggctactatcatccggctgtaacccggacgccataggctagaggttcaattccttccttcgaccaccaaatagcgagagcgttaagactggctggcgctgtcactcggctcataaccgaacacaagtggttcgattccacctctcgctaccaaattgcactccgaggaaccctaagtggtgggttcagtgtcgctacctatctcggtaaggggaagcgcctaagctggcacgggtaattgagtagctgtgataagctactggcagccagtataaatcgtccggctcgggcccgttatagctcctagatttgaattagatgctgtaagccataggaggtgatccagtatctcccggaggggcccgggttaacaacctcatgaatttagcccgcgttggccgagaggtttaggcggcggattgcaaatccgtctcacatcggttcaaatccgatacgcggctccaaagtttattgggatgtagctcagtggtagagcagggagctgttaactctcaggtcgcaggttcgagccctgccgtcccagccaatttccaaaagagactcttcgctttagaagcagagtcgaacgcccgatacgggccttattatctcctcgtagctcagtctggttagagtgtcggatttggaatccgaaggtcgaaggttcaaatccttccggggtgaccaatttaaagcgggtttcgtatagtctggttattattcttggcttccacccaagagactagggttcgaatccctaagcccgcaccaaaagtcgtagacctcagtaacccggagtaacgcccgggagaagatgtgagttctacgtatacgcgtctgaagctaactaggtagaagcaccgggttgaaattccggaggacttggatcgttaccaagcgggcgcaccaaacaatgcagttatagattaaatggataaatcgccagactttcaatctggtgttccgggttcgatccccggtaactgctccaatcaagtccaagccggaacattcctccgtatgtgctttcagccggcttggcattatcagtgtggagattgtgcagcccggatgctgccttccggttgtgacccggttgttggggttcgagtccccgcctccaaccaatgttgtggaattgaatcacaggacgacgactgggtgagattgagcgtcctctagcccgaaagggtgttcgcgcaaggcgaaccgaagccgaaaggctgaagtggtgcccggacccacaaccaatgttgtgtaatggaactattacgttgacgctgtgtgctctccggatcgtaagccggtaaagcgggaatagcgggctcccgtagcagagtagtagtgtggttcgattccacagcacgacacctttcctcctcgcctgtgctgaacggtttcctcctcctttcccgtctcacaggctctattccctgccctttaagcatttatggtgatgcaccggctttgtaacccggcgaattctgttcaagtcaggaatggggcaccaattcactatcaaagaacccgcaagctcccgatagggttcacactctataaggttgtagcatggaaaacactaaggttcctgataaaaaactcggaccaatcgcgctagcgcttaaagaggccagagagaatttcgatctcagccctcatgttattggtccaaaatctttcaaacagaaggagttcacagacagcgatgcaaagatcactgtattcggtggtgctgctggtgctggtaagtcttatctcggtgtaatggacttcatgaaatatatccatgatcctaacttccgaggtgtaatgactcgtcgtactactcctcagattaaaggcccgggcggtctgcttgaaaaagcaacagacctattcaagctcgttgaccctaaagtcaagtggaaagacaaagacggcaagtttgtgttctcttctggtgcagttattttccttcgacacttcgaacaagaatctgacaaagactccttccaaggttgggaggttagtaagttcctagtcgacgaaggtcagcagttcacagaaggcatggtgacataccttatctctcgtatgcgtaacccgaaatgctcggttgttccgcacatgaagattacatgtaaccctgattacaattcgttccttcgtaaatggattgaatggtggctagaccctgacacaggaatcccgatccctgagcgctccggcgtaactcgctggtttgtacgcaaaggcggtaagatgttctggggagacaccaaggaagagtgcattgcccttcatggtaatcccagtctagcgcctgacgatgaagatcaggtgaagcctatcagcttcaaattcatcgcggctaactgtttcgataacccaatcttgatgctcaacgaccctgagtatgtagctaaccttgaagcccttcctagggtagaacgtgaaaagctcctagacggtagctggcacgctagagaagagggagctggatacttcacaagggactggtgccaaatcgttccccatccgcctctacgggtgcttaaaagggtacgtgcatgggacatcagcggtagcattgaatccgaaaccaacagaaaccccgactggacagccggcgtgctgatgagccgtacaaaagaaggcttgttcactgtcgaggatgttgtcagagagcgtaggttgttcggaggtgttttcgacctcattctagaaacagccaagcaagacggtcaagacgttgaaattcaaatcccatgtgacccgggggctgctggtaaagcttatgctgcacagctaattagagacctagcggatcatggattccacgccagaccgaagacaactaacaaatcgaaagttactcgattcgccccgttcgtatctgtagctgaaactaaatcagtgcaagtcgttgcgggagattggaacgaagattacttcgatgaacttgagcgattcgacggaagtaaggctatcaaagatgaccaagttgacgctacatcagatgcatttaatgctctatcccttggcagcttgattatccctgatttcctaccgcctgatatgactcaatccaacaaattcaaactaaattaataggaggcggcgatggccgagactgaaaagacagcaccgggtatcccgcgacttcgcctaggcgagattggtagtacaggccttaaacaagtcaatggtactattctggaagaacgccgaccagaacttcggttccctagggcatgcagaacattccaaatgatggcggaagaccctaccatcaaatcagcactcgatctcttcgaaatgatgatgagcagggttgactgggaagttgatctaggagttgaccccgacgaggctatgaaggcccggggtaaattcctgaaagagtgcatgcatgacatggaacacagttggtactccttcatcaaagaggtcactagcttctacacctacggattctccgtacatgaaatggtgtttaagcgacgtgaaggataccctgtatcgaagtacaatgacaacaaattcggtattaaaaagttgccaatccgctctcagtctactatcaccaaatggttgtactctgaagacggtagaaacttcctagggtgtgagcaaagtcttgccaatgttgtcaatggcgaccgttacgtcaacctaggtaataaggacggaactgtagagattccagctaagaagatgcttcttttccgggtcgatgctaaacgtgacagtcctgaaggtaacagccctctccgtgcgtgctataacgcttggagatatcgagtagagattgaagagcaagagtccgttggcgtaacacgcgatatgaacggtatgcctacgctctatctgcctcctcgatatatgtccgaagatgctacagaagctgagagggcagtctacgaatactacaagcgagtaattcgtaacattcaaatgaatgaacaatctggacttatccttcctcaagcgtttgacccagaaagccgacaacctctgttcaaattcgaactgacctcttcgcagggcagtaagatgtatgatacagatgccatcattcgtcgctgggacaacaaaattctgcaagccttgtttgccgatatgctgaagatgggtcaggaccaagttggctcttactctctagctggtgccaagactaacatcatggctatggcgattgaatcgcggctccgcgaaatcaaagacgtactagataataaactcattcctacgctgttcgcactgaacggtgattatagtccagacttgccgaagctgcaatacggcgagctagatgaaatcgatcttgaagagttctcgaaagggattcagagaatcggttctgtcggtggtcttgaacgtgaccgtgaggtttacaacaagattcgcaaagctctcaagattaagcctcgaccagacgacgagcctgttgatgtggataatatcatgggtggtcagtctcaagcaggtaaagctggagtaggtaatggtgcatcaacatccgcagccggtagagacaacgccgctgcaaataacgcataaggagacagaatgctgactcttgaaagtgttattgaagctctcagcaatgctttcggggctcccgccaaggcggaagaagccccggctgtagaggtcacaaagtccctagacaatgaaaagaggatggctttgtttgtcgttcttgagccccaagaaggcgactccacgactgacctacacgcagacacctactccgaagaggaagtagagaaagcttgcatcaacttcaatactcattgcaacgtagctaatatcttccacaagattgaaacacaggaagctgagattgtccagtccttcatcgctccatccgcattcacaactgacgacggaagagagatcaagaaaggtacatggctccagtggtggcacttccctgaaggctctgaagtagccgatgcactatgggaaggcgttaaatctggtgaattcacaggcgtctctatcggtgccagagctacagtcgaggatatcgaatgaccgtaaaagcaaaacgtaaactgaccgatatcaagtttgaacacgaaggtgctcatgtcgctctggtcagtaagctccaaggtggtgcagccaacgggcacactactctaatcacaaaagctaccaatggcgtaactgaagagcttatcgataaagctgctgaagttacagtcacaatgcagttccctgagttccttcgtaagttcttcgggatgtattatgaagatgccgaagttctctctgttgccatgggatatggcagaacggagtatccagaactagatcacaaagactggatcgaccagcgggtcgagtctatgtccattcttaagtcggtttataaatcggctgacctgaatcaagctctctccgagcttacccctgagcagaccctttcccttaaacaggatcaggaactgcttgaaaaggctctggaggtagtctccgagcaatccaatgaaaatccatccaaggagattaccaacatggaaactatcctgaaatcggcccacctagaagctctagctgacgctattgcagttgaaaaagctgctggtgtcgctgctgttgcagaagttcagaagcaactagacgccgctaatgtagagcttacagctcttcgtgaaattgtcaaggctgctgaggcagagaaaaccgctgctatcgctaaagcccgtaaagagcaactggctgaagtcctcccggctgaccaagtagaagatactttcaagtctctggaagttctggacgatcaagcttttgcacaaacagtaggaacgctccgcattcttaaagctgctgctgaccaaaatgacatgcttgtcgagaaaggtgtatcgggcgctggggaagaagacgactctgttgtcgccggtgttgccgctatcctgaaagctcgccacggctccaagtaatatctagccaatctagaggaattccaaatggctcaaaacattatcgcaaaagatcatcagcgtcttagcaactggctgaaagaagaacaaatgggccaccgtggcctgttctacactcgcgaaactctgcctgtcgctgacattgatgttaaaacaactggttctgtcctagacagcactggcaagctggtaactaaggctactatcgccgacgctacctacatcctaattaccgacctgcacgactatgccaacgctcagatgagccacgctgtcgtccttgctcgcggttttgccaagatcggctccaaggctgttatcttcggtgctgacgttgacgacgctgataaagctaccgtctttgaagctttcaaagccaagaacatcttcgccgttgaccagatcgaaggcgcattcgagaacgtcaccttcgcgtaagcgagggtcgttccagtaaataaacactaggagtaactttaaaatggctaacacccgttcctacctaaacgatggtcagttctacattgccgaccagactgaaaacctgcttatcatcccgaacacttggaccctcgtcgagaacatgggcgtcttcacaagtgaaggtgtgactcagaacactgtccagttcgaagagatcgaaactcgctacggtctggttaaggatgccatccgtggaactcgtcaccaagttgctagcgaccaacgtcgtcaactgcgtgccttcgcgattccgcacttcaaccaagacgactacatcactccagaagacattcaaggcaagcgcgctttcggtgctgaccgcgaagaaactctgaacgaggttcgtgctcgtaagctggaaaccatccgtcgcaactgggctaacaccgctgaagttgcttccgttagcgctatcgtaacaggtaagagctacgccccagccggaaccatcgagtacgactggtacgacctgatgggtaaaactcgtaaggttgtcggcttcgacctgaccaaccctaccgctgacgttatgggcaagaccgaagaaatcttcgtccatatgcaagacaacagccaagacggtctgatccgtggtgacttcgttgccctgtgctctcctgagttcttcactgccctgattaaccatccgagcatcaaagagttctacaaagcttaccaagctagtcctcaatactggcgtgaacgtctaaccgctcgcggtctggaccttcgcttccgtgagttctacttcggaaacattcacttcatcgaataccgtggcgttgacccgtacggcaaccgtctgatcccggctggcgatgcttacttcatcccaaccgacagcggtgacctgttcgctcgttacttcggcccgggcagcactttcgatgacctaggaactctgggtaaagaactgtacgctaccgagcgtatggctgaagaccgtcgttcgatcctgatcgaaaccgagtccaacttcatccacgttctacgtcgtccacagatgatcgttcgcggcactgtgaatgcgtaaagacttcagggaggcttcggcctccctttcgtcgtaggagggtaccaaaatggcttacactggtgatccagcaaacaaccctatcgaccgtctacgagagattgtaggggacgtgtgggagcctccgatgctttccgacgaaacctatcaatgggtgttggacaagaacgaaggcaacgaaagacgagccgcacttgaacttatgcgtatgatgctcttccgcctgacaaggggaatgagagaacgcacaggtgatatcgaagtatatggtgctgagtatttcaacaactacttgaaagctcttcagctcattctcaaagacccgaatattgcaatttctttggccgtgccatatgctggcggtatctccaaatcggatatgctggctaatgacctagaccccgacaacgtaacacgggaattctacatcggttttgcaagacgggagaagctttacaaccagtgcaaccccggtcctcaagaccttagcatggggtgtgattatcttggcaagcttcagttttaaaacagatcgccgtcgcctcacatccttgattaagagggtggaggctctagacggaacaacggtagaagttggtttcttccccgaggaccgatatggttctgaaaatggaaacctaccagttgcacaagttgcagcttacaacgaattcggtactactcgcaacccaacccggccattcatggctccaacctttgaagaattcacatctcaattccactacgcaagactaatgaagtccacgttcgagaacgtcctacgcgatggaaggcagacgaatactcttctgaagaaattgggtaaaatggttgcagagcagatgcaagttaacattgacgactatccgggctctaacagtccggcatgggcagcttacaaaggatttaacgatcctctattccatactggaaagatgcttgagtctgtcaagttccaaatccatcggaggcaataatgctctatcctaccttctccatgaccaacttcgtaaagctagatttgattagaagagggcagcccggagacgacggttttggaagacctacccctccagttgagacagtagtaacaatcacagctaacgttcaacctatcgaaaaatcgacagacactcgtatccttccagaggccgacagaagcaaggcttgcttcaaggtgtactccagaggcgaagagattcgacagttaaaggaaggcccgggagggtggagtgccgatagattcatgtgggaaggagagttgtatgaagttatgaaagtcatcaactattcgatgggaatcctaaaccattacaaagcaatttgtatgagagtagagaggaatagcacagcatgatccacacagagctagaaaactccctctatcttatggtcaaagagttgttccccgactggcgtgtaattcaagcttacacgaataatcaggaaccgcaaaccccttatctggctatcgacattaagaggctggatgaactgggaagggaaaatgtctccaatatgagcgatcccattagtccttcgcatggaactattcaagttcaacaggacttcgcagccaaagtcgtattcgaactgattggcaagtatggagagacagcaagtgtctctgacatggcaatggcgattactcgggcaatgcgtactccagcaggacacgccgcccaaagaaagtttaatctatcccttttcaaactccctagcacaagacgagttcctatgctaagagaaacagatatgtacatgttctatcaagttacatgtgaatttggattctctgttatagaaaccacaactcaagagtttgctgctggggctgatattcacggcgtttattacgacgctggtcgcccgggtcacattattgagtcccacatcgacataaacttcgaacactaataggagacaggaatgactgttcttactgatgtaattgacattcagatcagccgtgagactgctgctgtcgcacagacaaacttcaacgttcctctgttcatcgcttctcacacaaacttctcggaacgtgccagagtctacaacagcctgaaaggtgtcgctgaagacttcggagaatccgatccaacatatcttgccgctgttcgctacttcggtcaagctctcaagcctcgcagtctagttatcggacgcagacaagttccttctgctaccgtctctgtcagtgttgttcaggaaggacaaagctacgtccttaccgttaacggactacctgtcagctatgttagccagcaagacgacactgctactctgattgccacaggcctaaaggcagcttatgacgtaactccggtagccggcgtaaccgtcacagacaacgaagacggaactctaaccgtcgcttctaacgaagactggagcctgaaggtttcttctaacctgactatggctgctgctccctctactgaaggttggccggctgctatcacagcagttcaaggagaaaacgacgaatggtatgctctgagcattgacagccacgccgatgatgatatcatggcagtagctactcatatcgagggcaccaagaaagtgtttatcggagccactgctcaggctaacaccaagacttccgcagagaatgacattgcttctcgtctggttgctgccgggttccaacgtacggctctaatttaccatccaaacgctgacgctcaattccctgagtgtgcttgggtaggataccaactgcaagagcaaccgggtagcaacacatggacccataaagctctagctgccgtagatgcttaccgtctaaccccaaccgaatctaccaacctgaagaacaagaacgttaccacgttcgagcgcgttggtggtgtcaaccgtacattcggtggcgctatggccggtggtgaatggatcgacgtaatgattttcgtggactggctggaagcccgcatgaccgagcgtctgtggttccgtatggctaactccaagaaaatcccttacgacgccgttggtgcaacaattctggaatcggaaatcagagcccagcttaacgaaggaattcgtgttggtggtctggctgaagctccggctcctaaagtcttcgtacctgatgttctatccatgtctccgaacatgagagcacagcgtatctttgaaggcattgaatttgaagcccgtctggccggtgccattcacttcgttcacattcgtggaactgtgaccgtctaaggacggtccttcccataaggagattactaaatggctgttcaacgtctagcgacattctctccggctgatgttaccattgttattactcaccctgcaactggtgagagcatggttctcggcggattcagcgaagacagtatcgttaacattgaaagaaacgctgacacttacgtgatgtataccggagccgacaacacatcgactcgcgtctacaacgcctctaagtctgctaccctcactgttagccttcaacaaacttcgccttcgaacgacttcctgactgctctttacaactacgacgacgcccgtcgttcgtctgagggattgttcacaatccacgttaaagacaactctggtcgttccgactacttcagtgatgacgcctatgtcggtgttgttccgggttctaacttctcgaacagcatgcagacacgcgattgggttattcatgcacacaacctgcaaactctaatcggcggtaacgccaagctgagcccgggtgatgcggatactcttcgtaacctaggtgtcacactagaccagcgctggctgtaatatagcgcttatgccacatcgacggggagctgccttaacgggtggctccctttgttgtttctggaggatagaaattgattaccacctactcgccgcgtgacgtggttgtaactctcgctggtatccattccgtgacagggtacgcagagggagagtttatcagaattgtaaaagatattaagcctttcatcaagcacggttcgatggatggtgaaatcgcaagggtctacaacaaagaccaaggctggcgagtagagttgacaatcatgcagtcctcgccgaccaatgatatcctttcgatgctttacaacgtggacattgcaacccgaatgggaaaattcccactgatgattaaggacacgaagggttctacaagcttcctagctctgacagcatgggtggaagacctacctagggtatctttctctggacaactggagacccgcacttggattctagggtgctctgaggtcgccatgaacattggcggaaacgtcgatcaaagtttggtcgagcaagctatcctgctgggaagctctcttctgccagcccttacgcaattcggaggcttctaatggctaacacggtattgacatatagcccatctgatgttaaaattgtcctttgtgggtatgctctcactggtgtagtttctttcgaaatgtcttggctttcgagaccctacacaatggttcgaggaatcagagggcaccacacccgggtcttcaatagagacctttctgcgcagattagaatcgaggttcttcagacttcggtgtctaatgatgcattcttctcgctagtagagcaagaccgaagaacacaatccgcccgaatcaccttgtctgtcaaggatacccacggtagcaccatgatgagcacagacaacgcttatgtcaatggctaccctagcataacattcaccgatggaatcgagaacagggtctggactattgatgttctggactggaccgatggcacggtaggcggaaaccagcaagtcggcttcgacgtgtttggaactgttcaaggcgctcttagctacctcagataaataaggagtatttatgttcggaaaccaacgtactgtcatccacaatgggacagaatacactatcaaccttctgccagcaactcgcggtatcagcgtactgaagcagctaaccagcttgctgggtccatcccttgccaagtatcaagctgaccacgacttctctggagccatgaaagaactgttcgataacatcgacaaggttcctgttgagaatttgatccagaatctgatgctgacagttttcaaaggttcgatggcaatcaatttcgacaccgaattcgctggcaagtatgacctgctgtacgcactcacaaaagacgtgatcgagttcaacttcggctcggttttttctctaatcggtttcgcagaggcaccgacggtataaagaccggggatgggcagtccgagacttcagtcactactgatcgagttcagagtgatcggagggttagggaggcccaccagaagttctcgcagcattgggagatttatgtggctatcactcaccctctcaagctaacgacgtatggggaactgagtacagtcctcactacagaagatttgtacaacatccttgaggttatagacgttcacgatactatcactcaagtggcaaaagaacacgcagaggctgataagaaatgattacagaaaggattgcccagctaactggggaacttaaatttacagtcgattcccggcctctcactgcttttgacaagaagctcgctggggtcgaagcccggctaagagaattctccaagctgacgaacaagcggtttggagttaagctaactctagatacaaaaactctgagagaggagcttgccaaggcagccactcaaagggtagtcttgaagaacatcgcggtagatgctgccgctgttcgtcttatctctgagaagcttcaagaaagactgaatgcaacgccgatcaggttgaagtctgttaggctagaccttagcggtatccgagatcagaaaaacttcgtaaagacggctctcggccagaccaaggtcgatctaccggttgaactgggcttggctcaggctagccgtacgctgtatgaatggaagaagcgcacagagagtcgttttaaaattcatctgaatgcagacattagccgctctaaattgctccagaatgcacgaaacacactaagggatgtgcagggtaggctaaacggtcttgctgtcgctacgcctcaaattaggctgtctgtagaccgtgcccatcttcgtagagagattcaagatgttcttgagcaaatcagacgcgaagtgagaatccgcattgacctagagtcttccatccgaggaggtggtgcaggtggatcgagaggtactgccggccatatccgtcaaggtatgggaatggggattggtagcgagctagccgggtggggacgcgggtttattcccggccttggtggtgcgttcgctattatgcagcttaaccgtgctaaccaagaactgcaaggtcaacgtctggccatgcaagctgtcggtggtggagtacagggtggtcaagagctacaagccaccctccgcgatatctctcagcgtctcggtcttgacgatagagcaataggtagctcctatgttaagatgatggctgccggacaagcatccaacttcgacaaaacacaggttgatggcatcttccaatccatggctgaatatggacgagtgatgggtctggacggggaggctatgaaaggctccttccgtgccgtagagcagatgatgggtaaaggacagatcatgtccgaagaattgaaaggtcagttggccgaaagattccccgctgctgtagctctgatggctaagtctcaagacatgactatcgcagagctaatgaaaaccatggagaaaggggagcttaagagtgatgctctgatcccattcgccagaactctagcggaagaagctcgtaaaggtggcgctctggacgcggctatgcaaggtacagccgctcagcagggccgattccagttcggatggaaccgcactatcgaggccttcgcggctggaggattcgaccgaggaatgagcgacttcttcaagattgctgcccaaggcatgaaagaagcgcttcctctggtaactgcacttggtggcgggttcgaagctcttatgaggcctgtcaacgctctggtcggtattggaggggagcttggttcccagtgggagaacattgccaagcagttcaacatgaccggcacagggctgactcttaccacggctcaaaccctagccttgctgacccctatgggcaggttgatctctgctattagctggggtgcgttggcactggaagacttcattgtcttcttggaaggcggtgattcggtgttcggggacttcttgaacaacaacgtacaagctgccgagacattcgaaaagctagccagtgaatccagtgaactgaagaacaatctcgacggtatcttctctgttgtcccggggctagctgaagcgctcaaaggtctagagttcaatgaaatgctggtcagcacgatgagagaacttgctgccatcatggagttcttcaacagtgttgtagagagattcgcaatagccggcaagtacagggacgctaagattgctgaagccggaggagacagaagtactataatgtcgaacatcgacacgatgtacgctatgttcaatccggaagatgcaaaagacaaggccaccttcatcggtgacaggctagtagctcagaacattgacgcgatccagacagagactcatacccgtgcaacccagtccttgactccagaccagtttgggtatatgatgcaacgtggtcaagttagaaacgaaatggagggtgccctcaagaagagtgccattgacattagtttcaacctcaatgtttctggtatcgatgctcagggtaacgtcatgacaactgaagcgcaagagcgagtacgagagatcgttagtaacgttcttgaggaagaaatctccagagcttcggcaagttataaggaatcccaatgacaattgctatcaaaagagagaacggagacctaatctggttcgacgctgttacagagttcggaagacagtaccgtggctctgtgagttccaacccaatcgaaacgggaggaaaaatcacagaccacattactacagaaaacccagtcttcactcttacagccgtcgtatcagacgcagacttcaacttgaacaggcccgttatcaacgacaacgaggcccagacatacaagatcaacaacaaagagttcgtgaatacgcagccggtaaccatcccggctgttatctcaacctctagactagaccctagcagaatctttccagaagttatcactcagtttattcctcctgagattccttctgcaactgtcctccctcaaaagggtgataaagtcgcttatgatattgagcgccaactgatcgacatgcagcgtaatgctgaggtcttcagtttgctggacttccgagacggtatcatctgggatcaaatcgaaagatgcatcttcaccgacttgtctttcactgaaaacgccgagacaggtagcagccttcaacctcgtatgacaatcgaggctgtgacattcacagatactcgttatgtcgaggtgagggttaacaagggtagaaagaccgctaagaaagaaaagagagacaccaaagaaggtgataccggggctagcaatgctaccagccaagactctcctacattcaagcgtagtcaaatgaaagaggctcagattagaactcaggttgcgaggtagactaaatgagcacgacttatatcgacacacttcctctctaccaagaccggaagtacagatacgcagtagctatcgagggaatctcaagagtccttcaattctactggaatagccgctctcggcagtggcacatggatatattcgacgaggaacttaaccctatcctgacaggactggcggttgttcctcagtatccgatcatggcagactacgccatgcaacatataggtttcaatggctacttcctactgatgcctgtcaacctagaacaggtacagtataagcacgatgcaagtgacattgtaccacagtttttcgaactgctatacgtgaacgttgacttggaggatgacgtagagtgaaacaatatgacagagtgtataaactaacgctcggtaacactgaatccgggcaaggtgtagagattacaaacctccaccctgacggaagtttgaacagagagggacttcagttccggtttgatatctctaaaagttcagataacaagaagagcggaaactcggcgactgttgagatatacaatctgtctattgccactctgaacattcttgaaactgagtatctgacgtgccgactagaagttggttataaggaaatgggaacttctgttgtgcttgatggcaacgtggttgaaacttcgactagaaagagtggtaacgattatgtcactcagcttattctaggtgaaggatatacagcactaacagagaccaagctgaagggcacagtatctccgggcaaaactgtaaaggatgttatcgaagaaattcgtcttcaaatgccgggagtggacagaggagcttatacaggcctcaattgcaacaacccgatcatgtatggataccaactacgtggactggctaaagacgcactaaacagtgtgtgtgaagccaacaatattgaatggaacatcagtggaaacgttctaaacgtcacagacgttaacggcccaacaacgaagagtgttcaaatggctcctctcgtaaacagagagaccggcctgattgatatcccattctacgccagtgccagcggaacagcacagaagaaagaccagcggagacggaggggcgttcaattcaaatgccttctcaaccctgagctaactcccggggttcttgtccgggtagagtcggacagattgtcaggcactttcagaatcaacaacgtccgaatctcgggcggatacagagacaacgaatggtacactgaatgctggtgttccgatcttaaccaagaggatattgaccaatgaggagaacaggcctacaagagcttctgaacctgcactcgtccacagagggttcgaagcagtacactgccataccttgtgtggtattgcgcgttctggacgattttagacgcctatctgtcgatgttagaccagtggtcaacgacctgtacaaagacggcacatcggaagagcaaccagagattctatctgtccctgtcattatgccgggaacagctaacacacttatcagcttcccattgaatgttggggatacggtgttgtgtgtattctctcaaagaactatggacgtgtttaaaggctctgccactggacagccacacactccaaacgatcttcgtaagttcaacatggcggatgccattgccattcccgggctgttcaccttccctaggtcgatgaacgaccctgcaagacatagttggccacatgataccaaagaccttactattgcccacaacctgatgacgggacaagaggcggaagttaggatcaaagccaatggagatattctaatcaacagccgcaagactataagcattaatgctcaaaatgtcaacgtcaagtgtgcttcactcactgtcgatgcagcccatacaacatggaacgggaacattgcacatacaggtaactacgtgcagactggtggaacttctacattcaacggtattccattccacactcacaaacacggtggtgttatgccgggcggcggtgttactgctgtcccacaagcttaaaggagatcatatggacttgtttgtcaaccccgacacacatgacttggtttttataaatggtgaagctccagtcactcaacgaatggttgatattgttgctcagcgactaaagatcaaactgtacacattcctaggtgagtggttcttggatgataggatcggcatcccctacttcgagaggattcttggtaagtctaggagccttcccgctgttgacgcgatattccaatctgagattatgagagaccccggcgtccttgagattacatcttggcagtcggggatcgaccctcacacacgtgaatactccatggagttcacagtcagaaccacagacaatacagaatcccttcccatcactttcagaatgataggagtttaatatggctggaattacagcagaaggtctaacgattaaagacttggaccaaatcctgacagactacagaaacgtagcctctcaggtcttcgccgacctagtttcaactggagacgaagttgacacgtctggtaactctgctctaggccgtctgatcggcgtagttgctccatcggacgaagctatctgggaagttatccagatggtgtataactccttcaacccggcagccgcaactggcgtggctctggataacctagtatccttctcggcaattagccggcatgctgcacgtccgacccgggctcaggttgttctagagggcaacatcaacaccgttattaactcgcctcccgcgaagatgatttccagcagtacaggccgagtgttccacctactacaaggcgtgatcctcactcctaaagcttgctctggtgttggaatcttccctcagacagtaggcaacgacctgacgtacgagcttaagatgtacgttgatgacattaacacaacgtctatcaagtacacaagtcctgccactggcacagtaacatccgagtccatcctagcaggactggccgccgacgtagctacaaatcacggaaataccttgacaagctacgaacagaatggtatacttttcatagtacctattgacccatttaacaccaagactttcgaagaagcctccaacctgagtattcagaaggttagaaagcttggtatcgctgttgacgacgttattggccctgtgcctcagcaagctctagctatcgatacgatctccattcctattgccggatgggacagcgttatcaaccctgttccagctatcactggccgtctgcgtgagaccgacgatgagcttcgcgagagattccgaaactctaaattcgtacaagccaccaacattctggagtccctaatcgacgggctgatgaacgtagaaggagtcgaggatgttaggattatcgaaaacgatacagacaacccagacccagttcatggagtcccgggtcactcgttccttccaatcgttcttggcggtattcctacagaggttgcacagtctatttggctgaacaagccattcgggattggctctgttggagatacagaggttcaggtggtagacagtcggggatatacccatagagtcaactaccagcgccctgtcgaggttccaatcgagatcaagatcagtgtaacaaacacaggatcgatgccagagaacattgaagatatcctacggccaaggattgtagcgtacgggaccgagaattacaagatcggagacgatgtaatttattctcgattctatgctccaatcatggaaatcccgggcttccaagttaacagcctgacgattgccaagaaaggacaaactcaaggcatggcgaacattgaaatcgggttcaaagaagtggctacattcgccgcagcagatatcaccgtaactacggtgtaatgatagaaggagaattccatggctgtcaaccaatttgacagagaagattatctggaggtggcccgggaacgggtcactgaacagtttaaagagaagccgatctttgatcgcttcctgcaagtgctattgtctggcaagtttgatatccagaatgcactggaagacctccagactctccggtctctggacacagccaccgggaagcaactggacattatcggagacattgtagggcgaccacgcggtctagtgtaccaagatattttcaactattttggattcgctggaacggagcgtgcaggttctttcggaagcctgtcggaccctacggtcggtgctccatggtactcggtcggtgctccaactggtaacgccagagagccgagcgacgaagagtatcggatgatcctgaaagcaaagatcatcaagaacagaacaaactcaaccccagagcaagttatcgaagcttataaatttgtattcggggttcctgaagtattcctagaggagtacgctcccgctgctgtccgtatcggcatcggtaagattctaacgaacgtagagcgtagtcttctattcgacctaggtggtgcaggtgcattgcttcctaagactatcggggttaactacacatacactgagttccaagctggccgggtatttgctacagaaggcttccccggaggacaaggcgttggagacctaaacgatcccactgttggtggaattctgaccaacctagtgacataaggagttataaatggctgattacagtcaactacctattgaaaatatttggtccacaggcggggatatggtagccccgacccctgcgcagcagcaaggcggatggggtattcagtcggttcctcgccaatggtggaactggaagtggaaccttcacgatactaacctagcgtatttgctacagaagggcatcccagagtggactagtacacaagagtacattgctaacaaatcgttctgcactagaggtggatttgtttacaaggctgttcgtacgcatacaggaagcgaccctgcacaagttagtgccaactgggttcgagcttttgcagattacaccacatctagctctgcacttggaagcctgacaccaagagagggtggaatcccattcttcattagcgctacaggagctagcgtgtttgactctacggcctatggtcgcggaatgttgaatgtagctaatgcctccgcagctagaagctacatttcggctcaagaaagctctgttgtactgtccaacctgtccactgtgactagggctgccaacacggttccgtacttcaacacggatacctccatggctaccttcaacatcacagcgttcggaagaggacttgtcaacgcggctaatgatgaaaacgcaagaaatttcctaggactagctaactctgctatcattacggcagacccagctaacagggcacatactctggtctatagagatgctgctggcaacttcaacgctggcgtaatcactgctaccctgtctggaaacgcaactacagctaacaagcttagaaccccagttacaatcaacggtgtggcgtttgacggaagccaaaacattgttcttccgggcctagatacaagttatgcgggaacggttgcacgtcttcacatcaacggagcgaacctttcgagtgcagataagactactcagctagcactgaggaacaaatctgacaacgactggattagccttgctgtagtggatgacaacattctccagtttgtattcagaagcgctacaaacccagttgtacagattggcaacgaagttatccttcacacaggaaaccagttctctctgggcccgactcttacagacgctaggtctcgtctgggtctcgacagactaactcaaggtagctctgatactcaagtcttccccagcaccttgaacaatggcccctacttgaccgtacaacctacggctatcggaggattcaacggtagcactaacggatggctgttccgattcgacgctaatggtaacatgactcatggtacagttcctgccgctagaatcactggtctgtccaactcggctcagattccagccacaactacggcgcaggctaactctcttgttcagagagacgcagacggaggattcagcgctattgcgattaatgcgtatggcactatcgtcgggtacggctctaacatcttcagtagagcatcgggcactggcaacgcccacatcgggttccagagagcgaacggaacagaactcggtcttatctggggagcccaatctaacaactcgatgaacttccgagttgctggcggagccaccgcagtgtcgattaccggtctggacatgactgttactggaagagtcaatgctaccacactaaacgcctctggaaacgtgaatgcgacaggcaacgttaacgccgggagcgctacgctcaatacagcagggaatatcacaggagccgcttacggagcctatggttctctgaccaactgggttgattcggtatatgccaagaagggagaaattcctaacgatatcgcaagagccggagccgcttgggacgctgtaggtcagtatattctggcgggagatcaatctggagggtctggtggaccggggacaactagagctggaagccagttgaagccttattcgactattagctacacagcaggggcactaccagcagcaggcacttacagatgtatgggagcgtttgcaggtggtggtaaccagattaccctgtggcagagaatttcttaatagagggcttcggccctccttttagaggagattatagtggaattcagaaatgttgtaaaatacaaaatggggttcgaatgcgaggtaaatcatcctcagtggggatggattccgttctacgcttgtgattacgacgatagagccaaactggtatatgacgccatcgcccgtgctgtcgataacggagaaatccccgaaccaaaggacgttacagatagagacctcgttgtagatgcacgtctgtggagagataatgagctaacccgggctgatcgtcaagtagaaattgctatcgacgatgaagacgaagtaaaagagaaggcttggcgtaagtaccgctctgcactacgtaagtggcctgagcataaaaacttcccagccgagaagagtaaacccaaagctccgaaggagtgaggtaagataatatgccaaacattatgaagcctacgggaatcaacgctatctggtctgaaaatggccagaaggttgacccgggtgctgtgaaagtagggctaggctgggttacggaacttcctccgtaccagactgcaaacttcattgaatataaacaagacctgtttaacgctcacgtcaaccaacatggtatccctgaatgggatagcgtgacagagtatcagggtaacctgagctacactcaaggcgctaacgggatcatctataagtgccttagaacccattccgacaagattccaactgaccctctgaacattacagccggatattggcgagtggcgtttgaggatgcgggagaggcagctaaggttcaagccaaccttgatcggcatgtaacaaactacaacaccctctctgggattggcaacgtagttattgcaagacaaaacctaagtgtgtatagtaaagctgaaggcgacgcccggtacgctatgaagcacgggaacggctctaatgttttcagcgtcgccactgccacacagccaactcacgcgatcccgctgagccagctatcgactctcgttcctcctgcgaccgagactgtagccggggttatggcagttgctacgactatcgagacagaagctggagccaatgataccaaggctgtgagtccgctcaaggccgcacaggtgtatctgaagaagaaagacaacctttccggtctgtctaacgtcactgccgcaagagctaatctaggactgtcggatacagcgactatgccttcttctacattcctgaaggcaggtagcaatctggcagatgtgcctaacaaggcgctggcaagatcgaatcttggaattacaagtagtgctacccagccggaaacctatttcttgaggagcgctcagaacctagcagatgtacctaacaaggcacaagctagagtcaacctaggcctcactgggatggctacaacagaccctgcggcggttatgatgaaggcagacaaccttgctggattggctaacactgctaccgctcggtccaacctagggctaggcacagcttctactagaaatacaggagacttcctgtcgtctggggataacctgtccgacctcacgaatgtccaagcagctagaaacaacctagggttgaagggagcggctacgctcgatgtatggggtcttcctgcgaatacaactgccatggacttccagtctaatcagtcggatatttccagaggatgggctcgactaccaaacggccttctgctacaatggggaactggtcccggtctatctgatgacacaaggacgaatatccaactccctgttccagcacgaatcttgaacgttcaagtgaccgtaatggggacgtttaacaactccatcggcccgggcgctttcatgacggatatgtggagcaacaccgggtttagagttagctgcaactggggcaactggtcttacccgttcaactggtttgctatcacttccaccctgtaattcaggagtatcaaaaatggctctaactgagcaagacttccaatcggctgccgatgatctcggagtcgatgttgccagtgtaaaggccgtcactaaagtagagagtcgtgggagcggctttctactttctggcgtccctaagattctattcgaaaggcactggatgttcaagcttctcaaaaggaagctaggtcgtgaccctgaaataaacgacgtttgcaaccctaaagctggaggatacctcggcggacaagcggagcacgaacgtctagataaagcagtcaaaatggatagagactgcgcacttcaaagtgcctcttggggcctattccagattatgggattccattgggaggcactaggttatgcgagtgttcaggcatttgtcaatgcccagtacgctagcgagggatcgcaactaaacacttttgtgcgcttcatcaagaccaacccggcaattcacaaagctttaaagtctaaggactgggcagaattcgcaagaaggtataacgggccggattacaagaaaaacaactacgatgttaagctagcagaagcctatcaatccttcaagtaaatctaggaaggttcctaatgaagaagctattcaaaagctggaagttctgggctgctgtaggctctgcaacttttatggctctggaagccatggttcatctttgggagcctatccttcctcccggcgtgttcgccgcagtagccacactggtagctgttggtgtgagaatttcggcagtgtttgtaactgctggtaaagtggaggaagcgatttcggaaaccatggaacatgacaccatagaagatggctcaatagaaaatgatactaactaaactcaaaaactacgccctcgtagtagctgccgcaatggcagcagggtttggatatctgtcgttctctttgtacggcgacttagctgttgcgaagaatgatatccaatctcttcaagctgcgtctcgacagatggaagagcagttccagaaagagcgagcagggtgtgagatcaccactgggagactagaggcgcatatagtccaaatgaagagccgacaggagcttctacaaggccacctgtgcgagcttgagtctctacctaacccaaccccaagggagacccaagaaaatgccacagagacgatctctgagccttctactggggatagtctggaccctgctcttacaagcttgctcgacagggccttctgttccgcagtaccaaacgatccttattgtgcccccggcaagcctgaccgaggaggttaaggtataccgagtggagcaagatacagtcaaggggctcgctagagcttacattctaaatactaacagtgctgccatgtgcaatagtcaactacagacaataaagctatgggcagaagagcagagggctctatatggaaagtaaagacggcaaagaaggcctaatcaaggtagctacacagggagttatctctctgctaattgctatcctaatggcttggtctggattcctaagttccagtctttctaagcaggaagaacgtatctttgcgatgcaaagagatatggtatccgaggcaaaacttaacgcactagagtcgagattcaatagccgacttgaaagtgaaattagtaacgtaagaagagaacaacaagaaaccaaccggtatttgattttgattatgaatgccgtcaagggtcgggatacagaaactcaataactataacccgttaacccacactgggagacaatataatgacaaggaaacaagactggccgctagtttcagcagtcggggctttgtttatctccctccttgtctgtatggctattctggctttcacagcgatgactcccgaggctcggtttgactctgtacgccagacctacgagattcgaattagcgaatctgagcggcggtatgaactcaaactgaacagactacaggatcagataaactcggcctcgtacacacaggatcggcaatcccgtttgcaatatgaagaactcgactcgcttaaaaggaagattagcgaacttgagcggagaataaaagaaaaacaagaataattaagccccgggagcgaaagcttaccggggctctttgtcatgttaggcgagcagcgtgccggaccccccggtccgcggatcgaagatcgggacggtcatgaacccgagctcgtcggcgaacccgaagcgcgcccgctggtattcgatccagttgaggtccccccgcccgggtttgaacgcgcgcgtgtcctggggttcggaggcgtattttttgatgaggtccggattcttgaccgccgcgaacacgaatttgcgggccgaatggatatcccggccgttttccttatacgcatacagatcgatgccctggcggctcgccgtctccgcgatcatcgtcagcgggagcatcgcgtaattctggtaatggaggctctgttcatgccgggtcatctcatgcacgaacgacccgtcttcattgatcaggcccatggcctgcacgtagcgcccgagcccccagcggaagagttcatcgtctttggagatcacgccgatgatggtcgcctcctgcccccgccaataggaatggttattgcagcagctcgtgtcgccccccgggaagctggtctgatggcgggccacccgattcagccacttgacgacgcgttcgcgttgggccgtatccacattgggctccgccatcatggtgctgagggcgaaggcggccgtcgcggccgaccattcgacctgataccaggactggctcttggggtcataattcaggagggcatccgccttggcccatttgtcgagcatgttcaggaggcacgtcgcgtacaccggcttgccggtcgcgacatacagattgcccagcgtcgccgagattttttcgaaatcccgatagagggtgaccacgggttcgtaatcggggttcacggggccatgattcccggagagataccggcgggggatcaccatttccccttgctgggggttcggggtcgcttcggtggtgcagtcgtactctttggggagcgccgctttgaggcggtcgtcgagttgccccgattgcaggaacgtccggcgcgccttcacgtccataaaaaatacctccttaactttattgaccgtttggttttcagcgaacaacttgataaacttcatcgaacaggtcatcaagcttctggataaccttcttagccagcttcttgcgaactttgttagcctctgggctggaatggagtagcttaatatcggacgcgttgccccagtccatcgccccgttgtcgaacagcactttaacattcagatgcatcgagccctcgtcaatatcgacaactacgccggtcatccgagcgttggtcttttcgaaggtcggcctcggaatgtctatgtccagactgccaaccataacaacctgccctttcttaacgtcaaataattccatttaaaacctccttaatctaacttcattagtgtgttgaactgatgcctcagagacttaaaagcctgtggcccatcgtcttccgctccttcatgaatatgatgagcgattaagtgtatcaatcctcggtctcctagtaacaaagaactaggaatttcttttatccaagccacaaagcaacagaagtgtagaacctccggcatggaagccttgaagctggaatcatccagcttcgataggcgttcatacgtagctttaagatcgggatagcttaactgatatgtagcatcttcgtcaatatgctggtcccctctaactacatactgcaagctcatattacaccttctttccgccttctgcaagacgtgcctctcgcttatggtcggaacgggtcatattgtactcgatcttctcgatgatcgcacctgcaacatctagacctcgaacattcgcgtagtccatgatacgaatgatagcgtcagccagttccacctcttccatcttccgctctggcaagtgatcgtccatcaaatccttacggactccttcagccgcttcggcgatttcagtggtaacgagcatcagcatgtgcagagcatcacgtttaatcggctcgcctgtgaccagatcggtgttccacttgcggttaacaacctcaaggccagtcatcattttgttaaaaccgctaacaaactcgaagacggactctcgttcgaatagttcaccgaacgttggctcttgatcttcgacaattgcagtgtggaaaggccactccatccaagcgtcatagcactttttgataagctcttgttcgtcaatgtatgagaagaaatcttcatatccatcaatcgcattaacaacttcagttcccctttcccaattgcgcttatcaataagtctctggtcgattcgcagggaagtgctgccaacttcttcccatgatctccagcctactatgccatcgccgaagtacaacagaatgggcagattgaatccgcgttcttcctgatccttagtctccatagctataacaaacgccggtactttttctccacttacgccattggccaagacgaaagaacccaagtgggtggtctctcggctagctgggcgatgagcttcctcgatatgatctttaactctactcattaacttcaccctcctcgcagaacatttcaaaataacaatcgacacaagttagcatgccgtcgtcgcttacaacctcctcgggagggaagttgttcccgcaacattcgcacacaactcgatcaacctccctgcatccccagtaagccatatttactcctccttcagaagatactcattgctaataactttgaagctgaagtctcggctcatgcttttgaaaaccaagccttcccggtacttaccgttcaacgcagactcgccactagccattttaattacgagttgcatgtcttttggaacgcctacgtcccacatgtacaccggcacatgtttgaccgtctcaccacccaactggttcagcgtattcagaatggcaagacgctccgctggaagacagtaacgactgtccgaaatgttgtagatatcgtacacatagtattccggtttgtcaactccctcgaagttgccttgaatatttggtgcaaccagttcgccttgaagggcaatattcagaccgaaataccggagacgttcaccaagattaagctcttctgccatcgcagtgaagtgattggagtctttcttaatcacacgcttccagccccgacccttgaagaagttcttgatagcagtgaagaacccgatcttctcgtcttctagacggaaaccgacatttcgagacgccacgcctacttctccgtccttgtgccagatagtgagagacgaaccgtccaatttgaatgtcacttcaaacttctcgcccttctgatgagcctgatcgtaagccatctgaatattttgtacgcgagcctgatccgtcttcgggatgaagttggggaaccctagcttggaagtgccagtccggctgcccttgttgcctccattgatagctgcctgctcggaaggctttacatacttcaggatgcccattcgatcggtaacatcttcgtctactttcggctctgggctgcccgctgcatgaacaggtacgatcaggccttgactaagctctttacgaagcttcatggtcttgattcgagaatactcttttccaccttgttcgaccatattacggcctcgcaggaattcaaagatagggttatctacaggcaccatggaatccacttcaatgtagattgccagatcaccagcctgatattcccctcgtttgattacgcactgccaaccaccaacaagcgccagatcgaggctgtcagcgttaggatgggtcttcacatcgtcgatacgcaccactcgggctagtacgcggtcttgggaattactcatatattatcctccttgtttgaaaattggtatattacttgttaaaccagccgagatcaatagcccgctctagggccagtagcagattctcagcatctagaaggtcacggatcgcgatccaactaccactgtctcccggtagaccgtctgtgatatacacaggtatgtcactgtattcgctctttttaagcccgcaggcacaggctacattgtccccgaagacaatctcgctgacttcccttgcctcgtctcgaatatcgatcttcacacctaccctcctgttgtgttgaaagttgttgtattctgcccggatatcttcgcagtgtcaatagccttgacaagaaaataatccgtgatagagtgaggtctctgctggagagaaatgtccacgtcactcaccggccagcagtatagcgtatgaagaggaaagctgcaagcgcaacctgagtcgaatctgagaacagggcagcgacgacccgaaaggggaaagctcagagcctataaggaacccatgttccccgctcaccgactcatctgcatatatgtatatctgcatgagagcgagaggtagaccaaaggcatgtcttaggcggagattccgtatggcaagccttgggacaggtctgcctccactaccgatctatctgcataaagggggtacaatgtattcagcaactgttgtgaacagacactacgagaaatttgatgtgtatataggaagggggagcaagtggggtaaccccttctcccacaaggaaggcaccagagccctctacaaagtagatacagtggaacaagcaattgagtgcttccgaagtcatctttggcgtaacataatggaaggattaatcacagttgatgaccttctggagcttgacgggaagagattggggtgttattgtaagccccgtccttgccacggcgatgttctggtgagggcaatcgaatgggccaaacaacacagaggagtgtataaatgaaacatgttatttaccgagaagacctaatcgacctgttacgcgaccgtatgaagctccaagcgctggaggctggtggcgttgacaactgggactggtatgaggcctcgcttatcgactgcggattcttcgatgatgacgggcgtgagcttgaggtcgaagcacttgcagattgcttcccaaccgtaggtgcgtaaccgtggaggagtcgaaagctaccttcaaagacccttaccctaggttcttcgacgcttctcgtaggtatggcgaaaccaacgactgcatggtggtgagctttgcagtcgtatggaacaccacctatgaaaaggcacaccagcacccgaaagtgaagtgcaagcgcggttaccggcaaggggctactcagaagcgcttcagctacgcagacacttggtgccctaagacccggatgctctaccgggaggatgctaaggataagactcttaggcagtttgctgaggaaaaccctgaaggtcggttctggatcgcggtaaagggtcacgctattgcaatcatcgacggagtgttgtacgatcacactaatgacaaaagacgcaccatctggcactgctggcaagtgtggcccggggaggcacctgagaaaatcgagaggaagcctgatccaatctcacctcctgtgagaaaggccccagattggtatgtctgaagattacaactgaggaggaattatggaaattatttcgagagggacgctccctcaagaggttttgtttacggctaagtgccaccactgcttgagcattctccgggctaagaggtcggaacttaagtatgtttcgttctcattcggacgccccggggagactgggtattatttcgcagagtgccctgtgtgtaacgaagaggtgtctgcttgggttgtggttcctaccagccctgtagcacctcctcccactgtagagtatatcacaaaggagcgtaaataatatggaccagttagcaggattcatgggcgaacctttcgtaattgcgttcgactacgacgagacgatcagtctctaccctcttgccttccgaatcgtcatggataccttcaggggctttggaggcgctttcaatgtgatcgtagtcactgcacgccaccctgacaacagcggagagttagagtggctacgggactacgggttcccgatctatttcacggcacagaaggcaaagcgaccattcatggaaaatcttggaataaaagtctctgtatgggttgacgacaacccgttcagcgtggataatgaccttcctccgtggacagcggagcaatacgacgcctaccttgaggcaaagaagcaacgagctatcaacagagggagtaaagcatgagcgagattattaaggttgaagtgggagatcgggtggtccttaaggcctattgcgatacatacactggatgtgcaaagcgatgggcgcaggcgcatggtcgtttgcatgaactgctagctacggggtttgtagaagacagttgggtccacaccgacgaactggccggaggcttgaaaggcaccgttgtgatgactgaactgggactgaaggaagagtgctgtgcagtacgtctagacgcctacactgaccacagggctgttgtagttgttgacgcttctgatctttacatcgcatgtaaggcagcaaaagctcccgtaagcaccctagacgaggccttcggttgcgaccacgactaccttatggaatctccggctaacgctcagcgactgaatgagtccgtcgagcagctacgaactggccaagtcgtagaagtggacgtgcctatgagtgtaaagcaagacgaaactccacctgtcgtagtgcatgtagtagagaagatttacgataggaaaggtaacgtacacctcattctacagtatgaggtagcaggggcgctaatcaggacggtggttgaacagggagaactcatttacttcttggatgaaatgcaaggtatgtacttgaccaagattcaattggaggtgaacaatggagttgtatgaccagtggcgtaagtatatgagcgtcgtaatcttagaagaagaagataatgagcgtcagtgcatgcggcttattgaggcagttggcgaactcgatccctatatccaagatttcctagattctttctctattaaaactgaaggaggtgtgtaagcatgagtcagagtaagcgcgatgagattgtagttgaagcacgtgggctagagagctacttcatttcccactggaacggctgggatgtgatggacactgcttgtctcggattttatatcaaacctgagtatgttcttgacccggatattcgagagcttgagcctagcttcttggagcttgatttcgagcgttgccgtttccgattctggggaaatgaagacgaaggcgtggacggcaaactcatggagggcaagttgcagattatgaccaactccttcgagtacgtcttcttcaaggaggtttgagtggctagacagacttacgagtctgcatcagatagggcggtcgaggaggccgtccgttctgagcttgaagggcggtggaagtgttctcttcataagctacctagagcccactatatggattgggcagcctgccggaatggaaaggttgttagctttgtggagcttaaggctcggaataatgaaatgcagaaatatcccgacttctttgtgtcccagatgaagtggctccatgggatcgaaatgcaaagggtgtttgacattcccgcattccttgtggtaaagtggacggactatacaggatatgtcaaaatgacagccaacggcgtcaactacatgagcatgggtggcaggattgaccgtggagactggcaagaccaagaagttatggtccatatcccgctgaaagacttcacacgtttataggaggacacatgaagagactctgctaccgttgcatgcatcttggagagcctgtcatgctccgtcataagacgggtatctggtacaagggttgtagtaaatgtggatcaggagtattctatggctaagaagaaccctgtattcaagtttctgaatacagtaaacaagccctcagtggagagggataaaaccaaatacaggcggaagcctaagcataaacagaaggagcgattaaatgaagaagggtgataaagtgaggatcaatgatgatgctgataccatcttccggggccgtgttgccactatcatcgcagtagacgaagagggttgcgttatcgacgttgggagttacgaggatgagagcggagagctgatcgagtaccttcacctattctttgagcgttctgagttgtccaagcaggcgtaggagtgtataatgaacggacccgagtgtagatggtgcggagagaaaactgaagctgagttcgtagacgttgggcttggatggacgcagcaagtcactggaggcatgtgtcaccagtgtggagggtacgagaacggttactaccagaacgacggaaggctcacagaggtcgagtttgccacctactggagtggtccgttcgaagattatgcggatttctcgccattcaatcatatgagagaaggcgactcgccatgaaggctacactgagaaaccacaatctgctatacatctacttccacacgttctcggaaatgaatgagtggttgacagagaacgctgtagatcagtggacagtcactactctgggctccggctatcaggtggctgttcctatggaccgtgcaatgcgggaccaatacgtctcggaggggggttgacacgaacacaaggtgatgctaaactccgtggttgtctgaagtaaggaggttttatgtccaaaatgaccgtggcccaaattgcggctatgcacggtatcgatctgtattctgaccacaagaccgcttgtccccaatgccggaagaaaggcgctgacaacagcggagacaacctaaaggtctatggtactgatcgtaataccggggaacacaaaggtgcctattgttgggcgtgtgggtacaccttgctctctgaagagcaggaaagagacgcccggggagaagacgaagaggagtggaatttcgtgggaactgaatttaacgcagagatcaacgctcaaattaaagagcaatgctcgtatgatccgcgtggttatcgtggcctgtccaaggaaacttgccagtatttcggagtgctacatggtttcgacccggagactggcgagattgcaactcagctatatcctactactactaattatgaactcactggctacaaacagcggatcatgccgaagaacttctcagagcctatcggcgagaccgggaaggattgcgagctttttggtcagttcaggttcaagaatagcaacagcaagaaggtgcttattgtaggcggtgaggttgaccagctatcagcattccagatgctcaaggagtatgatgaccggcgagcaggcggtaagagtgattatgaaccgactccagtggtcagccctactatcggtgagagtggggcgtggaaacagctacaggctcagtacgagtggctagaccgattcgaacaaatcatcctctgtttcgacagtgatgatgcaggacgagaggcagcagacaaggcagccgataagcttccgaagggcaaggtgttcatgatggaaatgaaccgtaaagaccctaacgagtatttgaaagctggccgtcagtcggagtttgtcagtgcattctatcgagcccgtacatggacccctagcggtattgtagggtctgatgcactcgacgctcgaatgtatgaagctgtgcaggttgagaagattcctctgccaccgttcgctaagaagctccagaaggctatggcaggaggcatcccgttgggccggattgtgaatatcggcgctgcatcgggcatgggtaaatctactgtagtggatgagttcactctgttttggatttataactcgcctcatatgccgggtactgtgactctggaatcggactgcggggagtacgcaatcaagctgctgagccgtaaggtaggcgagaaggcagacttgtacgagaccgttgaagagaaagtggcgttccttgatcggcaccgtgacgctcggtacgacttgtggcacaaggaagacggaagcccacgcttctatctgatcgatgaccgagacggaagcctagcagccctcaaggctcaaatcgaacaactgattattcagtttgagtgccgtgttattattctggacccgcttcaggatattctggacggattgagcaacgaagagcagtcggtattcatgcgctggcaaaagggtatgaccaagagccaccgagtgacgttcatcaacatcaaccacgtccgtaagagtggtggtggtcagaaggctaactcggcaggtgctgaactgtacgaagaagatttccaagggtcttcgtccatcttcaaatctggtgcagctaacattctgatgtggcggaacaaggacgcggagaacgagttcgaaaagaacctgattaacgtgaagctctctaagtgccgatggactggccgcactggaatgatgggcaattggtactacgacgttgagactcatacaatctgggacttggacgactatctggaccgataccctgacaagcgccgtgaacacgaggcttggatggctcagaaggaagaggaaggccgggacacggaatactaaggttgacagaggggtgatgcttatgtatcatccctttcgtcgtttacaggaggaaaggaaatgcaacaacgatttgaaacaatcgagcaatacctcgaatggatgggaaataacaatttcaccaacatgacttgggatatcgaggccacaggcctgttggatgaaacgtctatcgattacactgccagcccctacaagattaagcctagctacaaacaccactgcattgtagtggaggagcacggtggcaatattctggcattctacgatgggccgacctacgtctttgacgggcgagagtacactgagagactgccgaaagcgtcttccatgctccacactgaagaagttgtgactctcaaggactacactccggtagagtatattcacctgccgctgaaagagttcaagaactatgtgctcaagcgcaagatcaagcgcgtagtggctcacaacatgattaacttcgaccttatgtcgatgaagcttgtggaagatatggacttcactatcggcgtagagcacagggatggcggtctgactacgtggtctgctgacacttggatgggcaagcaagtggtattcgacgataccctcgttatctccaagacttgtaaccctgacctgttcggcggtcacagtctggataagctgtctcgtcgtgcaggtggtgacaccaagattgacttccgtaagcatttggcaccggatgttcgattcctcgacttcgcagccgatatgctctactactgtatctatgacgtaaaggcgaacaccgctgtatggcattggttgcaggaccacgaagattaccaactgtccgaccgtgacaactacatcaagaattggctgtccccgattcagttggagaagaaggttgcagagatcatcacctatcaggagcaccgagggtttgttctgaatgttgatctctgtgaaaaagctgtgaaagacttggacgccaagatggaagagcgtcgggcccgggtagagcctgtgcttcctcctcgaccagctaccaagaaattcatggcagactacacaccgcctaagcggcagttcaagcagaacggggagatcaccagctacttgcagaagtttattgagcggattggggctcagttgaaagagggtgacgaccggacgatgatcttcgaaggcaaggagtacaagcttccgcttcccgctgacgtaccgctgaagacggaaatgcctgctaagatcggggacacaactcacatcaagcaatggcttatgggtgagtttggttggattccatcagagtggaaagagactgatctgactgtggatcagaagaagatcaagcttccgatggaaaacatcgttgctaagatcgatcgctggctggatgtaacgtatagcacagcgtacaaggaagagcggctggacgggttcggggattacatgaagatcacccctcgtagcacccgcgcgtatgtacgtcagaggttgattgatcgtgcaagcaaggggagctgtaaggttctcactaaccctagcttcacaaagggccaagagaaagaaatgtgtccagacctcgaacgcattgcagaacagtttccgttcgcgaaggatgtgattgagtacctgacctttaagcaccggcgaagcgcaatcctcggtggcggcatggactgggacgaaatggaggatggagaggagccggaaaaaggttaccttgcaagcattcgtcaggacggcaggattcccacgcctgctgacacttgcggggctgctactagccggatgaagcaccggaaggttgctaacgttcctcggatcacctcgttgtacggggctgagcttcgagagttgtttggggttggagatgggttcttccaaattggatacgacttcgattccttggaagcacgtaaagagtcggcctactgcgatcagtacgatccgacaaaggaatattgcaaatctcttatgatggagaagccatttgacgttcacacaatgatggctaagcgtatttctgagatcattggtcgtcaatttaaccgatctcctgcgaaaaacgtaaaatacgggtgtacgtacggtgcccaagctggtaaagtggcaaaaaccattggtgccgatttgcaaacgggtcaactggtattcgatgcgttctgggatgcagcattcccattgaaagctctgaaggacgacctcaccaagcaatgggaagccaatggcaagaagtatatcattggagtggacggtcgccgagtccctactcgttcggctcacgctatcctgaacagcttgttccagagtggcggtgttatctgtgctaagcgggctatggtgattcatgatgtactactggagaaagaaggtctgaaggttgactttttcaaagaagactggaagaacaagccggaattctgccaacaaatgatcgcgtaccacgacgaagcgcagttggaagttacagctaagtcggtcagcttcaagatgttcccttggtctcttgtaggcggtaagccagaaggagaaaaggaacaggaggaggcggagaagaagctgaaagctctagctcaggcttacaaggacgaacaattggctagtactggcaaggtgtggagtgatatcgcacactacagcaaaggtgaaggcggggtgtttgtagcttactgccgcgctggagaacttgccacgaaggccgtgagagctgcgggagagttctactctactcctctggtgcctatcgagctgaccgctggctacatcgttggtcgatcttggaaggattgccactaaaactggcattaagcgaggaaaggggcttgacaggcccctccgcctcctatacaatggccacatattcacaacatacaaggagaaacacaatgactctggctttcattatctatctggtaatgaccgtattcccagccttgtcgtcggctggtagctttgccctgatcgtcaccatcatcgcatgggttgcaggagggttcgtttacttggcatccattggtggccgagagaattcggcagttaaagccacactcaaaaatcacctacggcccttgacgttcaagctgtttctgcctatcattgtaatcggccatctggtgccttcgtctgagacggcatggtggatggtcggcgggtacgctgcacagagcctctatcaagcagacgctactcagcaggttctcagcgaatctactgaactgctcgaagctctggttaagcgggctaagaaagaaactctgaaggctgttgaaggcagcagcgagtgatacggtaatcacagaataggaggtatggtatgaacacggctcgactctacgtctacggcaaatcgtccatggtaggaatcactgttgacaacaaggccaatcgggagtactatacctctaaaggcttcgaggtatcggagacaccgttagcccacaaaagcgtggctaacaaatacaaacagaaaggaggtaaataatatgtctggtgttattcccgggactatcgtcaaactcactcaagtgggatgtgacgtcaccgttggctggccaaaggaagcccgatatgtaggcgcatacgcagtcgcagtagatggacgcgatatcggtctcccggaaggggaaatccggttctgctcccttcattggtccattgaccgagacgtcaatgatggacttggagactaccaatcgatgctcgctgacaacgaccgcttcgaaattgtagcagttccgggcaagaagtattacgttaagaacgttgccaagcacagcgcacagatcggccattacttggttccttcggagccagccttgtacgtaggtttcgagccgtgctggctgaagagcatgcacgaaggggagagcccgttctgcatgacttttaaaggacgcgttgacattggcggtgaaacctctgacaagccgcagttccagaccctctaccctgagctggtactggaagagtttaaagaagaggcggagggcaaggttgaagctccggttgacgaagagaagaaagaaaaggttgcaaagcctgctgtaatgggttatgctgttctcgatgcagacgggagtcctcttaaattctgcctcactcgcgaagaagcccgagccaccaagcgctggtggggtggcaaggctgagggagtctcgattgtaaaagtaatcaaaggagaggaggtgcgttaacgcgcttctcctcttgcagaatccgggaatgtccggtatgatcgtcagtcaagtggctgacacactcgcccagtctagggtacttaaataggagaaatgaaatggcttttaaactgaacgtaaccaccaacactcaatccggcaacggcggcgtccgaaaggaagtcgattgggatgctctgaacaaccacgtagttgaagctgctggcactgccgctaaagcgcgttcgatcccgggttatatctccggtatcatcgatctcggcgagcaagagcagaacgatgcagaggttgtgttcactggcactgccgaagatgaaatccaaatcatcaaggaatatccgaacacttacttcaaggatggactggacaagcagactcgcaagcctgtacgtctgaagtgctggccgcagcgcgatatgcaacaaatcgcgatcactgtggacttccctcagatcgaggtagacaagagcctgtacctgaccggtaacagcaacaagtctccgcttcgtgtcctgtacaacggcgactttactctgccgggtcagaagactaagattgttggccgtccgtttaccatcaaggaagtgaagcacccgaatggcaaatgggcgttcgccaagaactccatgttgcacaaacttgctgtggctactggcgtcatcaacgaagacgaactcttcaccaaggaccgcgtaggcgagcttctgggcaaggtggctcagttccaagtgcgagtgtggatgaagccgggcaagaacgatatgaaattcctcactgaggatatcagtctggtcggtatggttcctgaaggtgttccggttcccgagctggacgagaagtacatctacggtgtcaacctgtatggcgagaacgacgaagaagcagtcaagcaactgcgtgctaacgtcatcaacaccatcaagcgagccaagaactacgaaggttcggatatcaaggcgatgatcgaagccgttgaagctgcacgcggtggtaaccgctccagtggcgacagcgaagagcaagctgaagataagccgcagacccaagctgcacctaaagtggagccggttcaaaccaacgtagatgatgacattccgttctaaagggcggtggtaagacaaggggcttcggccccttcctttcaaaatttcaaaggaggcaacacatgcaaatcaattttggtcccatcttccttctcgcagcaatcgtcctgtgcgttctgaaatctgccggagttctcgctatctcttggactgtggcactcatgcccatctggattcctcttgtaattgtattgtcgattctcgtactgtttcttgtaattgtaggtctgatttacgcattcggcgatcgtactaaactgaactttagctttaaaaagcacttccggaataagtgaggactaatgatgagtagtttggttattgttcgagtacctgagtacattctaaaaggccccacagtaaacaaccagttcagcggtgacctgtgggagcgaaatctcttcaaagatttgaagaacgctgcggagtgtatcattaaaggagagccggcttatgttgctcttcctaacaaggtaaaccctgacactctacaaacagagtgggacattcaggttgtacagttctaacccaaggggagcttcggctccctttttcattggagataaaaatgagtgaaaaggaagaggatatcgtcctcatcgacggcgaccttatcgcctttaagtgtgcaagtgtcaacgagacccgctccatcattgtcagaaacaaattgacaggagaagaggaaacttggaagaatcggacgacttggcgggagaataacaaagacgaagagggattcaacgaagacaacttcgaaattgaggaccatcaagaccccaagcacgtgtcctacggtatctctgttgttaagaccatgatcgaccgaatctgccgccaagctgggtgcaagcagttcaagattctcctatcaggccctgataacttccgtgacgccatcccactcccgaaagaatacgagattaccaagggtaaaaagaccttcactcgtggtggcaggtacaagggtaagcgtacagggcagattaagcctcttcagctaggtcagctaaggcagtatatgatcgaagcgtatgacaccatcatccatcccggagaagcggacgacttgatggccgaaatgatgtacaagaacggtgtaagctactccagaggggagactactcagcgcgtgatcggggctaccatcgataaagacgcagacggcactctaggatggctttgtaactacgaacgtgagcctgttcaagtcaagttcatttcaggcctaggatcgctctacagggactctaagggcaaggtgagaggcgagggacgtaagttcttctacttccagcttctattcggagaccctgttgactgctaccgacctgctgacctgtgcatcgggaaggacttcggagaagtggcagcgtttaacatcattaatccctgcacaacggacaaggagtgctggcaagcaatctacgacacctacaaatcgtggtaccctgagcctgtcacttacacagcatgggacgacacagagcacactaaagatgcaatcgatatcatgcaaatgtattgtgactgcgcccacatgcaacgttgggcgggggatcgggtagactgtagggctgttttggctaaactcggggtagacttaggaggtgcagaatgagtgtaaggcctcgcccttgggaagacttcccgggcatctggaagaccgaagccgcgttcttgagttgggtcagaggtggcattcgccgctatctctggtctaagaacccggtcaagcttgagtttgctaaatcccgaaggatcaagatagccaacaccaatgaaaagagcaagctcaggaaccccactgtatggggctatgtgtgcgagcagtgcgggaaggagactcctcaagctaacgttgagattgaccacaagacgggggagttctccctgaagcgagtagaggatatccaagcgttcgtggaaggtgtggtgtttgtccgcataggagatttggctgtcttgtgcaaaccgtgccatgagatcaagacctatgcagagcgttacggactcacccttgaagaggcgggtatcgtaaagcaagctattgcaatccagaagcagaaagggtatgataaggccttcttgcaggaggtgggaatcaaacccgcatccaacgcagagcttagaaaagaacagatcattgaataccttaagtctaagaaggagggtggatgaacgaggatcgggtttacattgtagtaagagacgaggcaccagagtacatggtgccgactctggttgcacatagcatcctaggggcagacatggcaatggttctcctcggacaggaccgggccgttccatcgacggaccttccgtcccgtccgtatatgcatgcagcggcaaaaaccgccattaagtgggtggagtggaaacagtggagcttccgtaagatcgttgtacgagtttctgacaaagagtacgataagatcaagcaaatccctttcgtatatgaggggtatgagagaaccatctgcaatggcgaaggctcctgcctagtagtacctcctctgagcaaagaggagaccccgaatgttcttaaatttgcaaaattatggaggcctctgtgagagagaagtttttgagaattatgcggaagctgcccatccgggtaagggcttcccttgttatggcttggattgctctgttcttctggctcccggttgcaactgcgctaatcgttggaattctagagttcttcgataatgcaaaagaagagttaagaaacggatactctgttttgatcgaagctgccaagggagcttaccagtgcattaaaacgggagaggagttggagtcatgaccaatttagctacgtatgttatacgccacaaaaagaccaaagagctttggaccactcctaaaggaaagcggcaatggaccacgaaaggaggggcagcccgagcttggagaaacgcatatgagagtactacactaggagcgtactatgctaaaagagatatggaacggtggcctgacctgaacattcctttgatagtaggggccgctcccgcacgtctggccggctgggaagcagcatcttttaaaaaccaatcagctttcgagattgttgatattgctgaatccctgaagcacgaaagccagttggtgctcgatctactgaaagatgttattgggttcgaagtgccagaccacatcggagacggatatgtccgactcaccattaaaacgtccacatacgacgatatcatcaaactactgaaggaggcaaaatgagcatgactgacccccgagcgtatttcatcaaacaggagctggaggaagcaacgaagcttctagaaagagccctcaaccttctagataacgtccattgctacgatacagatgtatacgaggacattgcagcattcctctacggtcaagagtgcgaggaggaataaggtgcagcgcgatattagtaaaactatagcagaacttcgggacttgatcgaagctgtctctatgctcgacgaggccttggttatgatgcagaaaaacggactatatgatacggacttgtacaaacgtattgatgcgtttttgtattatcaaccgggcgagggcgagtgggaggaagtagaatgagcagcaagaaacactttgtaatctctgatacacaatgcaagccgggtatcagtctggactacatggaagctatcggtaagtatatcgtagccaaacgtccagatgttgtgattcacatcggggatcactttgacctcgccagcttgtcgtcttatgataagggtaaacgctcctctgagggccggagatacgccgaagacgttcaagtcggacgtgagggtctggacaggctgttcaagcctctgtgggagctacaggagcgtcaacgggctaatcggaaaaaggtgtaccaacctcggttgattttcacactgggtaaccacgaagagcgagcagaccgagcggccaacgacaaccccgaattgtacggcacggtcggaagtgaggaactgggtattcaggattatggttttgaggttgttccgttcctgaagcctatcgaggtggatggcatctattacgtccactacctacaaaaccacttcactgggaagcctctgggtggcacagcgaacaacatgcttaaggctgccggtcattcgtttgtcatgggccaccgtcagcttctggactgggcgatccatcctacaattgacggaaaacaaaggctaggcattgtgactggagcgtgctatcctcacgacgaggcttacaaaggctatcagggtaacaatcacttccggggttgtgttatgattcacgaagtgaaggatggttttggtctgccaatgccggtaagcctagacttcatgatggagaaaggaggtttcaaatgacggtttataagttctggtgtgaatgggatatcggtatcaatgagtgcctgtggcgagactactaccagatggaagaagatgtagctaaagccttgtcagattgcgggattgatgatactattgaggaactggaggacgcaggcctgctcggcttcgactctgttaaagttatcggctaattaggtaataggagggcatatggctgagtttttccttggggcggcccttgcaggcttgttctttatgtttagtatcactgcgagctttaccgccgaagatattgagaaagtgacttcaacatgcgagaataacgaaggcgtcaagtatttcggagttgacttcttcggagacggtgctgtacactgcaacagcggcgctattttcaaaatcgaccgcaaatctaaataatcgaaaaggagatataaaatgactgatttcaacatcacccctgagcaaatggaagaagcaatggcaggtatgaaccctgagcagcgggctctggtagagaaagccttgaccgaccgtaaatctctggaagattccatcgtgaccgaggacggtgaactggactatggcatgcttgcacgacacatccgcaccagcttgggtgatctgcctctggtaatgggtggccctgacttcctgaagctgatgatcttggttgctgcgatgccggagaccaaagacgatctcctgactctgcacatgaacctgtccttcattctggactgcattcgtgaatcgattagcgacgaggagtaacaagtggccgaagagattgtaaaagaagacctatctgtcgacgatctcatggttgactcagcagggctagatgccctgctggccttcctagagagtcagtttaaaggtccgaagggtgtactgaagggatatgtcactatgagagtgatgtgcgctaagatcgagagtcttgacgggtttcaagagttgaaagatatggaggtgaactttgagtaacgatatcatcaacgttcatgctgggcaaccgatttctctggtgcaacggtcaaagaatcctatcaatattcaatattgggacgccgataccatcccttacggaacagtcttggttgttaccgagaaaaggggtgatatacgaaagggagaattggtcgtaaggctggctagtagtgcagatgatgagcactctgttaaggtatgtagattctctgatttcttcctcctaatggagaggggttatgacgcagccagtctcggcgacgttaaacaagcgtatgatgttctgttcgaagatcacccagtgactacctttgttaactgggatcgggctcagcctttgacaaacagtgagcgctactacggagactttctgattggcggcgaccctaaagggatgccactattcaacatggctgttcttaaaaatgttctgtcgccttacactgccgacgatgaggaactttcagctatgtctgggaatcccgagacagtagagcacaaagaagttgacgaactaagtgagagggacgaggctttagccgaggtcgacagactcaatgaagagcttgttgcactgggtaagaaggttgtgttcgccaacctagaagattacctaggcaaagaaaactatgccacattggaagctatggctaaccacaaggaggctgtaggtagcggaggctcctctagttactacactgtcaaggtgaacaaccccactacgaaggctaacatgccgtattttgcagagtgcaacgatatcatcgaagcgctggatatgcgattcggtcaaggcaacatgttcaaagcgttgtggcgggctgcggcagcacagaacctaggcaagctgaaggccggtaacgatgttatccgggactacgagaaagtcatcttcttcgctcagttggagatcgataagattctcagagaaaggggttgacattctccccgaggcttgcgataataggctccaagttgaaacgaaggaggtgtgtagatatgatccagaaactaaaacagaagctcatgatggtgcatcctatcctcgctagcgagatcgtctggtgcctcaccttcgcaatgcttcagtaaaacaagggagcttcggctccctttattgtatcaaagatttaataaggagagtttatgcaaatttctgcaaaagtgattcaacacagttcccggatcggcctaggtacgaagaatcacagattcatcactacattcgaactggagtatcctcggtttattcacagtgaacttatgactcaccgactttttagtcgaaatgctgcaagtagtcgtgccattcccgttgcccatatgatccgacaggtggaagagaatcctgcgatgcctgttcactggggaatgaatcaaccgggtatgcaagctgagttcgaactgagtgagtgtttgcaacgtagctctcagtacctgtggaagaaggctgcaaagagtgcggctcggatcgctagcgcactaaataaaatgggactccacaagcaggtggttaaccgtctccttgagccgttccagatgatgaagaccgttgttacagccacggaactagataacttcttctacctgcgttgccataaagacgcacaaccggagatcaaggttctcgctgagaaaatgtatgaggctcttattaaagcgggcccggcagaggctctatatgacggagagtggcatgttccttatgtgactcggttccgcataggggatggtaagctgcgttacgcagattgtaacgggcaagaactgagcgtagaggatgctattaaggtatctgctagctgctgtgctcaggttagctataggaagaacgacgagactctggagaaagctcttgtaatctacaaccgattggtagatactaagcccgttcacgctagcccgttcgaacaccaagcaacaccgatgctccgcatctcggacaatcaaactggatgggaggacggtgtgacgcacttggaccaatatggtgacctctggtctggtaacttccgaggtttcatccaacatcgtcaactaattaaagggcacgtatgtaatgagtactacggccaagaagaggaaggagtttaaaaatggcagaatataacctgagtctggaagacctcatgctggtcgatggcttcaaagaggcgttccagagtaacaatgagaaggtagtaagggagcatctgtggactaacggcatggatgttaaaaactactcgtatgaaatggttttctgtcagcatcgcaccctgattggccgagtcgtagagggtctacgattctctggctttgagcgtacagacaaggagtggctgagcctcggttgcgcctctctggaagctcatattgcagcgtgtgatgatagtaatctacggttcactcttcgtaagatgcgaccagagggatcgacagaggcaacgttccacaattaatgcagtaggagtagatatggaagttacaaaggctctcgtagatgaggccgatattttcaataagatcacacaaatcaggactccaacggagtcctatgcccggaaatatccggtcattgtcgaactagcaaaccagcaactagaagagaagttgtggttctctagcgaaatgaaggtagagctggataagttgaacctcaagtttaagttggaacctcatcagcttcacgctgtaaagactgtccttcaactgttcctcaaatacgaactgatcgtaggcgaggagttttggatgggtaaagtagtccgaacgttccctcgcccagaggttaaactagcggcttcgatcctgtgcatgatggaattggcagtccacgctgaattctacaaccagatcaacgtagtgctggggatggatacagatgccgactacgtggcgtacaaggatgacccggagcttatgggacgtatggagtggcttgagtctgtgctaggcgacgaagacgatgttctttcggtaattatcttcagcctaacagagaccgcccttctgttcagttccttcgctatcttgaagagtttccagtgcaacgggtacaacgatatccctgtgatcgcacgcggggctaaccagagtgctgtggatgaagacttgcacggtgtagtttcggctgagatcatcaaccaatactacgcagagattggtcgaccattgtctgaagatactcggcgtgtcgagaagattcgacaagctatcgaccatgtatatgctcatgaatgtcgtattgtcgatatggcgatcccgggcggagaacttaacggcgagtcggctgaaaactataaagcgtttgttcgttatcgtttgaacgtatggtgccgtcgtctgggtctggaagatcatttcgagaacgatgacactccgatcaaagattggttcgaaatgaacacgtacgcttacaaaatgattgacttctttactccgggaatgggcatggagtacgaactggggtgggatgaagaggaactagcaaaggcttgggaagaggagctgaaatatgagtaagagagacacattcaactattccgaagctaggaaaaacagtcaagcagcaggagagactcctctgtggtatacgacggctggctaccagttgttcatgaagaaatattcaaatgagggagagtctgttcgctctcgttttgagactgtagccagagctatggctcagcacgcccctacggtgtatcctgagtggtgggaggaggacgaatacactagaggcaaggactgggaacaggtattcttcgacgttatgtgggacggttttgtaagcccatccactccgcttctgtcgaacggtgggctccgcaagaagggcactacggtatcctgtgcaggcgggttgatggacaacaacctctatgaccgttacaatgtaatgacggagattgcagtgctaacgaagcatagtcacggcacaagcttcagcctgaccaactggccatccgaaggcgatgccattcgtggcggagagtcacagggtgttatgcctgtcattcgtgacgttatcaacgtcatggaagaggtcgcacagggttctcgtcgtggtagctgtgcctacagcattaacccccgccacggggacttctggaacgttatcgatcacctgtacaagcgtacagaatcgaacaacgtcggatggttgctggacgacaattggtgcaaggctatggccgagaaagaccctgaaacgctgaaacgatggaagcggatgatgttcgttaagctggcaagaggcaagggctacttcacgttcattgacaagatgaaccggcacctcgcagagccgttcaagcgagcaggtctgaaggtagaggcatctaatctttgccaagaaactgtgcttccagctaatgacttctacacattcagttgcgtgatcctaaactataacctcgaactctaccgttcttggcctgagcatctagtgttcatcgggcaggttatgtcggattgcaacatcagcgagtacctcgcaaccatggacgaagttagcattcaggaccgaagggctctggagaagatttaccggttcaccaaggacttccgagcacttggtagtggggttctaggattccatactctgctccagcgggaacgattcccggtcggcagtatggacgctatgttcctgaacaacgccatcttcaaagggatgaaggagcaagcggaagcttgtaacagttggctagctgaggttctaggggagccagagggctgccgtggactagggaagcgtaatgccactacaatgatgatgccgccaactaaatcgacggcagaactcatggctggggcttctgagggcatcggactggacgttgctatgtgcttcaccaagcagagcgctggaggtgaattcttccgtgtcaacaaggtgttgctggagattatccaagagcgaggccttgattgggaagagtgtgcaaggcagatcaacgaacgcaagggaagtgttcagcacgtagactggctaaccgatcatgaaaaggctgtattccgtactgcctttgaggtgagaatggaagactacctacgactgtgttcccagcggcagaagtacatcgaccaagggcagagcatcaacctttatttcacgtcgaatgactcgccggcttacatttcgtacatccatcgtctcgccatggaagacccgaacatcctatctctgtactacatctacagtatgagaggagcgggagatatctccagaacagaagaatgtgaaatgtgcatgtaaaatcattggcccggggcttgacagcttccgggcctttgtgtattctgagcacatcaaaacaaggagggactaaaatgaacaaattctctgaagtgtactacacttggagcgcagcgtgctctcgtacaaatatcttgatagatatgggatggactgctacaatccgtcgagacttcactggcgggatcaaccctgtatgggttgtggagttcacgcgatgaacagcaaactccgcaaagagttcgataaatggtggggacaggacgagcaagaagaacttcgtaaatcctgtgccaaaggatgggcggaatatatctggatggctagtcgaagaaaagtgagtgttgagcttcccgcgccagaaggcggatttatcgacatccaaaagtacacaatcaatcgctgcaaagaagctatccgcgaaacaggactggaggtgttttaatgaaagaatattttaaaaagcgactaatgcagaccagtgaaccgttcgattcagcgacgcaagctatggacgtagcgattgcgtggggaggggctaagtactgcgaattcacttgcgtaactgcggataatcgcgtcatcagcatctgggagtacaatgacgtagagcctgataaaccggtattcaatggacagcaacgaatcttagttccaacttttgaggaggtagtataatggaacaaactattgataaatctcggtatattgtgcttgataacgaaggtcggcacgttctgaccttgtgcgagaaggccgcctataacctgcttaaaggcgttcagtggacaaaggacaagcatggtcaaatccatgtaaatggtgtcacaggcgttgaactcggagttcgtcaagggattatcgctgaagtattcctgtatccgggctacatcatcctagaagaggtagactaatggatatgttcgataaatacatgcaagttatgtatgaccgggacgctttctcaaggcgagtcggtgagttagaaaaagaggtagccgaactcaaggctaaggtggctatcgctaagtgtgatatgcgtgtcgtgaaaaccctactggaagatatccaatgggtgtatcaagacgaagctatctatactctaccgggctacgtttgcccttgttgcggggaatctgcaaactatgggcatttccaaggcagcttcgataagagcccctgcctactagcttgtgtactgagccggagtgaagcatatgaagcctaatgttgtagactcgctaggcattaacatgtgctacgcctgcggaggtaaactgtacgtccgaggagtatgcactatctactgccctgactgcgagaaggcagagaaagataaaccgttcgtcaggatgcagcttctacaggatatcgcagacagtaagaggcttgacacagaataatattctttgtaagataagcccatcacagacaaggaggagccgagaatggccactacagagaaaattattgagtacgtcgaggtgtgcatatatcgcttgcaggaggacgtgatggcctattctaagggcttcagggacagagccttgtctaatcggacaggctacattcacggcctgattaccatggctgaaatgaatgagcaagtgagtatcgaagactgcgacaagctccgagctaatctgcgggacgcttctgaagcagtgatgaacacattggacttttaaagtcaactaggaggaagttatgataaaagattttgtaaaactcgttggcttgtctgccgtagcctgccttctgcttgtatgtattataggcatgtttgttacagttctgcacagtggggcagagattgttcaatctcagatggaacagaaagacattatcgtgtctaccgatgacggcaccatcaatctcggtcgctccgtgaagagcgagaagctgctgtacagcatgtgcatcaaggtggaagaccgtaagccagcttgcgaattcaccaccaaggataaggtagtacatgaagtgcggcaggtgatgcgcccgggcgaggctactgcacgtgacattaagattgcagttaacgcagcagtgacgtatactggagagaatggtcagaaggctacctccctgatccctccgaaaggtgaattcctgccggcaggtactccgtcagaggtgcatatcgaaacgattgaccgcttgttcgacagcgtgtataatgactacaagcaaaacttcagcaagatgtgaggaggactcatgaaagcacagcctaaagaagtagagaccctatctttcgacaagcgacccaaggccggggatatcgttcgactgcggtccgatggcaaggcttacgaagtgtgtgctgtgtatccgacagcggtaggctgggaggcggcgcttcgaagcgtgtacgacaaaaccaagactgtcactgtcggcatggagtggtgaaatgtccgcgactaacaagtgcgtcaacttcctccctgtcactccggacgggcgagtgatcgtccggttcggtaaaaagaggttaggatggctcggtaaagagggtaaaaagtggtattattacccttatggatgcgaaggcaggatcaaatccgaaggcttcaaaactctgatcgatattaaggcgtggattaaaaaccccgactcggtttggcccgggcccctagcttgagattgactaataagccgacgaatggtacaatgggatgtaggaaattccctactcagtataaggaaactagcaatgactagccgctggaaagaggccgtgtatcgcaagtactcggtacgtcgtctgcggcaggaactcgaagagttcaaagaagctagacgctttgcaccaaatcaacgcatccgtgcatggtttgatgctcatatcgaatttctagaacgccacttggctattcgagagtccggccaagcctacccagacgaccttctgtaattaagtgttgtaggtagagattcaaatcatggttagtggcaaggacgccacactttcagcccgcccacaaggcgggcttctttttgcctgcaattcagggttgacttggagtaccagagcatgtagacttaccccgtccaacacaaggaggaataaatatgaaattcaatatctcaagacagttatgggtggctaaaagccaacggaagggcgattacaagggaacgcccttggcgtacatggctcaagtagacttcaacaaggacggaagcttggcttctagcttcaagaagaagcagcagacaggtgagggctgggcaggaaagagcgctgagacgtgcttcgtagataatgtcccggtaacggggcacttcatcggcgacagcgtggagcgctgggtgaccgagaacaagtacttccgtgtaacggacccgcgaggtttcgttctggaagtcccgaccgggaacatctctaccctgctattcaactgcactgtagtcaagggagtcattcaagagccttgtgtgtgggttcggatgggttctcagcacgttctactgccggaaggttcctctctctacaaagaggctgtaagcttcgtggagcggaaagagtcagccaagaccgttaaagatatggttgcaggggatcgatgcaccctccttagtaacggtacagaggcgaaggcggaggccatctacctcggacgggtgaaactcacttggcaccttctggctcaaaagggccggtactctaaccgtggacgtggcgggtgggcttatcgctggggttaccaccatctggagcgggagttagatagaaaagaattcaccgagaaagattccaagtgggttagtgtgtttgctaagaaactgagtctcggtggacgatggaccctcgacttcgttctatcgccgaaggccactgatattcagtctgggacagttccagaggaacttgagaatctggacttggtagatggtgtaatgtgggagtatgacggagaggatacccgcccaatggcctactactattctgtacctgatagggtagtcaagtgtatcaacgtagacgaccccgcatgggacgctcgatcctacgatgaggtaaggtggactaaagagtggactgtagtgggtgccgagtggcgaaaataagccaccattattttagaattgcccggcgagagccgggctttttcatggcaggggttattttcaaattatttttagatttctgggagtttcggccaatatgggcaatatgaaatttctcaggaaaaggctcagaatgctcgtataagagccgttcgagtgtaggtatggtgagctactacttagccgtagaaggacagtgtaacgcttaataggagggttagaatgaagattgacaacggtggcgaatatgcgtattggctggcggatatcaaagagtttgtttctcagatggatgccacagagatcgagaagagggcttgtatagcatacttaattagctggtatcagcgaagagtactgcacagaattaaacgggaggaatacgaggagatctaagctagggaccggatggatttttagggactggatagattttcacagactgcaaaattgagaactgggcagatttttaggaactggacagtttttcacagaaggggatttttctacagaggaatttcccctgaaatttagccggatttctcagaagggcggatcgttagcaggctatctaattggttagcaagctacctttaatcgttagcacactaactaaaaattcctaggacggacctcagttggcacgaacgttgcaagcccgcaccagtttcccgggcaggcgtaggcctcgactatccgtcgtgaaggcgatatgtagttggggactcgcaccccgcgtttaagatgtgcccattctactatgacagacagctttgtcaacattctttttatggcataggctttgcaattgcaattaacatgccaacacaaatatcaggctcctccggtgtttatctccggtgctcggcttccagcctgcgttgcccgcatgcctactattatacacaagctatcaagagaagcaagaaaaattatagagaaaaatctacacaaaggaggttgacaggcctcctttatatatgcacaatgatctcacattcaacggaacgtcaggtaagcatcatgctacatagtgaagcccgggagatggccctacaagagatgggcaagtggagtctcctcgaacaaggttggaaattcagtttcaatctcaggatgaaacggacgctgggacgctgtaatcatactaagaagctcatagaacttagctacgggtatgtagctgctaatgggctcccggcaatattggatactatccggcatgaaatagcccacgctaaggcgggaccggatcagggccacggatttgtatggaaagagtggtgcggcttgattggcgctaaacctcagcagtacgccagcacaaaagaaaaagtagtcaatttcccgtggcaactggcgattcagcacgactccgggcacttagagcggctcaatcactacggtttcagacggaccaacatggcgaaaaagcaggtacgcgggcgtcctgagacaaagggcagactagtttgggtgaagagtgaaaataagggttgacagcttaggccattcgcgtagaatggccctcaagcaaagggaaacaccctgagcaatcacgaaggataagtagatatgaaagcgctttgtaatcatcgggcactctacgcagcttacagccgtagcgagattgatcgcgttgcggtagacctgaaccgttactttcctatcgagaaagatgatgaatgggaagatggaccgtacatgtaccgccgccggacctatctggtgaagcattcgaagggcatagcaaggtggcacagtctctattgcaatgggaccgtccaaggcgttggcgtaatcttcgacgtaaagtcgggcgaacctttccgcacagcataaggagattcagaaaatgcaagcttgggatgtgtatcagaacggccaattgatcgatactgttttcttcgatatcatgtgtgatgccgaagaggtgcggaaatcgctggtcaatcacgacggatactcgtctgatactactgtagaggaggttgagtaatggatagtctatctgttaaaatcgttctgtcggaactgagctacaaggctctgattcaagccttcgccttgcttggccgaacgctcgacctagacgaggggttggacgatatacttaatcttattgcggatgagatcgctttccgcgacggcctgccgcctttcgcagacgactgcgataaaacagaatggatgctccgtcgatgggaatcgctcccggtggtatcgtacaatatcgggcaggacggaccgattgtcgctcggtctatcgaagtaaaaacggcatgaggggagaactgatgaccgtcagagtaggagatatcgtggctatccggggcgacattcggaaaaagctcgacggaacatgccaatacacgcccgaacaattggtaggtggtaaattcctcaagcatgccggcacgggagaaatatggactggccgagtgagtaagatacaaggtgatatggccaaggtgggaggggcttggcgcgggatcgaattctatgtgctcattagtgaaataaacgcttgacaacctgacccactagctgcaaaatagcactcacagacaacgaagacgccgataggcgaggagaaagcagatgcaaatgtttttcaaaacccgcacccaagcccgtgcaatggccaccaacggtcgcaaagtggtagacaacggggctcaagctgaaaagcgctgggctgtcaagctgaacaaaaaggaggcgaaataatggctaagtctgtcagtgtagatcgcaagcgttccatcctcgacgaggcgaaagacggtagctttttcagtgtggaattcgtcaaggcagacggcaccgttcgaaagatgacgtgcaagcgccagattaaatcggcgtatgctaacggacagtatgccactcgcaaaccgaccagcgctggcaagccgcacctgtataccgctgctgaggtgctgaacatggaagagggtaaatccgctttccgtacgatcaatctcgaaacccttatccgtgcgaaggtgaacggaatcgagtataaattcgattaaaagcttgacagcctaggccattcctgtagaatggccctcaagcaagacaaacttaaacagaaaggagattaaaatggcacgttctatcaaggcttccgacttcgattccgcttaccagttcgaggccgccaaacgttccgaacgtaaagagtcccgcaaatcgcgtgacaatcgcaaagctagccgaggccgagctttcgacttcagtagcgatatgtaaggtttgtgccctgccggcaggcttaaatgccggcaatcctaagcccattcgtcgagtggttttaggattctcaaccccagcggagataccaaaaatggttcgtcaatgcgtaccctgtcccgatgctcgccatgctttttgccttgcatggttgttcgccatgccggagttcgccggtctgcccgctcaaaaggacataaaactctttaagacttcgggacaatgggcggtatgttatggctagacgacagcggctcccgtcgtgggttcaagaccagaccgaggatgaaacgccgctgagggacaggatagacccctaccttagcaagcttggcgaagtcgataagctagagggacaattgcgacgggtcagggatgcaacggacccggacgaatacaacgaaatggctaaggtactaaaagcccgacgccggaagataatgaagcaacgtgcccgggcctacggtctgccagaggatgagcctaccaatgtccaagggtacagcgtaccggaagaggttcaccgtagagccatcctgttaagcagtgtaaaaccttggatgttctggaccatcctgtctttctcgatttttgtgtggtttgttttgaaaaacagttgacaaggttcccgcctcctgtagaatggtcagcaagaaaggcggacaggccgcctagctagataaaggataaccgtcatgcacttcgttcttaacctcgtttccaaaaacagcaaaaccggtcccatgcctgttagcacgtctcataacggcacctgcccggatgcctgccctctcaaggctaaaggctgctatgccgcttatgggcctactgctattcactggaaaaagctaagcaagggtgaacgtggcgtagagtggaaagagttccttaagcaagtgcggtctatctcccgtggggatttgtggcgtcataatcaagctggcgatctcgtgggtcaggatgacgttatcgatgggatcgccctgatggaactggtgaaggctaacaaaggtcgtcgcggcttcacctacacacattacccgatgaacaatttcatgaaccgccagcacgtattgtcggccaatcgtagcgggtttactatcaacctgtcgggcaacaatgtagcgcacgccgatgaactggccgacctgaacatcgcccctgtagtgactattctcccgatggacgcggagaatgtaagctttacgccgaaaggacgtaaagtggtagcttgtccggctgagaaaagcgacaaggtgaattgtaagtcgtgcggcttgtgccaagtggccgaccgggagtatattatcggcttccgtgcccacggcacagcaaagaaaactgtcgatctcattgctaagggttaacacaatggacgaatctgtttacgcaccattcaatcagtgtaagatgatgggcctagaacgaaccgtgcggagcctagcggctcctaacgggtgcaaggtagtcttgtatcaggaccataagaacaagcatagaatcgtcatatacgatgccttagggcatggaatgtctggggtcatggtgcaagcggatggggaaattcactacaaggaaactcgcaaggctagccaagggcagaatctgacaaggcagctacaagctcagctaaccgcatggggagtgaagtggttcccctctcagtatcagacagcggcgggcgcggcctgctacaaaggaggcgagtgatgcggcagcttaacaaatcccagcttaaggccttggggcctaagatcgacctagccttagagctagcttctactggccgtggtggtctaatgaatggccacggctctacctgctacattgcaaacaaagccgggcataacattctgcgggttagctaccataactcccgattcgttgcatatggtgctgagagtgtccgggtgactgggaatgtcattgcagcatgggtggaatggaagggcattaaccgggctgcaatcaacgctctgagtgagtacgggtatcatcctaacctgagcatagggcacaacgatgctcttaagactctgcgtgatatcgagcgttaccagtgacggcctcttactcgacagagaaacggggccagaggtgggccatcatccgtactgagcccggttacagaggtgaccgggtgaccgtgctaggattctgtatcaatcaaacgcacgctcttaaaacggtagccaaattccgggcttggcaagcgctaggctggccctacacactgaaagatgacagaaaataaatgcttgacagcctaggccattccagtagaatggccctcaagcaaagggaatcaccctaagcaatcactaaaggcaggaacaatgaaaaccacagagcaacggcaagcaatactccccggggccgccggcagtcaagcgacgggcgcctactacccgatttactgggatgaccggggctacttcataggcccgatgcgtcactggaaaatttacaatcgctgcgtctgaagcatcaagccatgcttctaataaccaaccatctggagactcaaaatgaaagctgtagcccagttcaaaagtgaagactacgaaagcggtgatagccgtactgctaccgtctatgaggatgtttatggatgctacgtcgtgagcgttttcggaactagcttgagcgaacctgtcagctaccattggggtccgttcgagtataaagaatctgcaatcgatgccgctaagtctgctatctaactgaaaaggggccacagaatgaaaatctccgctattctgaaaaataacctgaagttttacaagaataattcgttcatgtgcgctctggcgttcgataatgtgtccagaaataaagctaccgaggtgcaagaatttatccatcagctactagggcccttcgttaccttgcacgctaagctcaagaaagagataccgggttacgaaagagccgtatatgatgatgagccagaggatgaaatgactttctttgtatcggatagggcctatcaaatgcgttgcttgtggtgggaaactgtaatcgaacaactagaggaacaagggcaatgactcaagctaactggagcaaaggcgtccgggttgtcggcggaaagcgggatggtgagattaccctgttcacaagcgcacacttcagtgaatcgctaggcttatgcgagggtgatccttatctggtagaggctttgccgatgcccgccgcgctccggctgctagtcaaatggaacaagctgtgcagccgaatgaagcttgactatcggtatgaactgctgtagtctgcaatctcaatcaaaacaggaatgctccaatgtcgattctagccttaaccctgaccctttgctctgccgttcaatgtgatgattacattatcgatcactcactcccgggacaagccgcagagtgtaatgctcggctggtggaggaggccgaggagtggggcgatgcttgggtatcaactaacgctgatgcccgactgacccgctaccttagccggttcaatattcaagttgaccctcgctttgttttcgactacgattttacctgccaactcatcgcagaggatgaactaccatgaacgcgccccatctttccctcaagcagtaccgtcaacgtgccgctgtcatcgtccgccgagtgaaatactatgaaaggcgctggctccggaccgtagagtttttctcaggtgctgccgctcagaacatcgcagaacgctttgcctacgctgggcatgctgaagagcaaatgaccaagctcaaggctgagtttgtagccttcccggtggaggtgaggctagatgctctaggttggatcaattggaatactcacaatgacggcctgctagaggagtggattcatcaggaaaccgaccgagccatcatgctcgaatatgacgaaaccacgtggcgtcctgtagcttgctgggaaaccactgtcgatgctcttcccaagctggcaatgctgtaaaatatcgcccgttaggctgaaataatgcttgacgggcgtttttgtacctgtagaataggcctcaagaaaggaaaacagccgaaaggctcaatctgaaacccggagatcgataaaatgctgctagttcatggaaccactgcaaaaggcctgaaagctatcatgaaccgtcgaggcaaggagggattggccgcaccttgggacgtttcggaccatgacggaatgtcctacttttacaacgtaggcaagatggagtggcacgacgaagaggagtatgctaaggcagaatgcatcgttcgttgcctagaacaggcccaattgcagcaggctatgatggccgaaggaggtaaaatctatgctctggtggttgacattcccgaagagtttcaggattgcgtagaggatgattattcgtgccctaacgctagccaccaagctagctgttttccagaggataattttgatccggcatggattgtagaagtgtatgaggcagatgtgagtgtatgggccatccctttcatcgtagccggagtctcaggtaattctatgttccaatcccaccaactacctgacaaactggtggcgatagcggagtcggtggcgcggtccagtgacatagacacatacgaagctttcgagatcgaccattcacaggtggagctatctattctcgaaaatttcaaagataacgcttgacagtctagccaactagcgtagaatgcctagccaaggggtgcataagcgccccacctcgaaaggatacagaaaatggccatcgttgatcgaaccgcaggtaatgaaagcccgaatcactgctacatcgttactggcagcattggaccagagtttgagccgaccctgttcactacccatgcgctggcaaagaagtatgcccagcagatagtgaaatacggtaaagcaaacgacgttttcccgccttttacgcctgttatcgagacccggcacaaggcagatatgaatcggttcactgttcacaacaaaatccccgaataggagacgtatctatgaaactttctgaaattttccaaaaaggcctgaactatgcaattgagtacggaatgccgtggtatatgtgcatccgtctccgggagattcatttgttcccctcgcccgttgaaatggcagttaactcggtcatgatgtctgccggtatctcatcaaccccagagggatgcgaattcgccggcgttgatgactatttcgaggaaagcggcctagcagccgcatacaaaatgaacaatcaggaaatgtccgaatacgggcgctcatcctacgcaatgtgggtgcaattttggttcttcgtaatctttgacttagcccgaaaagggcagtagaatgcattacaagcgtagaacagccagcaaataatgtgatctagagggacggtcatgggtgacaaaactgtagtttatcgggtggagtgcaggaacggcgagggaccgtatgttaactatggtatggagattgatacgtcctccactcccgagcggcccgtaccggagcatgacgggatacctgatgttcgccattttgagtatttcgccttcacgtctcctaaacaactagatgactggttcggggactactacagcaatctgaccgagcactccagcgcctcaatcaaaatgtatgaggtggacaggcagcatgtaaggactggtctccggcagtgtgtattccgcagagatgcggcggtttgcgtcaaggaaatgactattgaccaatgggtaggcctgcttaaggctggcatgatctctgcggtagtcgtacaagctctggccccgatcccagccgaacaactatccctagacctaggggacgatccggcctgtgaggctcagaaagaaattttgaaaatgttcagtttatagggttgacagcttgggccattcgcgtagaatggccctcaagcaagacaaaccacaaacccggagactcaccatgaacaagccaatgaatactttcgcatacgcccactacgtcgcccgcatggacaaggcctctggcactagcctgccctacgccaccctgttccgcatcgccctgcgtaacgcctaccgcaagccgggtgtccgccagtacgattgtgcagcactcgtcgaggatatcaaagcgcgtgaactggtccaaaagcgcattcgggctgaaaaagcagtagtgatggcggcagtaatgcgtgcaattcgtaccggcttcaccgttagcgtgaaagatggcagcgatggcgagtgggtagtgaaaaagtctaccgatatcaaggaaatctctgatagcctgcaatctaccgacgaggatatcatccgcttccgcaagggcgacggcccggacaacatcgtcggctctatgtgggcaatctacggtaacagcgccggcgaagtgatcgccgactggactgataatgccaccatggccatgattatggctccggctgagcggaagatggaaaaatacgctgaattaggtatctaatgcttgacggggcccgaaaagggccccataatgcacccataccagcaaacaacatcaggaccgccccgatgagccagatcaaaatccaagagtatatcgtagccgagatcaaggttaaccattgcgctcacctgcgcaagggccagaccatccaagcccgcgatgctcgtagcagtgaaaagtggattgcattcatggtggaacgcgggtatagtgcctctgaagccgctatcctgttcaaagatgcacatgatgtggcaatgctcgaactggcagcctgaaaaaatcctactaggagtactgacaaatgaaacgccaatatactgattcctaccagtgcaaagcaatcgacggcctgatgtctatctgcggtggtaagaaagctatcgtacaagtgtggccgtccttgaaagcctctcgaaaccgccggctgaaaaagatggtaaaatacattgcccggtcaggatggaaaccgtaaccaactgattatcacagccccggcttgccggggctcacaataggagataaaagcatgaataccctgattatccgtttggattccgcctacagcgttcaaactgtccgtagtttccttatggaagctgtagagagtattcgaaagcatatccgggactacgcggttcatgacgaatacgattcgggattgagcccggtagcacccaatcatcgacttgcaatcgtcaccttagacgaagattgccgagtgtttcacattcaatgcgagtcacctgatctttatctggcgaaccctcggatcgtgtttactgatgttgaaagcccggcatataccactcccgtgaacgagatcgaagagtatagttacatgaccgcatggcagcatatacgtcaaaaagatatgacagcaaaagactacctgtcggattggtctatccttttcgcctcaaaggagaatgccattgatatcgacctgcgccccaatctgaaaacgcaaatcttgcattaactgagggagctaggatgaagcttcgaaccatattcgaaacctacgattgccgagttaggtttgtcaccataaccggcgtgtttgtggaatctcaaattgtgcggagtttcggtcaagctcaggagattgtatcactcctctgcaatcccgcagatactggtatccgtctatccttcttcgacgaagaggagggctgcgagtcgatcctctgccgattcaactacaaaggagaaatcatcaaatgaataacaagtataaggataacatcattgcggaatactgccatttcgacggcagacggccagtcctttccttggcggcacgatgggtccaccacgacagtcgagttgtgaagctggcagcgctctttgcctgtgctggctatggccgtccttacaaagattgtattaaggcctacaaggacgccaagcagcgggaaaaggatatgcgaaaccctgccaaatggaagctgagccgagcgactaagcgggctctacgggctcgactagtggctatagaaaaactagaataatccggaaaatacctgttgacgtgaggctagagggttccctatactgtgcctatcgagacgcacaaggcgtctcctaagctagaaggactagcaaaatggcaaaggcaaatctgaagttctcccgcattggcaatgacggctacgactacgcccgcagggaagacggggtttggtttgtcagagaagggtactacgggcggtacggctgggctaaaaccaaatggactcaagttcaacccggggatggcatgactatagtcgatgcctgcctgaaggctcacgaagctggaagctccagcacatacatcggattcgggaatctggtggtattttccgacgggaaggggctccgtttaccctgaacaggaactcaaataaagttgttgacagcttaggccattcctgtagaatggccctcaagcaaagggaatcaccctgagcacctgaataggtaaaagacgatgcaagcaacctaccaagccctgaaaactctgcgcgatgcttgtgaagctgtcaaggatgaaaaaggcaccatcaacggaaacaaattgaatgcactgcgtaacaaggctgtcaaggaaatgcaagctggtggtgaaacctactctgacgccattagcatggctcacgacttgattaagaagtatcgcaagtaatcaatccgtaacaagccccgggtgaccggggcctctcataggagagaccatgaaaaacgttcaaatctgttgttcgaagtgtggagccatcaacggcggtaacagcaaacacaattgggttatcgcattaggcaagaagtggtgcggtcattgtgggtccaatctcacaacccttcgtcgctaaccattcactgagacctaatcgaggagagatcatgaacgccactctggcacgcctacagaacgaacgctgtgcaaccctccgcctgatgctgctgccggaacatcgtgggtatcagttctctggccatccttgggccgagcgcatccgcaatctccacgatgaagccaagtgcatccgcagccatcactaaaccgcactaatccattaaaactctaacagcccgccttgtgcgggctttgttctatctgcgaaagcgacagctttcaagtgtaattaacatgtaatgttgtaacactctgtagaggtaacaccagcatgacaagatagaccacttgtaacgttgacgttacatgtataacagcatgacagcgaaagctgtacagatagcattctgtccagttcacccctatcaaataaccccacaataacccacctaaaacctatcggttttaagcggcctgtaaggccgtatatgaagcgatagcttcgctatgttagtctgcaccatcaaggcgagagccttacagcatgaggcttgtaggaggttttaaggccatatgcgattagcataggatgttggttgttttaggtagatttttggtataacccctttcagcgctaccattgtcccggtgatgttaagcgacagcttacatccgctcccattttgcaatggaaattgcatacagttcatcatgcgcttcaaaagtgacttcactttgcatgcggatgcatgctatagtataccctgtgatagctccgctatcccgttttgcatggcacacgaattgcataagcatgacaagggtaaccctcgaaagcggagctttcaaagtgtaggctgagtgtgggctctacctctattatatttgcgaccggaagtagtgacactgaaaacgttgactctagcccagtaaatacgttaaactaaaaggttgatagctgccgctatcgagtaaccaacattcacacaaggaggcacaatgacaagcaacaatcatgccaagattcacatccattacgctaagcaaatctactacgccatgcgtaaacgtgccatcgcaagcgatgagatatgcaaggaatgggccaagcccaagacaggctttgaagcgttctatgattgggtggtgaatgtgtcagggtacgccgtaggctaccgcctagacaggaatatcctcttcccgggaaacaagctctatgctccgcatacatgtgagttcacacctacatacatgcatactctattcaccaactgcgacaagacaagcaataaccgtgccaacaatgatctacctctaggcgtccgcctagcccgtcatgacaagtacggaatgccagtatacgtctcacagtgcaggacactaggcaagcagtctacccttggatcgttcgacgatccgatgcaagcccatgcggcatggcaacatgccaaggtagcagccatcctcgaatgtattgatctctatcagatggaggatgttcacagtgtaaacgttgttcaagcgttgcttgaaagagtggacaaacttggcaaggatattgcacagggaaaagagacaacccttttgcaatgatttgatggggtcgatggtcaaccctctgagagtgcgagaactccgccagagtaatccgatagcgaagctatcaaacgtatatgcatattccatgccaacatgtggaaagatttcacccggcagggcgggagcccgttggcattagttttgcatagcttagctgtcgctaagaaggaaagaccacggccacccattattttggatttactaaggg

SEQ ID NO: 61 - DNA, 94827 bp, synthetic construct
  source 1..94827: mol_type = other DNA
gcttacatccgctcccattttgcaatggaaattgcatacagttcatcatgcgcttcaaaagtgacttcactttgcatgcggatgcatgctatagtataccctgtgatagctccgctatcccgttttgcatggcacacgaattgcataagcatgacaagggtaaccctcgaaagcggagctttcaaagtgtaggctgagtgtgggctctacctctattatatttgcgaccggaagtagtgacactgaaaacgttgactctagcccagtaaatacgttaaactaaaaggttgatagctgccgctatcgagtaaccaacattcacacaaggaggcacaatgacaagcaacaatcatgccaagattcacatccattacgctaagcaaatctactacgccatgcgtaaacgtgccatcgcaagcgatgagatatgcaaggaatgggccaagcccaagacaggctttgaagcgttctatgattgggtggtgaatgtgtcagggtacgccgtaggctaccgcctagacaggaatatcctcttcccgggaaacaagctctatgctccgcatacatgtgagttcacacctacatacatgcatactctattcaccaactgcgacaagacaagcaataaccgtgccaacaatgatctacctctaggcgtccgcctagcccgtcatgacaagtacggaatgccagtatacgtctcacagtgcaggacactaggcaagcagtctacccttggatcgttcgacgatccgatgcaagcccatgcggcatggcaacatgccaaggtagcagccatcctcgaatgtattgatctctatcagatggaggatgttcacagtgtaaacgttgttcaagcgttgcttgaaagagtggacaaacttggcaaggatattgcacagggaaaagagacaacccttttgcaatgatttgatggggtcgatggtcaaccctctgagagtgcgagaactccgccagagtaatccgatagcgaagctatcaaacgtatatgcatattccatgccaacatgtggaaagatttcacccggcagggcgggagcccgttggcattagttttgcatagcttagctgtcgctaagaaggaaagaccacggccacccattattttggatttactaagggttagggtagcgaggtgggttcgtggttaagtagctcggaaataaatccataactggcagaaggcgaaccagcagagggcaggcccgctccctccattattttcccagcagtagaggaggcacactctacaaacgtatcactctattcggcgggggtttaggattcgaatatacctttagcggctaaatgccatcattgcttatttcctattttcgtgctataatccttataggatgttcttattcttcattatagctggataagcgatggttgtatagattcaccacaaatagaaggaatatagaatggaagataatattcaagctccgcttgcagctagtgcaggtggcaaattcgcaactgtatacgaagctattgtcgcactcggagtagaaggggctgccgctgtgtacagggtaggtgtagggaatagattgacaacagctagaccatcggcgtggtaaagagaagccccgggcagcgaaagctgatcccggggctttttattgccttgagtttatgtatgaagagattccagttgtctctgctcttccatatactccctagtggcgtagttcatcatgaggttgcaatactcttcgtttatctggtccatgtattgcaacactttctccatgctctggcatggactaaatccattatgacggagaatcttgcttagattaccctcattccagaagtctctggcccaagcctccaaagctactgcgtagaggcttttgatgcacccgataggggatggataccaatattgctcagacattagaccctccaaacgcagcaaacaccccttgcttagctaggatagtctttagctcctccagtgaaatggtctcgtctcctacgaccacatacttgtctgccttccctagagtcatcacacacttagtctggaaggtaggccgatacaagtcatacacatcgggttgccacttgcttcgcaggccagttccgtagctaatgaaccggtcttcgggatgatcccggatgtataggcaccggggactatcatctggcccatctacggagatagggtgttccatccactccctgatcttatcaacgacgccctctcctaccttcaattgagcgtactgacagtactcaaggaacgcatcaaactgttcggcagtgaaattgctgacatcgatctctttagttttcattctcttcctccatgtctgcaatgatttccttcaacgcttgaagcgtgtaggtgccatttagctctgtagtaggaccagtgtcacactcatgaagcgtgtacgcggtcactttcttctcagtgacgaaatggaagtctacccttcggaagtcgtaggtcgatttcgagtatccaatggcctctttgagttcttcctcgtaccacaggaatgtcattggacttccgtcgcttttacgagtgtagtccagcagattatctccaacccacagtagcacttgagccttgtcgtacatgaagccgtttccgctcccaaactcgataccataagccttaaggtgctgttgtactgcaatgttctcttcgggggtcttcacaatagtgtaaaacttcaccaaacgctctttcaatttcagtcctcctgtctgtgttttatgggagtgtaaaacgttcccagtccattgtcaagccttctgtggtgatagtctgttccagacgctctctagctccttttagaatgatatcccactcatctccttcttggacccctacatacttctccatcatcagcgcacgatcaacaagcccagctctgtagttctgtcgctcttttctacgcgatagcactcttgagatatggtccttcttcttcgccaacacgctgatagctttccttgccataagagttgcatactcgctctcctcggcggtcatccattcctgatacagcagccctagacgagtgtcatgctgtacgagtggaaggtctttccatatgatacctactcgtccagtatcagagacggctttccattccagcgtagtgccgccggtcttatagtcggtgatctttacattctccgagttagattgagactggaaagcgtgcctccagtctcggtatacagtccaccgtttccagtcgaagaatgtctcacagatggctttaacaggttctccgattttaccctccagttctttcaggcggttctcctgctcagcactcatgtatttgataggtcgggaggctggatcgtagcactcctctacctgaaactcctcagcccgagactccaacactttaggctcatcgttactttcttcctctcggaaccatgcgaacagcttcttaaacatattcagtcctcctctcctgtgatagctaccctagtcagtctccacacttttctaggtagactaacgaggaatagcatagccataaacggtacggcgataggccagaatattccagctaacaccgctcgggcctctttcttacgcctctccgtactttctcccctccacccaagaaggggtcgtagagattcccatacgaacatccctatcacagagtagaacaataggcagaccactccgacgactatgcatactagaatgagaagccctacttgttccatggtgcgatcctcttaagtagtttacggctgttccagatagacagagcccacttaggtaacaacaccactttcaaaacgctgtatgttgcgtagagtagcagaaagctagcatacactgtgaatgtaataggccatagcagtcccagtacaatggcaaaagcctcgataccctctctgtgatctttagtcgcactagctgggaagttatctttgaaatactccgtgatacccatgtaggtccacatgaacgcaattccccacgcgagcgcgaggacgaatagcattgggattatctccattactcccctccttttcgaatcaagtcgaagtaggcccacacgtagaagttgcaccacgctctgcctatggcccagccttcccaatagtcttcccagtccttgttcggagggttattctcgaacatggataacacgcatgaatcagctacttcgtccaagaggtgcattaccgaattaagcggcccgattccaaaggtcttatctagccaccccttaaatcgtcccacgtctgagacggtgacgctggagtcactgcacagtgccaatctctccagaatgtagcacatgtaaggctcttcttcgttctcgaagaatgcccgcatgccttccttgattagtggtgcaatactattagagttcattttccctcctttcggatcaggtcgaaataagaccagacataaaagttcatccagttcgtctcagtgtctcttagacaattgcgatgaagataagagataactgattcccacgacgtaatcccgtgctgctctattagccactctctgaatgaccgatactctccgtgggtgatttgcccttcttctactaggtcactcaggatataacacatatatgtgtcccgggcgtttaccgagtaatcttccagtccgatctttatcaactctgcaactgatctcattgtttcctcctctgagagccccactagggctctaaatttttggttcgacctgcggtcagcacatcacaacccagttgtacaggtcggcctcctcataagctgatgggtagcgattgtactccaagaagaacgcgtggtcaatagctgagtatttggttgcgaaactcgtaatgtaagtcagaaacccgttgtcctctttcctgaacagggcgtattcttcagtaccgtccttaaacgtatctagcgagatagtatacttgtcgaagatcacagcatttcctcccggctaatgtagtagttgtagttgtcctcttggacgaggaacgcacgatagaagcctttctcaaagtctcccttgaccagcaccagattgccctccaccttgcatgtatagatatacatggtgtttgctactcggataacaggatcatccccgggacgaacatccagagcagagagcatagcctccattggcatgcttgtcaagtgtgcaactacagccgagcagtattctgcatcgcggccagaagtgtcctctgcataagcaggagcgaccccgcacgaatgcagggcgagtgtaaacgcaatagctacgagtttcttgaacatactaaccctcctcttggtctgtctggggaacatccggctttgggtagacgaatgtctctggatacttcatgcatcttagctcatctttgcagaacccgtcaatcaatttctcatgtgcgaattccgcagccttgtagtagcgattagcctgtcttgcctccactcgaaggaggtggcttatcgtgtgagcgttgatattactaagacttgcaaaaattgtcaagagcttttttgcagaaagaggaatcgacctttcatcgggtctgtaccagtccagccgggcaactccttggagaacgtcgtctacccacaacgggtagtctccgtctagctcgaccatgacttcgtacatttcaggctgaacagcgttgaaaaagaaagagggctttcgccctctgctggtatctagaggaggaacaagccccctctccaccttgtgaatcaaccgatcagcattcgcccctatccgagactttagctcctcgatctcttcacatgtcaacatacggagggcacaccttagatttctcgatagtgaacacgccttcgcatgtcaggttagcaggtccataccacttgaacatgttgttgatatcgtatcgaatcaactggcggaacttctgcccgtcgcacatatccacgtcgaaccacgccacgacccatctgacgtaatcttcagggtcgttctcttctcgccatctgcactctagatcaacgtgactgggctctagaacgtaaatgtcttcgaaccctgtactctggttgttcttaagtcggatgattcgagcgcgaatccattgcatgcacctgcggtttgggtctgtgatatcgcagactaccggaacctctggaacctcaactgtatacatgattgtacctctatttgttttacaagaacgccatgattctgtctctgtctgcatggcggtacagattgaagcaaggcacgcctctagaggacgccagttgccaagcggtcctagtcccgccttctggaatcccgttgtggtctgtcttgctccagcacaccaagaacttgctaggcgtgttgagatcgattcccagcacttggaaaacgttccgagtgtgggctcgtcttgcgaacgggcttagaacggacctcccgtcatttctgacagagttccaagccggatgaatttgactggcaatgcctttagcttcttcccattcagccggcaactcttcctctggcaggatggtagctccgagcgtctccgttatctggtactggttgaagccgggagacggaagatagatttctgccgtagttcctcccttgttattggatatataatccagccagcccgattcgaacgctgagtccgctcccttcgctcctcctgaccgaagaataaaaccttgttctgccagtttacggcctacctctcgaaggatgccccactctctgtttggcgtatccctacttccgactcctgtgtaatacttcataagatcaccatttcggatagctcttctggtgttacccattgatgccggtattctccgttcttcgggttagaatattccaatagaacagggtaatactcgtctcggtaatcggtgtctataacctcgcagttccaacctacagggataggacaagaacgccccttgggggccatcttagttccaatagacaacctgccttgactagccgcctcattgacgcttatcaggctgtatctgtgttttaacgcttcaactaccttgacttggaggtctaaaagttcctcgattgtaaagtggcttacatcgattgtcatattactccctcccttccagtttcttgaattctttgtccagcttagctagatgcttatccaacttgtctagctttttatcctgataaagctggaaagcctccgagcccggggccaaccaagtccccttatacttaattgcaccccggatcatatctcctcctattacagttcgtaaacgtatacctgaaactggccgagcgtctcctcgataagaggctcgacattgctccagtcctctccggctaaaccgcagccaatcttcggcagacctacacacaactccgaggtaggaatcgcccgagcgtcagcctctgcctcaaggaacagagacatagtgtacagggcttggcccagtgcgtcaagctgagtgtagactcgtccctcttctcggccatagttgtactgcccgtacagattgtaaatcgatccatactcgttaattgtgaaggtgagggagccgagtttgcctcgatcccctttcaccgttgcttggtctgcctcgtaggcctccgggaattgctcccggatttgcttagcaatgccgctgcccatggtgttgaagcaattagcctgatgtgcaatagcgtgcaactctttgtttttgaacgcggcgagcaggtcgccctttcggtatttaatcatttgaacctctctacacttgtgaatctgacttcagagcctctcgctccgtgagcaatgtccgcgtacattgagttaatggcagcaaacggggaccaatactccttctcccagattttgaacttgaacattttgtgccctttattttctgggcgaccttgttcgcagaaggttgtaaagtaatatttagctaacacctttatcctccttatactccgttcttaatccgataacggatagatgccaagtcattgttcttcaggtcttcggtgtcccatttcccgtctttgaagaacgtccgcaaggaaccagtagcctcctcctcttcagatacattatctttcaactggaggaatcgcccattttgcaggtctcggtacactttcaggaggcctttagccgacttcttcttgctgtcagttttcgggtctttgaagattgcaatgccttcaccgttcacttccgtgtaggtagctttcactgcgaatccgaaagtatcccgggtgttgcactggtaagtgtaactgccaactccaaacactacgttcagggaagcgaaacctttctccttcaagcgctccaagattttagctgctcggcgagttgtaatggaatctccatagatcaaaccgatatgagaatcgagcatcttatagcctgcttcgttcacagtaccgccgaaggtttcccacagaacttggatagctcctttcacctgcgcctcgctcacttcttcaagtttatagccaattacatactcgtattgatcccactcagtgggaataaccttgaagtacttatcttcaaagttcagaacaaatgcatcgtttccatttactgcatccatgatatcccagtgttcgagcgactcgacaacttcaatatcacccagtccgcagataacctctacaggatcaccagagtctggacgaacaaccagcttgccgtcacgttccatgatctgatccttgatggacggcagaatgtcagtaagcacgccccagaagtcgaagctgtctgccacgtaagacagaataccactcgggaacttacccatcagttcaacaaggaatcgacgttctgcttcctcacggccacctttaccttctccatccttcatttctttctcaatgcggaggatgttactagtagctacagcgtgttcagtcgcaggaacggagcaagctaccaaaccagtcgcgttatagtagtcctcagcataaatagctgctgccaatgtgtccgaacctacgaacgaggtcaagtgaccaacaccactacgggctgcgtcttcgatcccgctcataccccgggcactgaagtcgtggaactgaacggacagcaggaagtcgtcatagcatccagtgtgattcgcgtagtatcggcccatagctgcgtattctgcggcgatagtggcgttagtcgcggtcttccaagtcatagcagaaatcagtgtttcgtggtagttcactagccagtagaactccggcagggtgttcttgatggtgagaacaggcacgcccatcggtacactgacgccttcagtcagagacttgacctccagaggcagatagccgagcttgtgtagggctcgaagctgctccacagcctccatttcccggccaaaatagccagtcaggaaccgggcataccggccaacggcgttctcttcttcagccgcgaagaagccttcccaagactctacgatctccatccaagcggcccgtccgccgacccacttgagagtgccgtcgtagaagtcggtggcatgcgtctttcgataaatcttatcggagcgaggggtcaggttgctatagacaagctgagtcccttccgagtacatggaaccgtgtccaatcttataaccatcggtggaaagatgtggcagaattttcatgttatttcctcctgttgtgttgaataggcccagactacatcaatctgggcctcctgtcaatattcgacttcttctactggcagcgtcagcacagggtagatgcatggaaggcgcagcaatggttgcttcttgctgtggaagtcttcccaaaacttatcgtgcatcgtcttgtaccgagcgtccagttcctccttggtgtcgaactcctccaccttgacaaccctcttctctggagccgaacgcttatactctacaatccagatactcaagctcacaggcgttccgccttggagtattcaaccggaatgacagtcagcgcttcgtgctctttttgagggagcgtatccgaggtgtagatgcatccgaaggaatccagcaagcagtcgatacccttactgaagattccatgagtgacgaacaggtcagggagcactttactgtactctcttagggccttagacacgcttcggaatgtagcacctccgtcacagatatcgtcgatcaccagaagcggaagttcaggatcgatatccgaaggattcagaatttcaaagccttcgattttaccggtctggagatcgcgcttcttattgcaacgaattacagcggctgctccggccttctttgcaaaatcctcggtccgctttgttgctccgatatcaggggctacgagttgatattgctcccactctgaacggctcagtaggccaccgaagaccgaagattgacggacaacttcgacgttgttaatcaggtgcagagttgcgtcgctgtgagggtccacaacgataactcggtcatatccggcagagttcagcatgtttgcaaacactttcaaactgaaggcgtcgcccggattgcaccgacggtcttggcgagcatacgggacataacccagcagaagagtcatgtgcggattaatcatttctgctcggatcgcctcggtgacgttgagaagagccatgatatcatcactattctgaatctgagctttaacgtttacgaacgcatggctttcgatgccgcccacattaacgcccacttcgccgcccgggaacgtccacacttttgcctcttgccacggacggctcataacaccttccatttcctgaaggcaacctacagcataactaatcatacatcctcctcacagtttcacagagaagcgattccgcattgcttccatcgtgctctcgggaacatcgtgtacagacttattcccatgacgattctctacaatcagagagataacagtgtagccaaactcttcagccatgtcaatgtatggtgctacctctcgctcccgggtactagtattggatacgataaccgcatctagtcctatctccatagaccgtcgcgctttgtccatgcactttttgtgagattcaactaccctctcagctttccacacatacttgccgaactccatttggtaatcgtccgcttcgcagatagacgcctgccggcctgactcccaagttttgttatacagaatctcggcaagagaggacttcccggagcccgggagtcctcgaatgatatacatgatcttttcttgcatacttcctcctttaaattcgagccatatcgaagtaggtttcgatcagaagtcgtcgctgtgcatcggtcatttctgagaaccgagcctcatccacttcatttaccaagaagtctaccagaggatagaactcttcgtcaagcgtctgcttgaatccagccgggtcttggtacatcgcattgaccttcttactacccatcctcatgataaacttcttgccgaggtagtgagttgacttgcacttcactgtccctagccctgtttgtaccatgtaaccttctttctcacaagaactcagaagaccctttgcatgttcccagctacactctatgtgctctggacgaagaatctttacagaactgtggtccgttacacctagggcgtgagagtcaagaatatattctgaaagctggcccccagtgaagatatcgcggataccgatcaaatatgccccttcttcttcctcgacaatgtgagggtcgtctggagagcatatctcgaagttatatgtgaagcctgcgatgtaatcatctgggttattcgacacatacttctgaccaagggcaacgtaatcgccggtcaatgaccccgtagtactgaagataagggagccattgtgcttagtcacggagaacatgaatccattcactttctcaatcagccgcacacggaatttaggatggaggaaactcccagcaccattctctcccagattaaacaccttctcgaaggggcgtacaatacaatcaccggagtgctggtcaaatacatgaccccgtgcctccagaagaagcgggtgcttgttccacaagttgtcgtagaataccttacgagcgtatttaataaccgacataccgttgaagtgcttaacagtcaccagcttattagcgatcaggtctttgtacatctcaatatggagtttaccttccatcctattcctccttattctacttctacaatcgggcagaatttagacttcttcgctttcaaatacgacaagaaaatcccatcctttttatcgggcctcttagacatcagtcgagcgagccgatagaagaccgatacaccatagaatacagccgctacggcaatccatataaaccccataatagccaaagtcccgcctagaatgtagccggtcgcgggtccaagtagcagtgcatacaggctggagcctataaccgatgcaaatgcgactgaactgagggctagccacactacaagaaagaccgtttgccagaaataagagcagagagtaacgctcttccatccgctggaaatgtccaagtaggtaggactttcgaatttacgatgcaggcgcatatgccacgaattcttattaatcttcatgcttgttcctccgggaagatgttgaaattgagtacgttgtgctcttcgagttcgaaagaagctaccatcttgtagcctccgagcttgtcaacgatctccagtatactctcgatagagaatttgtcaacatgctgcttcatcagattagagattcgactctgatgagtaccacatctctcagctacttcccgctgagtgaggcccgactgagaaatatagtgtgcagccactgccattacagcctttttgaaatcttgaactgggttgctcatgttaatcctccttattactcagtgtaatttttccgctaaagactcgaaactggctgatctcgaactggtcagtccagcgagcgtcttcgaaagccactccttcgaaagttccatcaaacttgacgtctgaagtcatcagtacaatgaaaggcacgccttcatcgtggatcagctctacaagagtattagccttgggtgtaataccgttttcttcacgtgaaatcaacacattaaccatattatcctctctgtccgtcatggtgatctactaccacaaattcttgattccgcatgtattctctcacttcatcgtaagagaatacctgatgatctgggtgattgtcaatacctacatcaagcctctttcctttggaaggcaagctgccgtgagtgtggccgtgtagatgccaagcaccatgatgagcagtattccacgtctcgaaagggtagtggcacatcacgatcttcactccgtcaattcgaatctccttgtactcacgaatgtcttctacgtgagagagattgctatcagcgatcaacttccacagacgagagtcgcaatggtttcccttcaggaaggtgatacggccattcaactgcttgatgatatccagcacaggctggagcttgttctttcctgcaaatgcgaagtctcccagatggtacacttcgtctacccgacctacccgggagttccaccgagaaataagctcctcagtttgctcctcgaaagtccaaggcctgttgcagtattcgatcacattcttatggaagaagtggagatcggaagagaaaaatacagacattatgcctccttttcaaattcataaatcttgttgatcctgcggatcagtcgaatagcagcccctcccagcagatgctctcgatccggtttcatatgggccattgccttgaactctgacagcatatctcggcgttcatagtggaagtctactacccagtaggtgtctgcattaatcttaccctctcggtacaggtgcccttcaacaccaagccagtggtctactgcgtctttcttcagtaactctttcggagaccacttgtctacaccccgcaacttctcgaagaaagagtaaggacgagaatagttgttgatggcttcctctacagccgactcagcctgcaatttaatgaactcccatcttgcaagaacttctttaatctcctcggtggtggctggggtgtagctgtactgctctttatattcattccacattatactgttctcctacgtagcctttgaatttgtcggaacgggttgtcttcttctgtgccttgttttccagaaccgatgcttccctttcgagcatgctcagttggttgctatacttcttgatccgtttcgcattgccactcatcacagaatttgtaagattggcaatagtgtcgcagattttaacctcttttgcaaccggatgattacggcaaccctcgatatacttccgatagctttcagctcggtttttgtcaagaatgaccagagcctctacgatatgcggcatcacgcccatagactctaagtcctcctctgtcaggtcggtatcctcaagaacgtcatggaggaagcagaccgctagaagggtgtccatgtacggaaagtccgagaaggcctgattcgggtccatatccttcggagcattacgtgctacgcagattgtatgcacttggttcagatggtaggcatacggatagttggtctctccataccgctgaccttcatgggccgagagtgcgatctcgatagcaataccgagctgagttttcatgttaatctcctttgtagaatgtgtggttgcctatcttgatggtacgcttgtacttccgagcccaccgagggagcctgccattattggctctccttacctttctctcgttcaggtagtggtccgctcctcccgttggatcaacagtatacccatacagagcgttgtatgcaacatgttttgctgtctcccacttgtcgggctccttgacgccctgccgcatgctaccatcgcaggtgtacgaatattgacatttgaagtataacactccagctacggtgctgggccacctgtcgtgctgcatcctgttgatgacggtatgagctacagcaatctgcccgatttccggctctccacgggcttcgaagtagaccgcttctgccagcagtctgcaaggctttctgtactcgcacagtgttcgcttgctttctatgatttgagcgggactggcttggaactccactacaggctccgtgccgtattttagacgagagtattccatgtcgaggaacatcccaatgaaggctagaaggatcgacaaaacgagagcttctaaggtttccataacacctccttagacaaagaagcccgccttgtgggcgggctgtatatcactcggctattatacttcagcccaagttgtaacgacgggcgtagtctttgttggggaactcgaccatcatcgactgaatgtgaatgttgcctttacgatccttctggattttggcatttttcacaatcttacaggcctgcgccttagccataagctcagggcttacaaccagatcgatgaaccctgcactccgatacccgcatccggcaggggcccagaagccgtgctgggtcatcgtcgagccgggaacgaggtacaggttgtgcagacgcacagcagtgttgaaactcagcttgctgatatgcttcgcttcccgagtttgggtttcaaaacacccagtcgtgtagttgaatttgtaagtgagagcatccatgaactgaatgacgcttcgaatctggatagcagaagtatccaagagctggaactcctcagccgcgtcgattgcagtggtcacgttgacagacttagcgttgaacattttatatcctccttattcttcagggacaaatacaccgccgattacccagccagcgcgaattagtttaccagttgggaactgagcacgcaaggtctttttgaaacgactttgaatttgcacagttagccacttaccccggtagttctcaaaattagtgatctgatccttgcgttcgtcaaagtcaccgtacgtcacttcaagcagctcttgaggtacagggtcaaacaccaccagaacagcgttcccattcttgtctaccacgtagttcacgatctgcatttccatatcgaagaactctttgtacttctggagaccgctggagcgcttaccagattcgtacaagccctctgggctgcgccacatgataccctcataaccgttctgacggtacacgtcgtgaagacgtttgaggtcttcgaaagtggagcagaatacgtactcaacgaatcgaatactccccagatcactgtgtagtgcagactggaactggaagtctaccagacgctccttgaatgtcaagccttctttcacgatatcgaatacgtgaaattccagtcgctgccgcagtccgtaaataaacgatgtgctatctacttccttaaggagccgatcatactcctcctctccgtcttcaataggataggcgtccagagctttctcggccttcatccacttgtcgtaagcatcctcccgcttaaccgcagagttgatatcttccagcacctccccatggacgtacagttcgccgtcccacacatcaccctcttgcatgatctcttcgagttctttgatgatgtgcggtacattgtaaggtttacccatgcgagacgctagcgtaactacgccattggctttcttagccatgcaacgcaggccgtctagtttaggagagccatacccctctttgtatttagcgggatcaagcggttttgcgagcatagccataacagggagatcgttgagttcttccttggttgcacgataacccttgtccaactgcttgctcaccttggactgagcctcagacacggcctgctcctctacagagcgtttctgcttaccaactcggatgttggtaacctgagaggtcatggctccatgttctttgccgtatttcacgacgatattgaagctaccgtcttcctctccgaccacctctacagtccactccttgaacccgcctttcttgtcgagtccatacagtcgttgaaaataactcattgatcctcctcgtatttgatgacaagaacatcattctcccgtaggtgcctaagaccttcgtcgagccgatattcgtgcttatagtacactactttgatcccagcttcaaccaccgagatagcacaatttttacagcaagagtgagtgacgaacagggtagccccttgggcactctcagggctgcgtataagggccctcagtgcgttttcttcggcatgcctcacctctgccttggttactcccgtttcgtcctccagcggcccgtttaagtgctctggaagggcattatacccgcaactgatgatacggttacgttttactagaactgcaccaaccttggaacgagtcgagtcgctgcacttagcgaaggcctcagcggcctccatgtaagctttaatatgcttaaccttcacacctagcctccgccgacgaggacagcaatctcctcgtactcttcagtggatgcgaactccatgtaatagtcgtccgtatctgacaggtaaacaacgataggcggataataactccatacagggtctccgtgttcgatttcagctaccctcacattgccatacactgtgcgaagagtctgtagagcttcgatcacatcgtcaatacgcattacagttggttcagtcatacctgcctcctcagttttctactttacaaacggcatcgccgcgtcgaaggaacacttgcactgacggctttccgctccacttgtcccacgcttcagctttaacactgacagtcttaggattgatggcaaccacctcgcctaccagcataaccattccagttccgcctaggcagaatgctactgcgtcgccgatctcgatatcccttcctgctacgtccttcatttgtactctccatctacacccttgattaaaataacgaagtccgaggggtcatcactgccgtaggcctttgcccgaaactcctgctcgtatttattcaccgcctccggatcacttttaacctcaagctcttggtagaggtcttccataaaccaacccaagtccgtggtcgcagccgaagccgagaggtgaccaagaagtcctaccagcatattgatctcgtcgctctccaactccaacttgtgaccgttacgttttactactttcatatttcctcctatcgcttctgtccgcgacgagtggctacgccgtaagctggcttgctcccctcgcccgtgttgtgtttcttctgcactcggctggcattgacggtgtaacgccctttgccatactcttcatctatccacgcttgggccttagctcgctgagacgtgtggacaaagatgtagtagccagatgcatccttgataaaccaagtggccgggggctggaagtccagacgtgaaaactcttcatagtcgatcacagtcaccttctgcttagccactgtatactgccccactaccgactcttttgcaatgattttatcaatcatctgagttgaaagatcagagttcttcgaggtcaatttctacctcctttcctagtccagtatctgcaaagaagctatcgagactcagagcgtggtattgagacactttgtaaccaccactcttcagaaggctgtgagcggcctcctctactttgtcctctgtcagtctccagtccgcacctaggagtacttcagctaactgctctacactcggagggttcccaatccacagacccattctactgtcaggctcgtaatcttcttcccatacaagttcccacactaggttactcattggtacacctccttcttacgaatagaatacataacccactcgtcttttcctgtcttcccgcacggaatgtctacttcacactctgcgtttacaatcaggcccgctacgatgaaatcaagaagctcctcgtctggctctggtaagcccgggtaggacgatacaaccctgcggatagtctccgatttggtattgcccagtaccccaagcatgtggaggtcaaactctccactgtagtcgtcccagagttgtccaaatatcacccatacactattcatacctagtaatcctcctttagcttgttggtgtccattaggcagcctccttcttcttgtccagcaacttcaggcatcgtttgcaggtgatatgattgcggtagcgggagaagttcttctcctcgaagtcgccatcggtgccacagaagacgtcatatggttcttcactgtccgcttctgtgccgccgtcccactcgtcgtagtgaactgctcgcgtcgccattcacttcacctcgattccggcttgctggagggcttcgacgcactcatctcgataagcttgaaggtcttcgtcgaatatgactctcggcaggtccaccctcagagccgcgcggctggctttccatgcctgccacatcagcgagtagcggtgtgctgcttctataagagccacgtatacgtggacgttatcggtcttcacaggaaagtagtcggtgttacgccactcgacaccgccgggaatcgggaaacagttttcgaactcctctctcatactccgcaatcctcctgaatttctttaagaagctcagagggcataaccgacagagccagttcctccagagcatggatgtaatcctcgacatatttccattcctttctgatcttctgaaggtacacgccttctttgctgttgtcgatagcctgaccttccagctcctgcatcagttcgaacattttgtatatcctcctatggccgcaaaaatggccggcgactactgtcccggcctgatgatactactctgaaatttcttccattgcaagtcgtttcttttcaaagaaatcgctgagcttgtcttctagctcttcgccaccgatgtaaagctcttcccctgcctttacacgctctagctccttctcagtcaagaagtcactgtagacgtgatctacccatttatcgcaccacgctgagctaaacgctgcattcctcaggctattcctgaaatcagcagatacaacgccaaaagaaggcgcgtggatcatgaaatatgtgaactggtcgatctcaacggagtcgcaggctagcgcgatggcagtcatggcagacgcacactcaccttcgagacgagcatgcactggagcttgacactccttgatcgctcggattatagcgttggcggtctctacctgtccaccgcatccgttaatggtgatgtacacttcatcattctgacctgcattttcaagggtccaaagctcctctgtgagttcttcgaggctctttattacgtatggcagaaggatggagtaacgattgctaacactttgtgtacatgaaacaggcataatacctcctttacaaaaatgggcccgaaagggcccttattactgaatcactcctcgctttctttctggccagagcccagcattgcaaagaatggaaggaggattgtgctcagctctccgctgacagcttcaccaacttctgcaccagcctgagctacactcaggaactcttcagtgcgtacaaacttgtcaaccttaacgagggttttaaagtctactcgttccaagaacgcagcgccggctgcttccgccagaggttcgaggtttacgacttccatagcgcgatccagagcttcctgattgatctctaggccgttctgtgcggcaacctgcatcagggtagacttcacagtctggattgcgtagtctttgaaaaactcacgttgtgctttgttaaacttcattcacttttctcctttgtagtacgacgacggcgggtttttggtttatcttccgattcagtctcttggacttcctctacaggaacttccttagctacttctgtagccttttcctcagtctgcttctctgcaccttctcggaccatcttgacagacttgagagcgaaattcatgttagcgaagtgcgggtcttccacatcaattcggaagccttggtcaaaggcgttctgcatgcccatcagaagactgaaaacgtcccattcttgcacaatgacttcattgccgtcaagctctttttcgatttcctcagaaacgccttcctgacggaacatctggacttgacagagggtgccatacacaggatagccttcgatggagcggacgactcggaaaccttccttcatgtgggcgtgaatcgagcgaagccagacgatagggttgtattctacgatattgataacttgcatattctttttactccttgcgggttagtgttttacaataataccacgtttctcaggaatgtcaacccattttgttctggtagaggcttgacatagaggaaatctgtggtattatcaatattcagcgtgggagagatatgtctgaaagcactcaccggcccacgcctagcgcctatgaagaggaatccacaagggcaacctgaactcgaatgctgttaaagggtggagacgacgcgaaagcggaatgacagcaatccgatgcagcctacatgctgcccctcaccgaactcatctgcatgagtaagaggaattggatagagccaaggcacgtcttaggcagattaaattctgtatggcgagccttgggacgactctatccttccctagccgaatctatctgcatggggtgttctcctgatacacatacacaaatacccaccacagataatccatcaatcaacccataaggaatttctatgagatgtaagtgctgtgatagcgaactctcgtttgagactccagtcatcaataaacatactggtaaggaggacgatctctgctcctcttgccgtaggtttgctctcaatcctacactggatcatgagtattttggtggttggtatccaagcgaaggggttaccgctcctctccctaccggggactgacattgtatatagagtgcgcgtactctgacaatatgtataaatagtagattacggtgcgaataattctttaagggcttgacaacaggagatttcgtgctataatcggagtatatggggcttacaaagcttcagaggatttaatatgactcaagaaagaaacaagggcggtcgccctacgaatgccgagctagaagcccggggtatcattcagacagacctgaaagcagggcttagacttctaaagaagagctttgcagagaacatcagattcctccaagagcaatctgacaacccagaggtctctctacagatgagaatcaagctcaagaaagagctttctgacatgttcgtcgcttactacaaagctgacattgcactcaaaaaagagcttgcaaaaggaacagaatcaggagataatgagaactctgaagaggacaagactcccggagtcgttctcgcgttttgattaattgccgcttcgttcaatggtaggacgccagactttgaatctggagatgatggttcgatcccatcagcggctgccaaatgtagtaaaagaacattcacccgacaaggaatgtgtctcgctcagaggacagcgagtaataagtgtcctccagaattaagggtcggtgagcgtaattggcaacctactggattccaaatcctcgtattctctgttcgaatcggagtcggcccgccaaattagtgttgacaggagcaaagacctcttgtatagttacaccaactgctcgtatagtgtaatggacagcacaacggtcttctaagccgtaaggtctaggttcgaatcctagtatgagcgccaaattagatggacggaagctaaaggtgccacctgggtccttttcatcacgtgctataaaaataattataatttaaattttttaatataaatatataaattaaaaatagaaagtaaaaaaagaaattaaagaaaaaatagtttttgttttccgaagatgtaaaagactctagggggatcgccaacaaatactaccttttatcttgctcttcctgctctcaggtattaatgccgaattgtttcatcttgtctgtgtagaagaccacacacgaaaatcctgtgattttacattttacttatcgttaatcgaatgtatatctatttaatctgcttttcttgtctaataaatatatatgtaaagtacgctttttgttgaaattttttaaacctttgtttatttttttttcttcattccgtaactcttctaccttctttatttactttctaaaatccaaatacaaaacataaaaataaataaacacagagtaaattcccaaattattccatcattaaaagatacgaggcgcgtgtaagttacaggcaagcgatccgtcctaagaaaccaccactgctcactgccaaaataagtgattttaagtgttgacaaactgaatttttcatgttttaatacacttatcagatgaagaaacaattagcgagtagccctgagtaggtcgggaactagtctagaaaactaggccactgcgatgagcggtgagggttcaactcctttactcgctgccaaattaaggccctgtggtggaattggtatacacatcagtcttagaaactgacgccgagaggattgagggttcaagtccctccggggccaccaaattaagaatctcttttgctatttggttagggttcgagtccctacccggcgactatggccggtctatggcggccaaatagtgagagagctaggggacatgacgaaggtagcgctgctttccgatctccccggcgctataaaagttatcatgaaggggttgacaaacaagaaattcatgataatataggtacatagagtaacaaacaatgtagccgggtagctcaattggtagagcacccgaccgataatcgggtggttgaaggttcaagtccttctctggctaccagaatttaaaggcccattagctcagtctggactagagcaagcccctgtctagggcaaggtcgtcggttcgaatccgacatgggtcgccaacaaggtcgttgtagagatagatggctactatcatccggctgtaacccggacgccataggctagaggttcaattccttccttcgaccaccaaatagcgagagcgttaagactggctggcgctgtcactcggctcataaccgaacacaagtggttcgattccacctctcgctaccaaattgcactccgaggaaccctaagtggtgggttcagtgtcgctacctatctcggtaaggggaagcgcctaagctggcacgggtaattgagtagctgtgataagctactggcagccagtataaatcgtccggctcgggcccgttatagctcctagatttgaattagatgctgtaagccataggaggtgatccagtatctcccggaggggcccgggttaacaacctcatgaatttagcccgcgttggccgagaggtttaggcggcggattgcaaatccgtctcacatcggttcaaatccgatacgcggctccaaagtttattgggatgtagctcagtggtagagcagggagctgttaactctcaggtcgcaggttcgagccctgccgtcccagccaatttccaaaagagactcttcgctttagaagcagagtcgaacgcccgatacgggccttattatctcctcgtagctcagtctggttagagtgtcggatttggaatccgaaggtcgaaggttcaaatccttccggggtgaccaatttaaagcgggtttcgtatagtctggttattattcttggcttccacccaagagactagggttcgaatccctaagcccgcaccaaaagtcgtagacctcagtaacccggagtaacgcccgggagaagatgtgagttctacgtatacgcgtctgaagctaactaggtagaagcaccgggttgaaattccggaggacttggatcgttaccaagcgggcgcaccaaacaatgcagttatagattaaatggataaatcgccagactttcaatctggtgttccgggttcgatccccggtaactgctccaatcaagtccaagccggaacattcctccgtatgtgctttcagccggcttggcattatcagtgtggagattgtgcagcccggatgctgccttccggttgtgacccggttgttggggttcgagtccccgcctccaaccaatgttgtggaattgaatcacaggacgacgactgggtgagattgagcgtcctctagcccgaaagggtgttcgcgcaaggcgaaccgaagccgaaaggctgaagtggtgcccggacccacaaccaatgttgtgtaatggaactattacgttgacgctgtgtgctctccggatcgtaagccggtaaagcgggaatagcgggctcccgtagcagagtagtagtgtggttcgattccacagcacgacacctttcctcctcgcctgtgctgaacggtttcctcctcctttcccgtctcacaggctctattccctgccctttaagcatttatggtgatgcaccggctttgtaacccggcgaattctgttcaagtcaggaatggggcaccaattcactatcaaagaacccgcaagctcccgatagggttcacactctataaggttgtagcatggaaaacactaaggttcctgataaaaaactcggaccaatcgcgctagcgcttaaagaggccagagagaatttcgatctcagccctcatgttattggtccaaaatctttcaaacagaaggagttcacagacagcgatgcaaagatcactgtattcggtggtgctgctggtgctggtaagtcttatctcggtgtaatggacttcatgaaatatatccatgatcctaacttccgaggtgtaatgactcgtcgtactactcctcagattaaaggcccgggcggtctgcttgaaaaagcaacagacctattcaagctcgttgaccctaaagtcaagtggaaagacaaagacggcaagtttgtgttctcttctggtgcagttattttccttcgacacttcgaacaagaatctgacaaagactccttccaaggttgggaggttagtaagttcctagtcgacgaaggtcagcagttcacagaaggcatggtgacataccttatctctcgtatgcgtaacccgaaatgctcggttgttccgcacatgaagattacatgtaaccctgattacaattcgttccttcgtaaatggattgaatggtggctagaccctgacacaggaatcccgatccctgagcgctccggcgtaactcgctggtttgtacgcaaaggcggtaagatgttctggggagacaccaaggaagagtgcattgcccttcatggtaatcccagtctagcgcctgacgatgaagatcaggtgaagcctatcagcttcaaattcatcgcggctaactgtttcgataacccaatcttgatgctcaacgaccctgagtatgtagctaaccttgaagcccttcctagggtagaacgtgaaaagctcctagacggtagctggcacgctagagaagagggagctggatacttcacaagggactggtgccaaatcgttccccatccgcctctacgggcgcttaaaagggtacgtgcatgggacatcagcggtagcattgaatccgaaaccaacagaaaccccgactggacagccggcgtgctgatgagccgtacaaaagaaggcttgttcactgtcgaggatgttgtcagagagcgtaggttgttcggaggtgttttcgacctcattctagaaacagccaagcaagacggtcaagacgttgaaattcaaatcccatgtgacccgggggctgctggtaaagcttatgctgcacagctaattagagacctagcggatcatggattccacgccagaccgaagacaactaacaaatcgaaagttactcgattcgccccgttcgtatctgtagctgaaactaaatcagtgcaagtcgttgcgggagattggaacgaagattacttcgatgaacttgagcgattcgacggaagtaaggctatcaaagatgaccaagttgacgctacatcagatgcatttaatgctctatcccttggcagcttgattatccctgatttcctaccgcctgatatgactcaatccaacaaattcaaactaaattaataggaggcggcgatggccgagactgaaaagacagcaccgggtatcccgcgacttcgcctaggcgagattggtagtacaggccttaaacaagtcaatggtactattctggaagaacgccgaccagaacttcggttccctagggcatgcagaacattccaaatgatggcggaagaccctaccatcaaatcagcactcgatctcttcgaaatgatgatgagcagggttgactgggaagttgatctaggagttgaccccgacgaggctatgaaggcccggggtaaattcctgaaagagtgcatgcatgacatggaacacagttggtactccttcatcaaagaggtcactagcttctacacctacggattctccgtacatgaaatggtgtttaagcgacgtgaaggataccctgtatcgaagtacaatgacaacaaattcggtattaaaaagttgccaatccgctctcagtctactatcaccaaatggttgtactctgaagacggtagaaacttcctagggtgtgagcaaagtcttgccaatgttgtcaatggcgaccgttacgtcaacctaggtaataaggacggaactgtagagattccagctaagaagatgcttcttttccgggtcgatgctaaacgtgacagtcctgaaggtaacagccctctccgtgcgtgctataacgcttggagatatcgagtagagattgaagagcaagagtccgttggcgtaacacgcgatatgaacggtatgcctacgctctatctgcctcctcgatatatgtccgaagatgctacagaagctgagagggcagtctacgaatactacaagcgagtaattcgtaacattcaaatgaatgaacaatctggacttatccttcctcaagcgtttgacccagaaagccgacaacctctgttcaaattcgaactgacctcttcgcagggcagtaagatgtatgatacagatgccatcattcgtcgctgggacaacaaaattctgcaagccttgtttgccgatatgctgaagatgggtcaggaccaagttggctcttactctctagctggtgccaagactaacatcatggctatggcgattgaatcgcggctccgcgaaatcaaagacgtactagataataaactcattcctacgctgttcgcactgaacggtgattatagtccagacttgccgaagctgcaatacggcgagctagatgaaatcgatcttgaagagttctcgaaagggattcagagaatcggttctgtcggtggtcttgaacgtgaccgtgaggtttacaacaagattcgcaaagctctcaagattaagcctcgaccagacgacgagcctgttgatgtggataatatcatgggtggtcagtctcaagcaggtaaagctggagtaggtaatggtgcatcaacatccgcagccggtagagacaacgccgctgcaaataacgcataaggagacagaatgctgactcttgaaagtgttattgaagctctcagcaatgctttcggggctcccgccaaggcggaagaagccccggctgtagaggtcacaaagtccctagacaatgaaaagaggatggctttgtttgtcgttcttgagccccaagaaggcgactccacgactgacctacacgcagacacctactccgaagaggaagtagagaaagcttgcatcaacttcaatactcattgcaacgtagctaatatcttccacaagattgaaacacaggaagctgagattgtccagtccttcatcgctccatccgcattcacaactgacgacggaagagagatcaagaaaggtacatggctccagtggtggcacttccctgaaggctctgaagtagccgatgcactatgggaaggcgttaaatctggtgaattcacaggcgtctctatcggtgccagagctacagtcgaggatatcgaatgaccgtaaaagcaaaacgtaaactgaccgatatcaagtttgaacacgaaggtgctcatgtcgctctggtcagtaagctccaaggtggtgcagccaacgggcacactactctaatcacaaaagctaccaatggcgtaactgaagagcttatcgataaagctgctgaagttacagtcacaatgcagttccctgagttccttcgtaagttcttcgggatgtattatgaagatgccgaagttctctctgttgccatgggatatggcagaacggagtatccagaactagatcacaaagactggatcgaccagcgggtcgagtctatgtccattcttaagtcggtttataaatcggctgacctgaatcaagctctctccgagcttacccctgagcagaccctttcccttaaacaggatcaggaactgcttgaaaaggctctggaggtagtctccgagcaatccaatgaaaatccatccaaggagattaccaacatggaaactatcctgaaatcggcccacctagaagctctagctgacgctattgcagttgaaaaagctgctggtgtcgctgctgttgcagaagttcagaagcaactagacgccgctaatgtagagcttacagctcttcgtgaaattgtcaaggctgctgaggcagagaaaaccgctgctatcgctaaagcccgtaaagagcaactggctgaagtcctcccggctgaccaagtagaagatactttcaagtctctggaagttctggacgatcaagcttttgcacaaacagtaggaacgctccgcattcttaaagctgctgctgaccaaaatgacatgcttgtcgagaaaggtgtatcgggcgctggggaagaagacgactctgttgtcgccggtgttgccgctatcctgaaagctcgccacggctccaagtaatatctagccaatctagaggaattccaaatggctcaaaacattatcgcaaaagatcatcagcgtcttagcaactggctgaaagaagaacaaatgggccaccgtggcctgttctacactcgcgaaactctgcctgtcgctgacattgatgttaaaacaactggttctgtcctagacagcactggcaagctggtaactaaggctactatcgccgacgctacctacatcctaattaccgacctgcacgactatgccaacgctcagatgagccacgctgtcgtccttgctcgcggttttgccaagatcggctccaaggctgttatcttcggtgctgacgttgacgacgctgataaagctaccgtctttgaagctttcaaagccaagaacatcttcgccgttgaccagatcgaaggcgcattcgagaacgtcaccttcgcgtaagcgagggtcgttccagtaaataaacactaggagtaactttaaaatggctaacacccgttcctacctaaacgatggtcagttctacattgccgaccagactgaaaacctgcttatcatcccgaacacttggaccctcgtcgagaacatgggcgtcttcacaagtgaaggtgtgactcagaacactgtccagttcgaagagatcgaaactcgctacggtctggttaaggatgccatccgtggaactcgtcaccaagttgctagcgaccaacgtcgtcaactgcgtgccttcgcgattccgcacttcaaccaagacgactacatcactccagaagacattcaaggcaagcgcgctttcggtgctgaccgcgaagaaactctgaacgaggttcgtgctcgtaagctggaaaccatccgtcgcaactgggctaacaccgctgaagttgcttccgttagcgctatcgtaacaggtaagagctacgccccagccggaaccatcgagtacgactggtacgacctgatgggtaaaactcgtaaggttgtcggcttcgacctgaccaaccctaccgctgacgttatgggcaagaccgaagaaatcttcgtccatatgcaagacaacagccaagacggtctgatccgtggtgacttcgttgccctgtgctctcctgagttcttcactgccctgattaaccatccgagcatcaaagagttctacaaagcttaccaagctagtcctcaatactggcgtgaacgtctaaccgctcgcggtctggaccttcgcttccgtgagttctacttcggaaacattcacttcatcgaataccgtggcgttgacccgtacggcaaccgtctgatcccggctggcgatgcttacttcatcccaaccgacagcggtgacctgttcgctcgttacttcggcccgggcagcactttcgatgacctaggaactctgggtaaagaactgtacgctaccgagcgtatggctgaagaccgtcgttcgatcctgatcgaaaccgagtccaacttcatccacgttctacgtcgtccacagatgatcgttcgcggcactgtgaatgcgtaacggctaaggatttaaggtaaggaggtttatttatgcaccccttcgatcaagcggtcgtgaaggatccgaccgcgtcctacgtggacgtcaaggcgcggcggacgttcctgcagagcggccaactggacgatcgcctcaaggcggcgctgccgaaagaatatgactgcaccaccgaagcgacccccaatccgcagcaaggggaaatggtcatcccgcggcgctatctgtcggggaaccatggcccggtcaatccggattacgagccggtggtgaccctctaccgcgacttcgagaagatcagcgcgacgctgggcaacctctacgtggcgaccggcaaacccgtctatgccacctgcctgctgaatatgctcgacaaatgggccaaagcggatgccctgctcaattatgatccgaaaagccaaagctggtatcaggtcgagtggtcggcggcgaccgcggcgttcgccctgagcacgatgatggcggaacccaacgtcgacaccgcccaacgcgaacgggtcgtgaagtggctcaaccgggtcgcgcggcaccaaacgtcgttcccgggcggggacacgtcgtgctgcaacaatcacagctattggcgggggcaagaggcgacgatcatcggcgtgatctccaaagacgatgaactgttccgctgggggctcggccggtatgtccaagccatggggctgatcaacgaggatggcagcttcgtccatgaaatgacgcgccacgagcagtcgctccattatcaaaactatgccatgctccccctcacgatgatcgccgagaccgcgtcgcgccagggcatcgacctctatgcgtacaaggaaaacgggcgggacatccatagcgcccgcaaattcgtcttcgccgccgtgaaaaatccggacctgatcaaaaaatacgcctccgaaccgcaggatacgcgggcgttcaagcccgggcggggcgacctcaattggatcgaatatcaacgggcccgcttcgggttcgcggatgagctgggcttcatgaccgtgcccatcttcgatccgcggaccggcgggtcgggcacgctgctggcgtataaaccccaaggcgcggccgcccaggcccccgtcagcctcgaacatcaccaccaccaccactgaagacttcagggaggcttcggcctccctttcgtcgtaggagggtaccaaaatggcttacactggtgatccagcaaacaaccctatcgaccgtctacgagagattgtaggggacgtgtgggagcctccgatgctttccgacgaaacctatcaatgggtgttggacaagaacgaaggcaacgaaagacgagccgcacttgaacttatgcgtatgatgctcttccgcctgacaaggggaatgagagaacgcacaggtgatatcgaagtatatggtgctgagtatttcaacaactacttgaaagctcttcagctcattctcaaagacccgaatattgcaatttctttggccgtgccatatgctggcggtatctccaaatcggatatgctggctaatgacctagaccccgacaacgtaacacgggaattctacatcggttttgcaagacgggagaagctttacaaccagtgcaaccccggtcctcaagaccttagcatggggtgtgattatcttggcaagcttcagttttaaaacagatcgccgtcgcctcacatccttgattaagagggtggaggctctagacggaacaacggtagaagttggtttcttccccgaggaccgatatggttctgaaaatggaaacctaccagttgcacaagttgcagcttacaacgaattcggtactactcgcaacccaacccggccattcatggctccaacctttgaagaattcacatctcaattccactacgcaagactaatgaagtccacgttcgagaacgtcctacgcgatggaaggcagacgaatactcttctgaagaaattgggtaaaatggttgcagagcagatgcaagttaacattgacgactatccgggctctaacagtccggcatgggcagcttacaaaggatttaacgatcctctattccatactggaaagatgcttgagtctgtcaagttccaaatccatcggaggcaataatgctctatcctaccttctccatgaccaacttcgtaaagctagatttgattagaagagggcagcccggagacgacggttttggaagacctacccctccagttgagacagtagtaacaatcacagctaacgttcaacctatcgaaaaatcgacagacactcgtatccttccagaggccgacagaagcaaggcttgcttcaaggtgtactccagaggcgaagagattcgacagttaaaggaaggcccgggagggtggagtgccgatagattcatgtgggaaggagagttgtatgaagttatgaaagtcatcaactattcgatgggaatcctaaaccattacaaagcaatttgtatgagagtagagaggaatagcacagcatgatccacacagagctagaaaactccctctatcttatggtcaaagagttgttccccgactggcgtgtaattcaagcttacacgaataatcaggaaccgcaaaccccttatctggctatcgacattaagaggctggatgaactgggaagggaaaatgtctccaatatgagcgatcccattagtccttcgcatggaactattcaagttcaacaggacttcgcagccaaagtcgtattcgaactgattggcaagtatggagagacagcaagtgtctctgacatggcaatggcgattactcgggcaatgcgtactccagcaggacacgccgcccaaagaaagtttaatctatcccttttcaaactccctagcacaagacgagttcctatgctaagagaaacagatatgtacatgttctatcaagttacatgtgaatttggattctctgttatagaaaccacaactcaagagtttgctgctggggctgatattcacggcgtttattacgacgctggtcgcccgggtcacattattgagtcccacatcgacataaacttcgaacactaataggagacaggaatgactgttcttactgatgtaattgacattcagatcagccgtgagactgctgctgtcgcacagacaaacttcaacgttcctctgttcatcgcttctcacacaaacttctcggaacgtgccagagtctacaacagcctgaaaggtgtcgctgaagacttcggagaatccgatccaacatatcttgccgctgttcgctacttcggtcaagctctcaagcctcgcagtctagttatcggacgcagacaagttccttctgctaccgtctctgtcagtgttgttcaggaaggacaaagctacgtccttaccgttaacggactacctgtcagctatgttagccagcaagacgacactgctactctgattgccacaggcctaaaggcagcttatgacgtaactccggtagccggcgtaaccgtcacagacaacgaagacggaactctaaccgtcgcttctaacgaagactggagcctgaaggtttcttctaacctgactatggctgctgctccctctactgaaggttggccggctgctatcacagcagttcaaggagaaaacgacgaatggtatgctctgagcattgacagccacgccgatgatgatatcatggcagtagctactcatatcgagggcaccaagaaagtgtttatcggagccactgctcaggctaacaccaagacttccgcagagaatgacattgcttctcgtctggttgctgccgggttccaacgtacggctctaatttaccatccaaacgctgacgctcaattccctgagtgtgcttgggtaggataccaactgcaagagcaaccgggtagcaacacatggacccataaagctctagctgccgtagatgcttaccgtctaaccccaaccgaatctaccaacctgaagaacaagaacgttaccacgttcgagcgcgttggtggtgtcaaccgtacattcggtggcgctatggccggtggtgaatggatcgacgtaatgattttcgtggactggctggaagcccgcatgaccgagcgtctgtggttccgtatggctaactccaagaaaatcccttacgacgccgttggtgcaacaattctggaatcggaaatcagagcccagcttaacgaaggaattcgtgttggtggtctggctgaagctccggctcctaaagtcttcgtacctgatgttctatccatgtctccgaacatgagagcacagcgtatctttgaaggcattgaatttgaagcccgtctggccggtgccattcacttcgttcacattcgtggaactgtgaccgtctaaggacggtccttcccataaggagattactaaatggctgttcaacgtctagcgacattctctccggctgatgttaccattgttattactcaccctgcaactggtgagagcatggttctcggcggattcagcgaagacagtatcgttaacattgaaagaaacgctgacacttacgtgatgtataccggagccgacaacacatcgactcgcgtctacaacgcctctaagtctgctaccctcactgttagccttcaacaaacttcgccttcgaacgacttcctgactgctctttacaactacgacgacgcccgtcgttcgtctgagggattgttcacaatccacgttaaagacaactctggtcgttccgactacttcagtgatgacgcctatgtcggtgttgttccgggttctaacttctcgaacagcatgcagacacgcgattgggttattcatgcacacaacctgcaaactctaatcggcggtaacgccaagctgagcccgggtgatgcggatactcttcgtaacctaggtgtcacactagaccagcgctggctgtaatatagcgcttatgccacatcgacggggagctgccttaacgggtggctccctttgttgtttctggaggatagaaattgattaccacctactcgccgcgtgacgtggttgtaactctcgctggtatccattccgtgacagggtacgcagagggagagtttatcagaattgtaaaagatattaagcctttcatcaagcacggttcgatggatggtgaaatcgcaagggtctacaacaaagaccaaggctggcgagtagagttgacaatcatgcagtcctcgccgaccaatgatatcctttcgatgctttacaacgtggacattgcaacccgaatgggaaaattcccactgatgattaaggacacgaagggttctacaagcttcctagctctgacagcatgggtggaagacctacctagggtatctttctctggacaactggagacccgcacttggattctagggtgctctgaggtcgccatgaacattggcggaaacgtcgatcaaagtttggtcgagcaagctatcctgctgggaagctctcttctgccagcccttacgcaattcggaggcttctaatggctaacacggtattgacatatagcccatctgatgttaaaattgtcctttgtgggtatgctctcactggtgtagtttctttcgaaatgtcttggctttcgagaccctacacaatggttcgaggaatcagagggcaccacacccgggtcttcaatagagacctttctgcgcagattagaatcgaggttcttcagacttcggtgtctaatgatgcattcttctcgctagtagagcaagaccgaagaacacaatccgcccgaatcaccttgtctgtcaaggatacccacggtagcaccatgatgagcacagacaacgcttatgtcaatggctaccctagcataacattcaccgatggaatcgagaacagggtctggactattgatgttctggactggaccgatggcacggtaggcggaaaccagcaagtcggcttcgacgtgtttggaactgttcaaggcgctcttagctacctcagataaataaggagtatttatgttcggaaaccaacgtactgtcatccacaatgggacagaatacactatcaaccttctgccagcaactcgcggtatcagcgtactgaagcagctaaccagcttgctgggtccatcccttgccaagtatcaagctgaccacgacttctctggagccatgaaagaactgttcgataacatcgacaaggttcctgttgagaatttgatccagaatctgatgctgacagttttcaaaggttcgatggcaatcaatttcgacaccgaattcgctggcaagtatgacctgctgtacgcactcacaaaagacgtgatcgagttcaacttcggctcggttttttctctaatcggtttcgcagaggcaccgacggtataaagaccggggatgggcagtccgagacttcagtcactactgatcgagttcagagtgatcggagggttagggaggcccaccagaagttctcgcagcattgggagatttatgtggctatcactcaccctctcaagctaacgacgtatggggaactgagtacagtcctcactacagaagatttgtacaacatccttgaggttatagacgttcacgatactatcactcaagtggcaaaagaacacgcagaggctgataagaaatgattacagaaaggattgcccagctaactggggaacttaaatttacagtcgattcccggcctctcactgcttttgacaagaagctcgctggggtcgaagcccggctaagagaattctccaagctgacgaacaagcggtttggagttaagctaactctagatacaaaaactctgagagaggagcttgccaaggcagccactcaaagggtagtcttgaagaacatcgcggtagatgctgccgctgttcgtcttatctctgagaagcttcaagaaagactgaatgcaacgccgatcaggttgaagtctgttaggctagaccttagcggtatccgagatcagaaaaacttcgtaaagacggctctcggccagaccaaggtcgatctaccggttgaactgggcttggctcaggctagccgtacgctgtatgaatggaagaagcgcacagagagtcgttttaaaattcatctgaatgcagacattagccgctctaaattgctccagaatgcacgaaacacactaagggatgtgcagggtaggctaaacggtcttgctgtcgctacgcctcaaattaggctgtctgtagaccgtgcccatcttcgtagagagattcaagatgttcttgagcaaatcagacgcgaagtgagaatccgcattgacctagagtcttccatccgaggaggtggtgcaggtggatcgagaggtactgccggccatatccgtcaaggtatgggaatggggattggtagcgagctagccgggtggggacgcgggtttattcccggccttggtggtgcgttcgctattatgcagcttaaccgtgctaaccaagaactgcaaggtcaacgtctggccatgcaagctgtcggtggtggagtacagggtggtcaagagctacaagccaccctccgcgatatctctcagcgtctcggtcttgacgatagagcaataggtagctcctatgttaagatgatggctgccggacaagcatccaacttcgacaaaacacaggttgatggcatcttccaatccatggctgaatatggacgagtgatgggtctggacggggaggctatgaaaggctccttccgtgccgtagagcagatgatgggtaaaggacagatcatgtccgaagaattgaaaggtcagttggccgaaagattccccgctgctgtagctctgatggctaagtctcaagacatgactatcgcagagctaatgaaaaccatggagaaaggggagcttaagagtgatgctctgatcccattcgccagaactctagcggaagaagctcgtaaaggtggcgctctggacgcggctatgcaaggtacagccgctcagcagggccgattccagttcggatggaaccgcactatcgaggccttcgcggctggaggattcgaccgaggaatgagcgacttcttcaagattgctgcccaaggcatgaaagaagcgcttcctctggtaactgcacttggtggcgggttcgaagctcttatgaggcctgtcaacgctctggtcggtattggaggggagcttggttcccagtgggagaacattgccaagcagttcaacatgaccggcacagggctgactcttaccacggctcaaaccctagccttgctgacccctatgggcaggttgatctctgctattagctggggtgcgttggcactggaagacttcattgtcttcttggaaggcggtgattcggtgttcggggacttcttgaacaacaacgtacaagctgccgagacattcgaaaagctagccagtgaatccagtgaactgaagaacaatctcgacggtatcttctctgttgtcccggggctagctgaagcgctcaaaggtctagagttcaatgaaatgctggtcagcacgatgagagaacttgctgccatcatggagttcttcaacagtgttgtagagagattcgcaatagccggcaagtacagggacgctaagattgctgaagccggaggagacagaagtactataatgtcgaacatcgacacgatgtacgctatgttcaatccggaagatgcaaaagacaaggccaccttcatcggtgacaggctagtagctcagaacattgacgcgatccagacagagactcatacccgtgcaacccagtccttgactccagaccagtttgggtatatgatgcaacgtggtcaagttagaaacgaaatggagggtgccctcaagaagagtgccattgacattagtttcaacctcaatgtttctggtatcgatgctcagggtaacgtcatgacaactgaagcgcaagagcgagtacgagagatcgttagtaacgttcttgaggaagaaatctccagagcttcggcaagttataaggaatcccaatgacaattgctatcaaaagagagaacggagacctaatctggttcgacgctgttacagagttcggaagacagtaccgtggctctgtgagttccaacccaatcgaaacgggaggaaaaatcacagaccacattactacagaaaacccagtcttcactcttacagccgtcgtatcagacgcagacttcaacttgaacaggcccgttatcaacgacaacgaggcccagacatacaagatcaacaacaaagagttcgtgaatacgcagccggtaaccatcccggctgttatctcaacctctagactagaccctagcagaatctttccagaagttatcactcagtttattcctcctgagattccttctgcaactgtcctccctcaaaagggtgataaagtcgcttatgatattgagcgccaactgatcgacatgcagcgtaatgctgaggtcttcagtttgctggacttccgagacggtatcatctgggatcaaatcgaaagatgcatcttcaccgacttgtctttcactgaaaacgccgagacaggtagcagccttcaacctcgtatgacaatcgaggctgtgacattcacagatactcgttatgtcgaggtgagggttaacaagggtagaaagaccgctaagaaagaaaagagagacaccaaagaaggtgataccggggctagcaatgctaccagccaagactctcctacattcaagcgtagtcaaatgaaagaggctcagattagaactcaggttgcgaggtagactaaatgagcacgacttatatcgacacacttcctctctaccaagaccggaagtacagatacgcagtagctatcgagggaatctcaagagtccttcaattctactggaatagccgctctcggcagtggcacatggatatattcgacgaggaacttaaccctatcctgacaggactggcggttgttcctcagtatccgatcatggcagactacgccatgcaacatataggtttcaatggctacttcctactgatgcctgtcaacctagaacaggtacagtataagcacgatgcaagtgacattgtaccacagtttttcgaactgctatacgtgaacgttgacttggaggatgacgtagagtgaaacaatatgacagagtgtataaactaacgctcggtaacactgaatccgggcaaggtgtagagattacaaacctccaccctgacggaagtttgaacagagagggacttcagttccggtttgatatctctaaaagttcagataacaagaagagcggaaactcggcgactgttgagatatacaatctgtctattgccactctgaacattcttgaaactgagtatctgacgtgccgactagaagttggttataaggaaatgggaacttctgttgtgcttgatggcaacgtggttgaaacttcgactagaaagagtggtaacgattatgtcactcagcttattctaggtgaaggatatacagcactaacagagaccaagctgaagggcacagtatctccgggcaaaactgtaaaggatgttatcgaagaaattcgtcttcaaatgccgggagtggacagaggagcttatacaggcctcaattgcaacaacccgatcatgtatggataccaactacgtggactggctaaagacgcactaaacagtgtgtgtgaagccaacaatattgaatggaacatcagtggaaacgttctaaacgtcacagacgttaacggcccaacaacgaagagtgttcaaatggctcctctcgtaaacagagagaccggcctgattgatatcccattctacgccagtgccagcggaacagcacagaagaaagaccagcggagacggaggggcgttcaattcaaatgccttctcaaccctgagctaactcccggggttcttgtccgggtagagtcggacagattgtcaggcactttcagaatcaacaacgtccgaatctcgggcggatacagagacaacgaatggtacactgaatgctggtgttccgatcttaaccaagaggatattgaccaatgaggagaacaggcctacaagagcttctgaacctgcactcgtccacagagggttcgaagcagtacactgccataccttgtgtggtattgcgcgttctggacgattttagacgcctatctgtcgatgttagaccagtggtcaacgacctgtacaaagacggcacatcggaagagcaaccagagattctatctgtccctgtcattatgccgggaacagctaacacacttatcagcttcccattgaatgttggggatacggtgttgtgtgtattctctcaaagaactatggacgtgtttaaaggctctgccactggacagccacacactccaaacgatcttcgtaagttcaacatggcggatgccattgccattcccgggctgttcaccttccctaggtcgatgaacgaccctgcaagacatagttggccacatgataccaaagaccttactattgcccacaacctgatgacgggacaagaggcggaagttaggatcaaagccaatggagatattctaatcaacagccgcaagactataagcattaatgctcaaaatgtcaacgtcaagtgtgcttcactcactgtcgatgcagcccatacaacatggaacgggaacattgcacatacaggtaactacgtgcagactggtggaacttctacattcaacggtattccattccacactcacaaacacggtggtgttatgccgggcggcggtgttactgctgtcccacaagcttaaaggagatcatatggacttgtttgtcaaccccgacacacatgacttggtttttataaatggtgaagctccagtcactcaacgaatggttgatattgttgctcagcgactaaagatcaaactgtacacattcctaggtgagtggttcttggatgataggatcggcatcccctacttcgagaggattcttggtaagtctaggagccttcccgctgttgacgcgatattccaatctgagattatgagagaccccggcgtccttgagattacatcttggcagtcggggatcgaccctcacacacgtgaatactccatggagttcacagtcagaaccacagacaatacagaatcccttcccatcactttcagaatgataggagtttaatatggctggaattacagcagaaggtctaacgattaaagacttggaccaaatcctgacagactacagaaacgtagcctctcaggtcttcgccgacctagtttcaactggagacgaagttgacacgtctggtaactctgctctaggccgtctgatcggcgtagttgctccatcggacgaagctatctgggaagttatccagatggtgtataactccttcaacccggcagccgcaactggcgtggctctggataacctagtatccttctcggcaattagccggcatgctgcacgtccgacccgggctcaggttgttctagagggcaacatcaacaccgttattaactcgcctcccgcgaagatgatttccagcagtacaggccgagtgttccacctactacaaggcgtgatcctcactcctaaagcttgctctggtgttggaatcttccctcagacagtaggcaacgacctgacgtacgagcttaagatgtacgttgatgacattaacacaacgtctatcaagtacacaagtcctgccactggcacagtaacatccgagtccatcctagcaggactggccgccgacgtagctacaaatcacggaaataccttgacaagctacgaacagaatggtatacttttcatagtacctattgacccatttaacaccaagactttcgaagaagcctccaacctgagtattcagaaggttagaaagcttggtatcgctgttgacgacgttattggccctgtgcctcagcaagctctagctatcgatacgatctccattcctattgccggatgggacagcgttatcaaccctgttccagctatcactggccgtctgcgtgagaccgacgatgagcttcgcgagagattccgaaactctaaattcgtacaagccaccaacattctggagtccctaatcgacgggctgatgaacgtagaaggagtcgaggatgttaggattatcgaaaacgatacagacaacccagacccagttcatggagtcccgggtcactcgttccttccaatcgttcttggcggtattcctacagaggttgcacagtctatttggctgaacaagccattcgggattggctctgttggagatacagaggttcaggtggtagacagtcggggatatacccatagagtcaactaccagcgccctgtcgaggttccaatcgagatcaagatcagtgtaacaaacacaggatcgatgccagagaacattgaagatatcctacggccaaggattgtagcgtacgggaccgagaattacaagatcggagacgatgtaatttattctcgattctatgctccaatcatggaaatcccgggcttccaagttaacagcctgacgattgccaagaaaggacaaactcaaggcatggcgaacattgaaatcgggttcaaagaagtggctacattcgccgcagcagatatcaccgtaactacggtgtaatgatagaaggagaattccatggctgtcaaccaatttgacagagaagattatctggaggtggcccgggaacgggtcactgaacagtttaaagagaagccgatctttgatcgcttcctgcaagtgctattgtctggcaagtttgatatccagaatgcactggaagacctccagactctccggtctctggacacagccaccgggaagcaactggacattatcggagacattgtagggcgaccacgcggtctagtgtaccaagatattttcaactattttggattcgctggaacggagcgtgcaggttctttcggaagcctgtcggaccctacggtcggtgctccatggtactcggtcggtgctccaactggtaacgccagagagccgagcgacgaagagtatcggatgatcctgaaagcaaagatcatcaagaacagaacaaactcaaccccagagcaagttatcgaagcttataaatttgtattcggggttcctgaagtattcctagaggagtacgctcccgctgctgtccgtatcggcatcggtaagattctaacgaacgtagagcgtagtcttctattcgacctaggtggtgcaggtgcattgcttcctaagactatcggggttaactacacatacactgagttccaagctggccgggtatttgctacagaaggcttccccggaggacaaggcgttggagacctaaacgatcccactgttggtggaattctgaccaacctagtgacataaggagttataaatggctgattacagtcaactacctattgaaaatatttggtccacaggcggggatatggtagccccgacccctgcgcagcagcaaggcggatggggtattcagtcggttcctcgccaatggtggaactggaagtggaaccttcacgatactaacctagcgtatttgctacagaagggcatcccagagtggactagtacacaagagtacattgctaacaaatcgttctgcactagaggtggatttgtttacaaggctgttcgtacgcatacaggaagcgaccctgcacaagttagtgccaactgggttcgagcttttgcagattacaccacatctagctctgcacttggaagcctgacaccaagagagggtggaatcccattcttcattagcgctacaggagctagcgtgtttgactctacggcctatggtcgcggaatgttgaatgtagctaatgcctccgcagctagaagctacatttcggctcaagaaagctctgttgtactgtccaacctgtccactgtgactagggctgccaacacggttccgtacttcaacacggatacctccatggctaccttcaacatcacagcgttcggaagaggacttgtcaacgcggctaatgatgaaaacgcaagaaatttcctaggactagctaactctgctatcattacggcagacccagctaacagggcacatactctggtctatagagatgctgctggcaacttcaacgctggcgtaatcactgctaccctgtctggaaacgcaactacagctaacaagcttagaaccccagttacaatcaacggtgtggcgtttgacggaagccaaaacattgttcttccgggcctagatacaagttatgcgggaacggttgcacgtcttcacatcaacggagcgaacctttcgagtgcagataagactactcagctagcactgaggaacaaatctgacaacgactggattagccttgctgtagtggatgacaacattctccagtttgtattcagaagcgctacaaacccagttgtacagattggcaacgaagttatccttcacacaggaaaccagttctctctgggcccgactcttacagacgctaggtctcgtctgggtctcgacagactaactcaaggtagctctgatactcaagtcttccccagcaccttgaacaatggcccctacttgaccgtacaacctacggctatcggaggattcaacggtagcactaacggatggctgttccgattcgacgctaatggtaacatgactcatggtacagttcctgccgctagaatcactggtctgtccaactcggctcagattccagccacaactacggcgcaggctaactctcttgttcagagagacgcagacggaggattcagcgctattgcgattaatgcgtatggcactatcgtcgggtacggctctaacatcttcagtagagcatcgggcactggcaacgcccacatcgggttccagagagcgaacggaacagaactcggtcttatctggggagcccaatctaacaactcgatgaacttccgagttgctggcggagccaccgcagtgtcgattaccggtctggacatgactgttactggaagagtcaatgctaccacactaaacgcctctggaaacgtgaatgcgacaggcaacgttaacgccgggagcgctacgctcaatacagcagggaatatcacaggagccgcttacggagcctatggttctctgaccaactgggttgattcggtatatgccaagaagggagaaattcctaacgatatcgcaagagccggagccgcttgggacgctgtaggtcagtatattctggcgggagatcaatctggagggtctggtggaccggggacaactagagctggaagccagttgaagccttattcgactattagctacacagcaggggcactaccagcagcaggcacttacagatgtatgggagcgtttgcaggtggtggtaaccagattaccctgtggcagagaatttcttaatagagggcttcggccctccttttagaggagattatagtggaattcagaaatgttgtaaaatacaaaatggggttcgaatgcgaggtaaatcatcctcagtggggatggattccgttctacgcttgtgattacgacgatagagccaaactggtatatgacgccatcgcccgtgctgtcgataacggagaaatccccgaaccaaaggacgttacagatagagacctcgttgtagatgcacgtctgtggagagataatgagctaacccgggctgatcgtcaagtagaaattgctatcgacgatgaagacgaagtaaaagagaaggcttggcgtaagtaccgctctgcactacgtaagtggcctgagcataaaaacttcccagccgagaagagtaaacccaaagctccgaaggagtgaggtaagataatatgccaaacattatgaagcctacgggaatcaacgctatctggtctgaaaatggccagaaggttgacccgggtgctgtgaaagtagggctaggctgggttacggaacttcctccgtaccagactgcaaacttcattgaatataaacaagacctgtttaacgctcacgtcaaccaacatggtatccctgaatgggatagcgtgacagagtatcagggtaacctgagctacactcaaggcgctaacgggatcatctataagtgccttagaacccattccgacaagattccaactgaccctctgaacattacagccggatattggcgagtggcgtttgaggatgcgggagaggcagctaaggttcaagccaaccttgatcggcatgtaacaaactacaacaccctctctgggattggcaacgtagttattgcaagacaaaacctaagtgtgtatagtaaagctgaaggcgacgcccggtacgctatgaagcacgggaacggctctaatgttttcagcgtcgccactgccacacagccaactcacgcgatcccgctgagccagctatcgactctcgttcctcctgcgaccgagactgtagccggggttatggcagttgctacgactatcgagacagaagctggagccaatgataccaaggctgtgagtccgctcaaggccgcacaggtgtatctgaagaagaaagacaacctttccggtctgtctaacgtcactgccgcaagagctaatctaggactgtcggatacagcgactatgccttcttctacattcctgaaggcaggtagcaatctggcagatgtgcctaacaaggcgctggcaagatcgaatcttggaattacaagtagtgctacccagccggaaacctatttcttgaggagcgctcagaacctagcagatgtacctaacaaggcacaagctagagtcaacctaggcctcactgggatggctacaacagaccctgcggcggttatgatgaaggcagacaaccttgctggattggctaacactgctaccgctcggtccaacctagggctaggcacagcttctactagaaatacaggagacttcctgtcgtctggggataacctgtccgacctcacgaatgtccaagcagctagaaacaacctagggttgaagggagcggctacgctcgatgtatggggtcttcctgcgaatacaactgccatggacttccagtctaatcagtcggatatttccagaggatgggctcgactaccaaacggccttctgctacaatggggaactggtcccggtctatctgatgacacaaggacgaatatccaactccctgttccagcacgaatcttgaacgttcaagtgaccgtaatggggacgtttaacaactccatcggcccgggcgctttcatgacggatatgtggagcaacaccgggtttagagttagctgcaactggggcaactggtcttacccgttcaactggtttgctatcacttccaccctgtaattcaggagtatcaaaaatggctctaactgagcaagacttccaatcggctgccgatgatctcggagtcgatgttgccagtgtaaaggccgtcactaaagtagagagtcgtgggagcggctttctactttctggcgtccctaagattctattcgaaaggcactggatgttcaagcttctcaaaaggaagctaggtcgtgaccctgaaataaacgacgtttgcaaccctaaagctggaggatacctcggcggacaagcggagcacgaacgtctagataaagcagtcaaaatggatagagactgcgcacttcaaagtgcctcttggggcctattccagattatgggattccattgggaggcactaggttatgcgagtgttcaggcatttgtcaatgcccagtacgctagcgagggatcgcaactaaacacttttgtgcgcttcatcaagaccaacccggcaattcacaaagctttaaagtctaaggactgggcagaattcgcaagaaggtataacgggccggattacaagaaaaacaactacgatgttaagctagcagaagcctatcaatccttcaagtaaatctaggaaggttcctaatgaagaagctattcaaaagctggaagttctgggctgctgtaggctctgcaacttttatggctctggaagccatggttcatctttgggagcctatccttcctcccggcgtgttcgccgcagtagccacactggtagctgttggtgtgagaatttcggcagtgtttgtaactgctggtaaagtggaggaagcgatttcggaaaccatggaacatgacaccatagaagatggctcaatagaaaatgatactaactaaactcaaaaactacgccctcgtagtagctgccgcaatggcagcagggtttggatatctgtcgttctctttgtacggcgacttagctgttgcgaagaatgatatccaatctcttcaagctgcgtctcgacagatggaagagcagttccagaaagagcgagcagggtgtgagatcaccactgggagactagaggcgcatatagtccaaatgaagagccgacaggagcttctacaaggccacctgtgcgagcttgagtctctacctaacccaaccccaagggagacccaagaaaatgccacagagacgatctctgagccttctactggggatagtctggaccctgctcttacaagcttgctcgacagggccttctgttccgcagtaccaaacgatccttattgtgcccccggcaagcctgaccgaggaggttaaggtataccgagtggagcaagatacagtcaaggggctcgctagagcttacattctaaatactaacagtgctgccatgtgcaatagtcaactacagacaataaagctatgggcagaagagcagagggctctatatggaaagtaaagacggcaaagaaggcctaatcaaggtagctacacagggagttatctctctgctaattgctatcctaatggcttggtctggattcctaagttccagtctttctaagcaggaagaacgtatctttgcgatgcaaagagatatggtatccgaggcaaaacttaacgcactagagtcgagattcaatagccgacttgaaagtgaaattagtaacgtaagaagagaacaacaagaaaccaaccggtatttgattttgattatgaatgccgtcaagggtcgggatacagaaactcaataactataacccgttaacccacactgggagacaatataatgacaaggaaacaagactggccgctagtttcagcagtcggggctttgtttatctccctccttgtctgtatggctattctggctttcacagcgatgactcccgaggctcggtttgactctgtacgccagacctacgagattcgaattagcgaatctgagcggcggtatgaactcaaactgaacagactacaggatcagataaactcggcctcgtacacacaggatcggcaatcccgtttgcaatatgaagaactcgactcgcttaaaaggaagattagcgaacttgagcggagaataaaagaaaaacaagaataattaagccccgggagcgaaagcttaccggggctctttgtcatgggttttcagcgaacaacttgataaacttcatcgaacaggtcatcaagcttctggataaccttcttagccagcttcttgcgaactttgttagcctctgggctggaatggagtagcttaatatcggacgcgttgccccagtccatcgccccgttgtcgaacagcactttaacattcagatgcatcgagccctcgtcaatatcgacaactacgccggtcatccgagcgttggtcttttcgaaggtcggcctcggaatgtctatgtccagactgccaaccataacaacctgccctttcttaacgtcaaataattccatttaaaacctccttaatctaacttcattagtgtgttgaactgatgcctcagagacttaaaagcctgtggcccatcgtcttccgctccttcatgaatatgatgagcgattaagtgtatcaatcctcggtctcctagtaacaaagaactaggaatttcttttatccaagccacaaagcaacagaagtgtagaacctccggcatggaagccttgaagctggaatcatccagcttcgataggcgttcatacgtagctttaagatcgggatagcttaactgatatgtagcatcttcgtcaatatgctggtcccctctaactacatactgcaagctcatattacaccttctttccgccttctgcaagacgtgcctctcgcttatggtcggaacgggtcatattgtactcgatcttctcgatgatcgcacctgcaacatctagacctcgaacattcgcgtagtccatgatacgaatgatagcgtcagccagttccacctcttccatcttccgctctggcaagtgatcgtccatcaaatccttacggactccttcagccgcttcggcgatttcagtggtaacgagcatcagcatgtgcagagcatcacgtttaatcggctcgcctgtgaccagatcggtgttccacttgcggttaacaacctcaaggccagtcatcattttgttaaaaccgctaacaaactcgaagacggactctcgttcgaatagttcaccgaacgttggctcttgatcttcgacaattgcagtgtggaaaggccactccatccaagcgtcatagcactttttgataagctcttgttcgtcaatgtatgagaagaaatcttcatatccatcaatcgcattaacaacttcagttcccctttcccaattgcgcttatcaataagtctctggtcgattcgcagggaagtgctgccaacttcttcccatgatctccagcctactatgccatcgccgaagtacaacagaatgggcagattgaatccgcgttcttcctgatccttagtctccatagctataacaaacgccggtactttttctccacttacgccattggccaagacgaaagaacccaagtgggtggtctctcggctagctgggcgatgagcttcctcgatatgatctttaactctactcattaacttcaccctcctcgcagaacatttcaaaataacaatcgacacaagttagcatgccgtcgtcgcttacaacctcctcgggagggaagttgttcccgcaacattcgcacacaactcgatcaacctccctgcatccccagtaagccatatttactcctccttcagaagatactcattgctaataactttgaagctgaagtctcggctcatgcttttgaaaaccaagccttcccggtacttaccgttcaacgcagactcgccactagccattttaattacgagttgcatgtcttttggaacgcctacgtcccacatgtacaccggcacatgtttgaccgtctcaccacccaactggttcagcgtattcagaatggcaagacgctccgctggaagacagtaacgactgtccgaaatgttgtagatatcgtacacatagtattccggtttgtcaactccctcgaagttgccttgaatatttggtgcaaccagttcgccttgaagggcaatattcagaccgaaataccggagacgttcaccaagattaagctcttctgccatcgcagtgaagtgattggagtctttcttaatcacacgcttccagccccgacccttgaagaagttcttgatagcagtgaagaacccgatcttctcgtcttctagacggaaaccgacatttcgagacgccacgcctacttctccgtccttgtgccagatagtgagagacgaaccgtccaatttgaatgtcacttcaaacttctcgcccttctgatgagcctgatcgtaagccatctgaatattttgtacgcgagcctgatccgtcttcgggatgaagttggggaaccctagcttggaagtgccagtccggctgcccttgttgcctccattgatagctgcctgctcggaaggctttacatacttcaggatgcccattcgatcggtaacatcttcgtctactttcggctctgggctgcccgctgcatgaacaggtacgatcaggccttgactaagctctttacgaagcttcatggtcttgattcgagaatactcttttccaccttgttcgaccatattacggcctcgcaggaattcaaagatagggttatctacaggcaccatggaatccacttcaatgtagattgccagatcaccagcctgatattcccctcgtttgattacgcactgccaaccaccaacaagcgccagatcgaggctgtcagcgttaggatgggtcttcacatcgtcgatacgcaccactcgggctagtacgcggtcttgggaattactcatatattatcctccttgtttgaaaattggtatattacttgttaaaccagccgagatcaatagcccgctctagggccagtagcagattctcagcatctagaaggtcacggatcgcgatccaactaccactgtctcccggtagaccgtctgtgatatacacaggtatgtcactgtattcgctctttttaagcccgcaggcacaggctacattgtccccgaagacaatctcgctgacttcccttgcctcgtctcgaatatcgatcttcacacctaccctcctgttgtgttgaaagttgttgtattctgcccggatatcttcgcagtgtcaatagccttgacaagaaaataatccgtgatagagtgaggtctctgctggagagaaatgtccacgtcactcaccggccagcagtatagcgtatgaagaggaaagctgcaagcgcaacctgagtcgaatctgagaacagggcagcgacgacccgaaaggggaaagctcagagcctataaggaacccatgttccccgctcaccgactcatctgcatatatgtatatctgcatgagagcgagaggtagaccaaaggcatgtcttaggcggagattccgtatggcaagccttgggacaggtctgcctccactaccgatctatctgcataaagggggtacaatgtattcagcaactgttgtgaacagacactacgagaaatttgatgtgtatataggaagggggagcaagtggggtaaccccttctcccacaaggaaggcaccagagccctctacaaagtagatacagtggaacaagcaattgagtgcttccgaagtcatctttggcgtaacataatggaaggattaatcacagttgatgaccttctggagcttgacgggaagagattggggtgttattgtaagccccgtccttgccacggcgatgttctggtgagggcaatcgaatgggccaaacaacacagaggagtgtataaatgaaacatgttatttaccgagaagacctaatcgacctgttacgcgaccgtatgaagctccaagcgctggaggctggtggcgttgacaactgggactggtatgaggcctcgcttatcgactgcggattcttcgatgatgacgggcgtgagcttgaggtcgaagcacttgcagattgcttcccaaccgtaggtgcgtaaccgtggaggagtcgaaagctaccttcaaagacccttaccctaggttcttcgacgcttctcgtaggtatggcgaaaccaacgactgcatggtggtgagctttgcagtcgtatggaacaccacctatgaaaaggcacaccagcacctgaaagtgaagtgcaagcgcggttaccggcaaggggctactcagaagcgcttcagctacgcagacacttggtgccctaagacccggatgctctaccgggaggatgctaaggataagactcttaggcagtttgctgaggaaaaccctgaaggtcggttctggatcgcggtaaagggtcacgctattgcaatcatcgacggagtgttgtacgatcacactaatgacaaaagacgcaccatctggcactgctggcaagtgtggcccggggaggcacctgagaaaatcgagaggaagcctgatccaatctcacctcctgtgagaaaggccccagattggtatgtctgaagattacaactgaggaggaattatggaaattatttcgagagggacgctccctcaagaggttttgtttacggctaagtgccaccactgcttgagcattctccgggctaagaggtcggaacttaagtatgtttcgttctcattcggacgccccggggagactgggtattatttcgcagagtgccctgtgtgtaacgaagaggtgtctgcttgggttgtggttcctaccagccctgtagcacctcctcccactgtagagtatatcacaaaggagcgtaaataatatggaccagttagcaggattcatgggcgaacctttcgtaattgcgttcgactacgacgagacgatcagtctctaccctcttgccttccgaatcgtcatggataccttcaggggctttggaggcgctttcaatgtgatcgtagtcactgcacgccaccctgacaacagcggagagttagagtggctacgggactacgggttcccgatctatttcacggcacagaaggcaaagcgaccattcatggaaaatcttggaataaaagtctctgtatgggttgacgacaacccgttcagcgtggataatgaccttcctccgtggacagcggagcaatacgacgcctaccttgaggcaaagaagcaacgagctatcaacagagggagtaaagcatgagcgagattattaaggttgaagtgggagatcgggtggtccttaaggcctattgcgatacatacactggatgtgcaaagcgatgggcgcaggcgcatggtcgtttgcatgaactgctagctacggggtttgtagaagacagttgggtccacaccgacgaactggccggaggcttgaaaggcaccgttgtgatgactgaactgggactgaaggaagagtgctgtgcagtacgtctagacgcctacactgaccacagggctgttgtagttgttgacgcttctgatctttacatcgcatgtaaggcagcaaaagctcccgtaagcaccctagacgaggccttcggttgcgaccacgactaccttatggaatctccggctaacgctcagcgactgaatgagtccgtcgagcagctacgaactggccaagtcgtagaagtggacgtgcctatgagtgtaaagcaagacgaaactccacctgtcgtagtgcatgtagtagagaagatttacgataggaaaggtaacgtacacctcattctacagtatgaggtagcaggggcgctaatcaggacggtggttgaacagggagaactcatttacttcttggatgaaatgcaaggtatgtacttgaccaagattcaattggaggtgaacaatggagttgtatgaccagtggcgtaagtatatgagcgtcgtaatcttagaagaagaagataatgagcgtcagtgcatgcggcttattgaggcagttggcgaactcgatccctatatccaagatttcctagattctttctctattaaaactgaaggaggtgtgtaagcatgagtcagagtaagcgcgatgagattgtagttgaagcacgtgggctagagagctacttcatttcccactggaacggctgggatgtgatggacactgcttgtctcggattttatatcaaacctgagtatgttcttgacccggatattcgagagcttgagcctagcttcttggagcttgatttcgagcgttgccgtttccgattctggggaaatgaagacgaaggcgtggacggcaaactcatggagggcaagttgcagattatgaccaactccttcgagtacgtcttcttcaaggaggtttgagtggctagacagacttacgagtctgcatcagatagggcggtcgaggaggccgtccgttctgagcttgaagggcggtggaagtgttctcttcataagctacctagagcccactatatggattgggcagcctgccggaatggaaaggttgttagctttgtggagcttaaggctcggaataatgaaatgcagaaatatcccgacttctttgtgtcccagatgaagtggctccatgggatcgaaatgcaaagggtgtttgacattcccgcattccttgtggtaaagtggacggactatacaggatatgtcaaaatgacagccaacggcgtcaactacatgagcatgggtggcaggattgaccgtggagactggcaagaccaagaagttatggtccatatcccgctgaaagacttcacacgtttataggaggacacatgaagagactctgctaccgttgcatgcatcttggagagcctgtcatgctccgtcataagacgggtatctggtacaagggttgtagtaaatgtggatcaggagtattctatggctaagaagaaccctgtattcaagtttctgaatacagtaaacaagccctcagtggagagggataaaaccaaatacaggcggaagcctaagcataaacagaaggagcgattaaatgaagaagggtgataaagtgaggatcaatgatgatgctgataccatcttccggggccgtgttgccactatcatcgcagtagacgaagagggttgcgttatcgacgttgggagttacgaggatgagagcggagagctgatcgagtaccttcacctattctttgagcgttctgagttgtccaagcaggcgtaggagtgtataatgaacggacccgagtgtagatggtgcggagagaaaactgaagctgagttcgtagacgttgggcttggatggacgcagcaagtcactggaggcatgtgtcaccagtgtggagggtacgagaacggttactaccagaacgacggaaggctcacagaggtcgagtttgccacctactggagtggtccgttcgaagattatgcggatttctcgccattcaatcatatgagagaaggcgactcgccatgaaggctacactgagaaaccacaatctgctatacatctacttccacacgttctcggaaatgaatgagtggttgacagagaacgctgtagatcagtggacagtcactactctgggctccggctatcaggtggctgttcctatggaccgtgcaatgcgggaccaatacgtctcggaggggggttgacacgaacacaaggtgatgctaaactccgtggttgtctgaagtaaggaggttttatgtccaaaatgaccgtggcccaaattgcggctatgcacggtatcgatctgtattctgaccacaagaccgcttgtccccaatgccggaagaaaggcgctgacaacagcggagacaacctaaaggtctatggtactgatcgtaataccggggaacacaaaggtgcctattgttgggcgtgtgggtacaccttgctctctgaagagcaggaaagagacgcccggggagaagacgaagaggagtggaatttcgtgggaactgaatttaacgcagagatcaacgctcaaattaaagagcaatgctcgtatgatccgcgtggttatcgtggcctgtccaaggaaacttgccagtatttcggagtgctacatggtttcgacccggagactggcgagattgcaactcagctatatcctactactactaattatgaactcactggctacaaacagcggatcatgccgaagaacttctcagagcctatcggcgagaccgggaaggattgcgagctttttggtcagttcaggttcaagaatagcaacagcaagaaggtgcttattgtaggcggtgaggttgaccagctatcagcattccagatgctcaaggagtatgatgaccggcgagcaggcggtaagagtgattatgaaccgactccagtggtcagccctactatcggtgagagtggggcgtggaaacagctacaggctcagtacgagtggctagaccgattcgaacaaatcatcctctgtttcgacagtgatgatgcaggacgagaggcagcagacaaggcagccgataagcttccgaagggcaaggtgttcatgatggaaatgaaccgtaaagaccctaacgagtatttgaaagctggccgtcagtcggagtttgtcagtgcattctatcgagcccgtacatggacccctagcggtattgtagggtctgatgcactcgacgctcgaatgtatgaagctgtgcaggttgagaagattcctctgccaccgttcgctaagaagctccagaaggctatggcaggaggcatcccgttgggccggattgtgaatatcggcgctgcatcgggcatgggtaaatctactgtagtggatgagttcactctgttttggatttataactcgcctcatatgccgggtactgtgactctggaatcggactgcggggagtacgcaatcaagctgctgagccgtaaggtaggcgagaaggcagacttgtacgagaccgttgaagagaaagtggcgttccttgatcggcaccgtgacgctcggtacgacttgtggcacaaggaagacggaagcccacgcttctatctgatcgatgaccgagacggaagcctagcagccctcaaggctcaaatcgaacaactgattattcagtttgagtgccgtgttattattctggacccgcttcaggatattctggacggattgagcaacgaagagcagtcggtattcatgcgctggcaaaagggtatgaccaagagccaccgagtgacgttcatcaacatcaaccacgtccgtaagagtggtggtggtcagaaggctaactcggcaggtgctgaactgtacgaagaagatttccaagggtcttcgtccatcttcaaatctggtgcagctaacattctgatgtggcggaacaaggacgcggagaacgagttcgaaaagaacctgattaacgtgaagctctctaagtgccgatggactggccgcactggaatgatgggcaattggtactacgacgttgagactcatacaatctgggacttggacgactatctggaccgataccctgacaagcgccgtgaacacgaggcttggatggctcagaaggaagaggaaggccgggacacggaatactaaggttgacagaggggtgatgcttatgtatcatccctttcgtcgtttacaggaggaaaggaaatgcaacaacgatttgaaacaatcgagcaatacctcgaatggatgggaaataacaatttcaccaacatgacttgggatatcgaggccacaggcctgttggatgaaacgtctatcgattacactgccagcccctacaagattaagcctagctacaaacaccactgcattgtagtggaggagcacggtggcaatattctggcattctacgatgggccgacctacgtctttgacgggcgagagtacactgagagactgccgaaagcgtcttccatgctccacactgaagaagttgtgactctcaaggactacactccggtagagtatattcacctgccgctgaaagagttcaagaactatgtgctcaagcgcaagatcaagcgcgtagtggctcacaacatgattaacttcgaccttatgtcgatgaagcttgtggaagatatggacttcactatcggcgtagagcacagggatggcggtctgactacgtggtctgctgacacttggatgggcaagcaagtggtattcgacgataccctcgttatctccaagacttgtaaccctgacctgttcggcggtcacagtctggataagctgtctcgtcgtgcaggtggtgacaccaagattgacttccgtaagcatttggcaccggatgttcgattcctcgacttcgcagccgatatgctctactactgtatctatgacgtaaaggcgaacaccgctgtatggcattggttgcaggaccacgaagattaccaactgtccgaccgtgacaactacatcaagaattggctgtccccgattcagttggagaagaaggttgcagagatcatcacctatcaggagcaccgagggtttgttctgaatgttgatctctgtgaaaaagctgtgaaagacttggacgccaagatggaagagcgtcgggcccgggtagagcctgtgcttcctcctcgaccagctaccaagaaattcatggcagactacacaccgcctaagcggcagttcaagcagaacggggagatcaccagctacttgcagaagtttattgagcggattggggctcagttgaaagagggtgacgaccggacgatgatcttcgaaggcaaggagtacaagcttccgcttcccgctgacgtaccgctgaagacggaaatgcctgctaagatcggggacacaactcacatcaagcaatggcttatgggtgagtttggttggattccatcagagtggaaagagactgatctgactgtggatcagaagaagatcaagcttccgatggaaaacatcgttgctaagatcgatcgctggctggatgtaacgtatagcacagcgtacaaggaagagcggctggacgggttcggggattacatgaagatcacccctcgtagcacccgcgcgtatgtacgtcagaggttgattgatcgtgcaagcaaggggagctgtaaggttctcactaaccctagcttcacaaagggccaagagaaagaaatgtgtccagacctcgaacgcattgcagaacagtttccgttcgcgaaggatgtgattgagtacctgacctttaagcaccggcgaagcgcaatcctcggtggcggcatggactgggacgaaatggaggatggagaggagccggaaaaaggttaccttgcaagcattcgtcaggacggcaggattcccacgcctgctgacacttgcggggctgctactagccggatgaagcaccggaaggttgctaacgttcctcggatcacctcgttgtacggggctgagcttcgagagttgtttggggttggagatgggttcttccaaattggatacgacttcgattccttggaagcacgtaaagagtcggcctactgcgatcagtacgatccgacaaaggaatattgcaaatctcttatgatggagaagccatttgacgttcacacaatgatggctaagcgtatttctgagatcattggtcgtcaatttaaccgatctcctgcgaaaaacgtaaaatacgggtgtacgtacggtgcccaagctggtaaagtggcaaaaaccattggtgccgatttgcaaacgggtcaactggtattcgatgcgttctgggatgcagcattcccattgaaagctctgaaggacgacctcaccaagcaatgggaagccaatggcaagaagtatatcattggagtggacggtcgccgagtccctactcgttcggctcacgctatcctgaacagcttgttccagagtggcggtgttatctgtgctaagcgggctatggtgattcatgatgtactactggagaaagaaggtctgaaggttgactttttcaaagaagactggaagaacaagccggaattctgccaacaaatgatcgcgtaccacgacgaagcgcagttggaagttacagctaagtcggtcagcttcaagatgttcccttggtctcttgtaggcggtaagccagaaggagaaaaggaacaggaggaggcggagaagaagctgaaagctctagctcaggcttacaaggacgaacaattggctagtactggcaaggtgtggagtgatatcgcacactacagcaaaggtgaaggcggggtgtttgtagcttactgccgcgctggagaacttgccacgaaggccgtgagagctgcgggagagttctactctactcctctggtgcctatcgagctgaccgctggctacatcgttggtcgatcttggaaggattgccactaaaactggcattaagcgaggaaaggggcttgacaggcccctccgcctcctatacaatggccacatattcacaacatacaaggagaaacacaatgactctggctttcattatctatctggtaatgaccgtattcccagccttgtcgtcggctggtagctttgccctgatcgtcaccatcatcgcatgggttgcaggagggttcgtttacttggcatccattggtggccgagagaattcggcagttaaagccacactcaaaaatcacctacggcccttgacgttcaagctgtttctgcctatcattgtaatcggccatctggtgccttcgtctgagacggcatggtggatggtcggcgggtacgctgcacagagcctctatcaagcagacgctactcagcaggttctcagcgaatctactgaactgctcgaagctctggttaagcgggctaagaaagaaactctgaaggctgttgaaggcagcagcgagtgatacggtaatcacagaataggaggtatggtatgaacacggctcgactctacgtctacggcaaatcgtccatggtaggaatcactgttgacaacaaggccaatcgggagtactatacctctaaaggcttcgaggtatcggagacaccgttagcccacaaaagcgtggctaacaaatacaaacagaaaggaggtaaataatatgtctggtgttattcccgggactatcgtcaaactcactcaagtgggatgtgacgtcaccgttggctggccaaaggaagcccgatatgtaggcgcatacgcagtcgcagtagatggacgcgatatcggtctcccggaaggggaaatccggttctgctcccttcattggtccattgaccgagacgtcaatgatggacttggagactaccaatcgatgctcgctgacaacgaccgcttcgaaattgtagcagttccgggcaagaagtattacgttaagaacgttgccaagcacagcgcacagatcggccattacttggttccttcggagccagccttgtacgtaggtttcgagccgtgctggctgaagagcatgcacgaaggggagagcccgttctgcatgacttttaaaggacgcgttgacattggcggtgaaacctctgacaagccgcagttccagaccctctaccctgagctggtactggaagagtttaaagaagaggcggagggcaaggttgaagctccggttgacgaagagaagaaagaaaaggttgcaaagcctgctgtaatgggttatgctgttctcgatgcagacgggagtcctcttaaattctgcctcactcgcgaagaagcccgagccaccaagcgctggtggggtggcaaggctgagggagtctcgattgtaaaagtaatcaaaggagaggaggtgcgttaacgcgcttctcctcttgcagaatccgggaatgtccggtatgatcgtcagtcaagtggctgacacactcgcccagtctagggtacttaaataggagaaatgaaatggcttttaaactgaacgtaaccaccaacactcaatccggcaacggcggcgtccgaaaggaagtcgattgggatgctctgaacaaccacgtagttgaagctgctggcactgccgctaaagcgcgttcgatcccgggttatatctccggtatcatcgatctcggcgagcaagagcagaacgatgcagaggttgtgttcactggcactgccgaagatgaaatccaaatcatcaaggaatatccgaacacttacttcaaggatggactggacaagcagactcgcaagcctgtacgtctgaagtgctggccgcagcgcgatatgcaacaaatcgcgatcactgtggacttccctcagatcgaggtagacaagagcctgtacctgaccggtaacagcaacaagtctccgcttcgtgtcctgtacaacggcgactttactctgccgggtcagaagactaagattgttggccgtccgtttaccatcaaggaagtgaagcacccgaatggcaaatgggcgttcgccaagaactccatgttgcacaaacttgctgtggctactggcgtcatcaacgaagacgaactcttcaccaaggaccgcgtaggcgagcttctgggcaaggtggctcagttccaagtgcgagtgtggatgaagccgggcaagaacgatatgaaattcctcactgaggatatcagtctggtcggtatggttcctgaaggtgttccggttcccgagctggacgagaagtacatctacggtgtcaacctgtatggcgagaacgacgaagaagcagtcaagcaactgcgtgctaacgtcatcaacaccatcaagcgagccaagaactacgaaggttcggatatcaaggcgatgatcgaagccgttgaagctgcacgcggtggtaaccgctccagtggcgacagcgaagagcaagctgaagataagccgcagacccaagctgcacctaaagtggagccggttcaaaccaacgtagatgatgacattccgttctaaagggcggtggtaagacaaggggcttcggccccttcctttcaaaatttcaaaggaggcaacacatgcaaatcaattttggtcccatcttccttctcgcagcaatcgtcctgtgcgttctgaaatctgccggagttctcgctatctcttggactgtggcactcatgcccatctggattcctcttgtaattgtattgtcgattctcgtactgtttcttgtaattgtaggtctgatttacgcattcggcgatcgtactaaactgaactttagctttaaaaagcacttccggaataagtgaggactaatgatgagtagtttggttattgttcgagtacctgagtacattctaaaaggccccacagtaaacaaccagttcagcggtgacctgtgggagcgaaatctcttcaaagatttgaagaacgctgcggagtgtatcattaaaggagagccggcttatgttgctcttcctaacaaggtaaaccctgacactctacaaacagagtgggacattcaggttgtacagttctaacccaaggggagcttcggctccctttttcattggagataaaaatgagtgaaaaggaagaggatatcgtcctcatcgacggcgaccttatcgcctttaagtgtgcaagtgtcaacgagacccgctccatcattgtcagaaacaaattgacaggagaagaggaaacttggaagaatcggacgacttggcgggagaataacaaagacgaagagggattcaacgaagacaacttcgaaattgaggaccatcaagaccccaagcacgtgtcctacggtatctctgttgttaagaccatgatcgaccgaatctgccgccaagctgggtgcaagcagttcaagattctcctatcaggccctgataacttccgtgacgccatcccactcccgaaagaatacgagattaccaagggtaaaaagaccttcactcgtggtggcaggtacaagggtaagcgtacagggcagattaagcctcttcagctaggtcagctaaggcagtatatgatcgaagcgtatgacaccatcatccatcccggagaagcggacgacttgatggccgaaatgatgtacaagaacggtgtaagctactccagaggggagactactcagcgcgtgatcggggctaccatcgataaagacgcagacggcactctaggatggctttgtaactacgaacgtgagcctgttcaagtcaagttcatttcaggcctaggatcgctctacagggactctaagggcaaggtgagaggcgagggacgtaagttcttctacttccagcttctattcggagaccctgttgactgctaccgacctgctgacctgtgcatcgggaaggacttcggagaagtggcagcgtttaacatcattaatccctgcacaacggacaaggagtgctggcaagcaatctacgacacctacaaatcgtggtaccctgagcctgtcacttacacagcatgggacgacacagagcacactaaagatgcaatcgatatcatgcaaatgtattgtgactgcgcccacatgcaacgttgggcgggggatcgggtagactgtagggctgttttggctaaactcggggtagacttaggaggtgcagaatgagtgtaaggcctcgcccttgggaagacttcccgggcatctggaagaccgaagccgcgttcttgagttgggtcagaggtggcattcgccgctatctctggtctaagaacccggtcaagcttgagtttgctaaatcccgaaggatcaagatagccaacaccaatgaaaagagcaagctcaggaaccccactgtatggggctatgtgtgcgagcagtgcgggaaggagactcctcaagctaacgttgagattgaccacaagacgggggagttctccctgaagcgagtagaggatatccaagcgttcgtggaaggtgtggtgtttgtccgcataggagatttggctgtcttgtgcaaaccgtgccatgagatcaagacctatgcagagcgttacggactcacccttgaagaggcgggtatcgtaaagcaagctattgcaatccagaagcagaaagggtatgataaggccttcttgcaggaggtgggaatcaaacccgcatccaacgcagagcttagaaaagaacagatcattgaataccttaagtctaagaaggagggtggatgaacgaggatcgggtttacattgtagtaagagacgaggcaccagagtacatggtgccgactctggttgcacatagcatcctaggggcagacatggcaatggttctcctcggacaggaccgggccgttccatcgacggaccttccgtcccgtccgtatatgcatgcagcggcaaaaaccgccattaagtgggtggagtggaaacagtggagcttccgtaagatcgttgtacgagtttctgacaaagagtacgataagatcaagcaaatccctttcgtatatgaggggtatgagagaaccatctgcaatggcgaaggctcctgcctagtagtacctcctctgagcaaagaggagaccccgaatgttcttaaatttgcaaaattatggaggcctctgtgagagagaagtttttgagaattatgcggaagctgcccatccgggtaagggcttcccttgttatggcttggattgctctgttcttctggctcccggttgcaactgcgctaatcgttggaattctagagttcttcgataatgcaaaagaagagttaagaaacggatactctgttttgatcgaagctgccaagggagcttaccagtgcattaaaacgggagaggagttggagtcatgaccaatttagctacgtatgttatacgccacaaaaagaccaaagagctttggaccactcctaaaggaaagcggcaatggaccacgaaaggaggggcagcccgagcttggagaaacgcatatgagagtactacactaggagcgtactatgctaaaagagatatggaacggtggcctgacctgaacattcctttgatagtaggggccgctcccgcacgtctggccggctgggaagcagcatcttttaaaaaccaatcagctttcgagattgttgatattgctgaatccctgaagcacgaaagccagttggtgctcgatctactgaaagatgttattgggttcgaagtgccagaccacatcggagacggatatgtccgactcaccattaaaacgtccacatacgacgatatcatcaaactactgaaggaggcaaaatgagcatgactgacccccgagcgtatttcatcaaacaggagctggaggaagcaacgaagcttctagaaagagccctcaaccttctagataacgtccattgctacgatacagatgtatacgaggacattgcagcattcctctacggtcaagagtgcgaggaggaataaggtgcagcgcgatattagtaaaactatagcagaacttcgggacttgatcgaagctgtctctatgctcgacgaggccttggttatgatgcagaaaaacggactatatgatacggacttgtacaaacgtattgatgcgtttttgtattatcaaccgggcgagggcgagtgggaggaagtagaatgagcagcaagaaacactttgtaatctctgatacacaatgcaagccgggtatcagtctggactacatggaagctatcggtaagtatatcgtagccaaacgtccagatgttgtgattcacatcggggatcactttgacctcgccagcttgtcgtcttatgataagggtaaacgctcctctgagggccggagatacgccgaagacgttcaagtcggacgtgagggtctggacaggctgttcaagcctctgtgggagctacaggagcgtcaacgggctaatcggaaaaaggtgtaccaacctcggttgattttcacactgggtaaccacgaagagcgagcagaccgagcggccaacgacaaccccgaattgtacggcacggtcggaagtgaggaactgggtattcaggattatggttttgaggttgttccgttcctgaagcctatcgaggtggatggcatctattacgtccactacctacaaaaccacttcactgggaagcctctgggtggcacagcgaacaacatgcttaaggctgccggtcattcgtttgtcatgggccaccgtcagcttctggactgggcgatccatcctacaattgacggaaaacaaaggctaggcattgtgactggagcgtgctatcctcacgacgaggcttacaaaggctatcagggtaacaatcacttccggggttgtgttatgattcacgaagtgaaggatggttttggtctgccaatgccggtaagcctagacttcatgatggagaaaggaggtttcaaatgacggtttataagttctggtgtgaatgggatatcggtatcaatgagtgcctgtggcgagactactaccagatggaagaagatgtagctaaagccttgtcagattgcgggattgatgatactattgaggaactggaggacgcaggcctgctcggcttcgactctgttaaagttatcggctaattaggtaataggagggcatatggctgagtttttccttggggcggcccttgcaggcttgttctttatgtttagtatcactgcgagctttaccgccgaagatattgagaaagtgacttcaacatgcgagaataacgaaggcgtcaagtatttcggagttgacttcttcggagacggtgctgtacactgcaacagcggcgctattttcaaaatcgaccgcaaatctaaataatcgaaaaggagatataaaatgactgatttcaacatcacccctgagcaaatggaagaagcaatggcaggtatgaaccctgagcagcgggctctggtagagaaagccttgaccgaccgtaaatctctggaagattccatcgtgaccgaggacggtgaactggactatggcatgcttgcacgacacatccgcaccagcttgggtgatctgcctctggtaatgggtggccctgacttcctgaagctgatgatcttggttgctgcgatgccggagaccaaagacgatctcctgactctgcacatgaacctgtccttcattctggactgcattcgtgaatcgattagcgacgaggagtaacaagtggccgaagagattgtaaaagaagacctatctgtcgacgatctcatggttgactcagcagggctagatgccctgctggccttcctagagagtcagtttaaaggtccgaagggtgtactgaagggatatgtcactatgagagtgatgtgcgctaagatcgagagtcttgacgggtttcaagagttgaaagatatggaggtgaactttgagtaacgatatcatcaacgttcatgctgggcaaccgatttctctggtgcaacggtcaaagaatcctatcaatattcaatattgggacgccgataccatcccttacggaacagtcttggttgttaccgagaaaaggggtgatatacgaaagggagaattggtcgtaaggctggctagtagtgcagatgatgagcactctgttaaggtatgtagattctctgatttcttcctcctaatggagaggggttatgacgcagccagtctcggcgacgttaaacaagcgtatgatgttctgttcgaagatcacccagtgactacctttgttaactgggatcgggctcagcctttgacaaacagtgagcgctactacggagactttctgattggcggcgaccctaaagggatgccactattcaacatggctgttcttaaaaatgttctgtcgccttacactgccgacgatgaggaactttcagctatgtctgggaatcccgagacagtagagcacaaagaagttgacgaactaagtgagagggacgaggctttagccgaggtcgacagactcaatgaagagcttgttgcactgggtaagaaggttgtgttcgccaacctagaagattacctaggcaaagaaaactatgccacattggaagctatggctaaccacaaggaggctgtaggtagcggaggctcctctagttactacactgtcaaggtgaacaaccccactacgaaggctaacatgccgtattttgcagagtgcaacgatatcatcgaagcgctggatatgcgattcggtcaaggcaacatgttcaaagcgttgtggcgggctgcggcagcacagaacctaggcaagctgaaggccggtaacgatgttatccgggactacgagaaagtcatcttcttcgctcagttggagatcgataagattctcagagaaaggggttgacattctccccgaggcttgcgataataggctccaagttgaaacgaaggaggtgtgtagatatgatccagaaactaaaacagaagctcatgatggtgcatcctatcctcgctagcgagatcgtctggtgcctcaccttcgcaatgcttcagtaaaacaagggagcttcggctccctttattgtatcaaagatttaataaggagagtttatgcaaatttctgcaaaagtgattcaacacagttcccggatcggcctaggtacgaagaatcacagattcatcactacattcgaactggagtatcctcggtttattcacagtgaacttatgactcaccgactttttagtcgaaatgctgcaagtagtcgtgccattcccgttgcccatatgatccgacaggtggaagagaatcctgcgatgcctgttcactggggaatgaatcaaccgggtatgcaagctgagttcgaactgagtgagtgtttgcaacgtagctctcagtacctgtggaagaaggctgcaaagagtgcggctcggatcgctagcgcactaaataaaatgggactccacaagcaggtggttaaccgtctccttgagccgttccagatgatgaagaccgttgttacagccacggaactagataacttcttctacctgcgttgccataaagacgcacaaccggagatcaaggttctcgctgagaaaatgtatgaggctcttattaaagcgggcccggcagaggctctatatgacggagagtggcatgttccttatgtgactcggttccgcataggggatggtaagctgcgttacgcagattgtaacgggcaagaactgagcgtagaggatgctattaaggtatctgctagctgctgtgctcaggttagctataggaagaacgacgagactctggagaaagctcttgtaatctacaaccgattggtagatactaagcccgttcacgctagcccgttcgaacaccaagcaacaccgatgctccgcatctcggacaatcaaactggatgggaggacggtgtgacgcacttggaccaatatggtgacctctggtctggtaacttccgaggtttcatccaacatcgtcaactaattaaagggcacgtatgtaatgagtactacggccaagaagaggaaggagtttaaaaatggcagaatataacctgagtctggaagacctcatgctggtcgatggcttcaaagaggcgttccagagtaacaatgagaaggtagtaagggagcatctgtggactaacggcatggatgttaaaaactactcgtatgaaatggttttctgtcagcatcgcaccctgattggccgagtcgtagagggtctacgattctctggctttgagcgtacagacaaggagtggctgagcctcggttgcgcctctctggaagctcatattgcagcgtgtgatgatagtaatctacggttcactcttcgtaagatgcgaccagagggatcgacagaggcaacgttccacaattaatgcagtaggagtagatatggaagttacaaaggctctcgtagatgaggccgatattttcaataagatcacacaaatcaggactccaacggagtcctatgcccggaaatatccggtcattgtcgaactagcaaaccagcaactagaagagaagttgtggttctctagcgaaatgaaggtagagctggataagttgaacctgaagtttaagttggaacctcatcagcttcacgctgtaaagactgtccttcaactgttcctcaaatacgaactgatcgtaggcgaggagttttggatgggtaaagtagtccgaacgttccctcgcccagaggttaaactagcggcttcgatcctgtgcatgatggaattggcagtccacgctgaattctacaaccagatcaacgtagtgctggggatggatacagatgccgactacgtggcgtacaaggatgacccggagcttatgggacgtatggagtggcttgagtctgtgctaggcgacgaagacgatgttctttcggtaattatcttcagcctaacagagaccgcccttctgttcagttccttcgctatcttgaagagtttccagtgcaacgggtacaacgatatccctgtgatcgcacgcggggctaaccagagtgctgtggatgaagacttgcacggtgtagtttcggctgagatcatcaaccaatactacgcagagattggtcgaccattgtctgaagatactcggcgtgtcgagaagattcgacaagctatcgaccatgtatatgctcatgaatgtcgtattgtcgatatggcgatcccgggcggagaacttaacggcgagtcggctgaaaactataaagcgtttgttcgttatcgtttgaacgtatggtgccgtcgtctgggtctggaagatcatttcgagaacgatgacactccgatcaaagattggttcgaaatgaacacgtacgcttacaaaatgattgacttctttactccgggaatgggcatggagtacgaactggggtgggatgaagaggaactagcaaaggcttgggaagaggagctgaaatatgagtaagagagacacattcaactattccgaagctaggaaaaacagtcaagcagcaggagagactcctctgtggtatacgacggctggctaccagttgttcatgaagaaatattcaaatgagggagagtctgttcgctctcgttttgagactgtagccagagctatggctcagcacgcccctacggtgtatcctgagtggtgggaggaggacgaatacactagaggcaaggactgggaacaggtattcttcgacgttatgtgggacggttttgtaagcccatccactccgcttctgtcgaacggtgggctccgcaagaagggcactacggtatcctgtgcaggcgggttgatggacaacaacctctatgaccgttacaatgtaatgacggagattgcagtgctaacgaagcatagtcacggcacaagcttcagcctgaccaactggccatccgaaggcgatgccattcgtggcggagagtcacagggtgttatgcctgtcattcgtgacgttatcaacgtcatggaagaggtcgcacagggttctcgtcgtggtagctgtgcctacagcattaacccccgccacggggacttctggaacgttatcgatcacctgtacaagcgtacagaatcgaacaacgtcggatggttgctggacgacaattggtgcaaggctatggccgagaaagaccctgaaacgctgaaacgatggaagcggatgatgttcgttaagctggcaagaggcaagggctacttcacgttcattgacaagatgaaccggcacctcgcagagccgttcaagcgagcaggtctgaaggtagaggcatctaatctttgccaagaaactgtgcttccagctaatgacttctacacattcagttgcgtgatcctaaactataacctcgaactctaccgttcttggcctgagcatctagtgttcatcgggcaggttatgtcggattgcaacatcagcgagtacctcgcaaccatggacgaagttagcattcaggaccgaagggctctggagaagatttaccggttcaccaaggacttccgagcacttggtagtggggttctaggattccatactctgctccagcgggaacgattcccggtcggcagtatggacgctatgttcctgaacaacgccatcttcaaagggatgaaggagcaagcggaagcttgtaacagttggctagctgaggttctaggggagccagagggctgccgtggactagggaagcgtaatgccactacaatgatgatgccgccaactaaatcgacggcagaactcatggctggggcttctgagggcatcggactggacgttgctatgtgcttcaccaagcagagcgctggaggtgaattcttccgtgtcaacaaggtgttgctggagattatccaagagcgaggccttgattgggaagagtgtgcaaggcagatcaacgaacgcaagggaagtgttcagcacgtagactggctaaccgatcatgaaaaggctgtattccgtactgcctttgaggtgagaatggaagactacctacgactgtgttcccagcggcagaagtacatcgaccaagggcagagcatcaacctttatttcacgtcgaatgactcgccggcttacatttcgtacatccatcgtctcgccatggaagacccgaacatcctatctctgtactacatctacagtatgagaggagcgggagatatctccagaacagaagaatgtgaaatgtgcatgtaaaatcattggcccggggcttgacagcttccgggcctttgtgtattctgagcacatcaaaacaaggagggactaaaatgaacaaattctctgaagtgtactacacttggagcgcagcgtgctctcgtacaaatatcttgatagatatgggatggactgctacaatccgtcgagacttcactggcgggatcaaccctgtatgggttgtggagttcacgcgatgaacagcaaactccgcaaagagttcgataaatggtggggacaggacgagcaagaagaacttcgtaaatcctgtgccaaaggatgggcggaatatatctggatggctagtcgaagaaaagtgagtgttgagcttcccgcgccagaaggcggatttatcgacatccaaaagtacacaatcaatcgctgcaaagaagctatccgcgaaacaggactggaggtgttttaatgaaagaatattttaaaaagcgactaatgcagaccagtgaaccgttcgattcagcgacgcaagctatggacgtagcgattgcgtggggaggggctaagtactgcgaattcacttgcgtaactgcggataatcgcgtcatcagcatctgggagtacaatgacgtagagcctgataaaccggtattcaatggacagcaacgaatcttagttccaacttttgaggaggtagtataatggaacaaactattgataaatctcggtatattgtgcttgataacgaaggtcggcacgttctgaccttgtgcgagaaggccgcctataacctgcttaaaggcgttcagtggacaaaggacaagcatggtcaaatccatgtaaatggtgtcacaggcgttgaactcggagttcgtcaagggattatcgctgaagtattcctgtatccgggctacatcatcctagaagaggtagactaatggatatgttcgataaatacatgcaagttatgtatgaccgggacgctttctcaaggcgagtcggtgagttagaaaaagaggtagccgaactcaaggctaaggtggctatcgctaagtgtgatatgcgtgtcgtgaaaaccctactggaagatatccaatgggtgtatcaagacgaagctatctatactctaccgggctacgtttgcccttgttgcggggaatctgcaaactatgggcatttccaaggcagcttcgataagagcccctgcctactagcttgtgtactgagccggagtgaagcatatgaagcctaatgttgtagactcgctaggcattaacatgtgctacgcctgcggaggtaaactgtacgtccgaggagtatgcactatctactgccctgactgcgagaaggcagagaaagataaaccgttcgtcaggatgcagcttctacaggatatcgcagacagtaagaggcttgacacagaataatattctttgtaagataagcccatcacagacaaggaggagccgagaatggccactacagagaaaattattgagtacgtcgaggtgtgcatatatcgcttgcaggaggacgtgatggcctattctaagggcttcagggacagagccttgtctaatcggacaggctacattcacggcctgattaccatggctgaaatgaatgagcaagtgagtatcgaagactgcgacaagctccgagctaatctgcgggacgcttctgaagcagtgatgaacacattggacttttaaagtcaactaggaggaagttatgataaaagattttgtaaaactcgttggcttgtctgccgtagcctgccttctgcttgtatgtattataggcatgtttgttacagttctgcacagtggggcagagattgttcaatctcagatggaacagaaagacattatcgtgtctaccgatgacggcaccatcaatctcggtcgctccgtgaagagcgagaagctgctgtacagcatgtgcatcaaggtggaagaccgtaagccagcttgcgaattcaccaccaaggataaggtagtacatgaagtgcggcaggtgatgcgcccgggcgaggctactgcacgtgacattaagattgcagttaacgcagcagtgacgtatactggagagaatggtcagaaggctacctccctgatccctccgaaaggtgaattcctgccggcaggtactccgtcagaggtgcatatcgaaacgattgaccgcttgttcgacagcgtgtataatgactacaagcaaaacttcagcaagatgtgaggaggactcatgaaagcacagcctaaagaagtagagaccctatctttcgacaagcgacccaaggccggggatatcgttcgactgcggtccgatggcaaggcttacgaagtgtgtgctgtgtatccgacagcggtaggctgggaggcggcgcttcgaagcgtgtacgacaaaaccaagactgtcactgtcggcatggagtggtgaaatgtccgcgactaacaagtgcgtcaacttcctccctgtcactccggacgggcgagtgatcgtccggttcggtaaaaagaggttaggatggctcggtaaagagggtaaaaagtggtattattacccttatggatgcgaaggcaggatcaaatccgaaggcttcaaaactctgatcgatattaaggcgtggattaaaaaccccgactcggtttggcccgggcccctagcttgagattgactaataagccgacgaatggtacaatgggatgtaggaaattccctactcagtataaggaaactagcaatgactagccgctggaaagaggccgtgtatcgcaagtactcggtacgtcgtctgcggcaggaactcgaagagttcaaagaagctagacgctttgcaccaaatcaacgcatccgtgcatggtttgatgctcatatcgaatttctagaacgccacttggctattcgagagtccggccaagcctacccagacgaccttctgtaattaagtgttgtaggtagagattcaaatcatggttagtggcaaggacgccacactttcagcccgcccacaaggcgggcttctttttgcctgcaattcagggttgacttggagtaccagagcatgtagacttaccccgtccaacacaaggaggaataaatatgaaattcaatatctcaagacagttatgggtggctaaaagccaacggaagggcgattacaagggaacgcccttggcgtacatggctcaagtagacttcaacaaggacggaagcttggcttctagcttcaagaagaagcagcagacaggtgagggctgggcaggaaagagcgctgagacgtgcttcgtagataatgtcccggtaatggggcacttcatcggcgacagcgtggagcgctgggtgaccgagaacaagtacttccgtgtaacggacccgcgaggtttcgttctggaagtcccgaccgggaacatctctaccctgctattcaactgcactgtagtcaagggagtcattcaagagccttgtgtgtgggttcggatgggttctcagcacgttctactgccggaaggttcctctctctacaaagaggctgtaagcttcgtggagcggaaagagtcagccaagaccgttaaagatatggttgcaggggatcgatgcaccctccttagtaacggtacagaggcgaaggcggaggccatctacctcggacgggtgaaactcacttggcaccttctggctcaaaagggccggtactctaaccgtggacgtggcgggtgggcttatcgctggggttaccaccatctggagcgggagttagatagaaaagaattcaccgagaaagattccaagtgggttagtgtgtttgctaagaaactgagtctcggtggacgatggaccctcgacttcgttctatcgccgaaggccactgatattcagtctgggacagttccagaggaacttgagaatctggacttggtagatggtgtaatgtgggagtatgacggagaggatacccgcccaatggcctactactattctgtacctgatagggtagtcaagtgtatcaacgtagacgaccccgcatgggacgctcgatcctacgatgaggtaaggtggactaaagagtggactgtagtgggtgccgagtggcgaaaataagccaccattattttagaattgcccggcgagagccgggctttttcatggcaggggttattttcaaattatttttagatttctgggagtttcggccaatatgggcaatatgaaatttctcaggaaaaggctcagaatgctcgtataagagccgttcgagtgtaggtatggtgagctactacttagccgtagaaggacagtgtaacgcttaataggagggttagaatgaagattgacaacggtggcgaatatgcgtattggctggcggatatcaaagagtttgtttctcagatggatgccacagagatcgagaagagggcttgtatagcatacttaattagctggtatcagcgaagagtactgcacagaattaaacgggaggaatacgaggagatctaagctagggaccggatggatttttagggactggatagattttcacagactgcaaaattgagaactgggcagatttttaggaactggacagtttttcacagaaggggatttttctacagaggaatttcccctgaaatttagccggatttctcagaagggcggatcgttagcaggctatctaattggttagcaagctacctttaatcgttagcacactaactaaaaattcctaggacggacctcagttggcacgaacgttgcaagcccgcaccagtttcccgggcaggcgtaggcctcgactatccgtcgtgaaggcgatatgtagttggggactcgcaccccgcgtttaagatgtgcccattctactatgacagacagctttgtcaacattctttttatggcataggctttgcaattgcaattaacatgccaacacaaatatcaggctcctccggtgtttatctccggtgctcggcttccagcctgcgttgcccgcatgcctactattatacacaagctatcaagagaagcaagaaaaattatagagaaaaatctacacaaaggaggttgacaggcctcctttatatatgcacaatgatctcacattcaacggaacgtcaggtaagcatcatgctacatagtgaagcccgggagatggccctacaagagatgggcaagtggagtctcctcgaacaaggttggaaattcagtttcaatctcaggatgaaacggacgctgggacgctgtaatcatactaagaagctcatagaacttagctacgggtatgtagctgctaatgggctcccggcaatattggatactatccggcatgaaatagcccacgctaaggcgggaccggatcagggccacggatttgtatggaaagagtggtgcggcttgattggcgctaaacctcagcagtacgccagcacaaaagaaaaagtagtcaatttcccgtggcaactggcgattcagcacgactccgggcacttagagcggctcaatcactacggtttcagacggaccaacatggcgaaaaagcaggtacgcgggcgtcctgagacaaagggcagactagtttgggtgaagagtgaaaataagggttgacagcttaggccattcgcgtagaatggccctcaagcaaagggaaacaccctgagcaatcacgaaggataagtagatatgaaagcgctttgtaatcatcgggcactctacgcagcttacagccgtagcgagattgatcgcgttgcggtagacctgaaccgttactttcctatcgagaaagatgatgaatgggaagatggaccgtacatgtaccgccgccggacctatctggtgaagcattcgaagggcatagcaaggtggcacagtctctattgcaatgggaccgtccaaggcgttggcgtaatcttcgacgtaaagtcgggcgaacctttccgcacagcataaggagattcagaaaatgcaagcttgggatgtgtatcagaacggccaattgatcgatactgttttcttcgatatcatgtgtgatgccgaagaggtgcggaaatcgctggtcaatcacgacggatactcgtctgatactactgtagaggaggttgagtaatggatagtctatctgttaaaatcgttctgtcggaactgagctacaaggctctgattcaagccttcgccttgcttggccgaacgctcgacctagacgaggggttggacgatatacttaatcttattgcggatgagatcgctttccgcgacggcctgccgcctttcgcagacgactgcgataaaacagaatggatgctccgtcgatgggaatcgctcccggtggtatcgtacaatatcgggcaggacggaccgattgtcgctcggtctatcgaagtaaaaacggcatgaggggagaactgatgaccgtcagagtaggagatatcgtggctatccggggcgacattcggaaaaagctcgacggaacatgccaatacacgcccgaacaattggtaggtggtaaattcctcaagcatgccggcacgggagaaatatggactggccgagtgagtaagatacaaggtgatatggccaaggtgggaggggcttggcgcgggatcgaattctatgtgctcattagtgaaataaacgcttgacaacctgacccactagctgcaaaatagcactcacagacaacgaagacgccgataggcgaggagaaagcagatgcaaatgtttttcaaaacccgcacccaagcccgtgcaatggccaccaacggtcgcaaagtggtagacaacggggctcaagctgaaaagcgctgggctgtcaagctgaacaaaaaggaggcgaaataatggctaagtctgtcagtgtagatcgcaagcgttccatcctcgacgaggcgaaagacggtagctttttcagtgtggaattcgtcaaggcagacggcaccgttcgaaagatgacgtgcaagcgccagattaaatcggcgtatgctaacggacagtatgccactcgcaaaccgaccagcgctggcaagccgcacctgtataccgctgctgaggtgctgaacatggaagagggtaaatccgctttccgtacgatcaatctcgaaacccttatccgtgcgaaggtgaacggaatcgagtataaattcgattaaaagcttgacagcctaggccattcctgtagaatggccctcaagcaagacaaacttaaacagaaaggagattaaaatggcacgttctatcaaggcttccgacttcgattccgcttaccagttcgaggccgccaaacgttccgaacgtaaagagtcccgcaaatcgcgtgacaatcgcaaagctagccgaggccgagctttcgacttcagtagcgatatgtaaggtttgtgccctgccggcaggcttaaatgccggcaatcctaagcccattcgtcgagtggttttaggattctcaaccccagcggagataccaaaaatggttcgtcaatgcgtaccctgtcccgatgctcgccatgctttttgccttgcatggttgttcgccatgccggagttcgccggtctgcccgctcaaaaggacataaaactctttaagacttcgggacaatgggcggtatgttatggctagacgacagcggctcccgtcgtgggttcaagaccagaccgaggatgaaacgccgctgagggacaggatagacccctaccttagcaagcttggcgaagtcgataagctagagggacaattgcgacgggtcagggatgcaacggacccggacgaatacaacgaaatggctaaggtactaaaagcccgacgccggaagataatgaagcaacgtgcccgggcctacggtctgccagaggatgagcctaccaatgtccaagggtacagcgtaccggaagaggttcaccgtagagccatcctgttaagcagtgtaaaaccttggatgttctggaccatcctgtctttctcgatttttgtgtggtttgttttgaaaaacagttgacaaggttcccgcctcctgtagaatggtcagcaagaaaggcggacaggccgcctagctagataaaggataaccgtcatgcacttcgttcttaacctcgtttccaaaaacagcaaaaccggtcccatgcctgttagcacgtctcataacggcacctgcccggatgcctgccctctcaaggctaaaggctgctatgccgcttatgggcctactgctattcactggaaaaagctaagcaagggtgaacgtggcgtagagtggaaagagttccttaagcaagtgcggtctatctcccgtggggatttgtggcgtcataatcaagctggcgatctcgtgggtcaggatgacgttatcgatgggatcgccctgatggaactggtgaaggctaacaaaggtcgtcgcggcttcacctacacacattacccgatgaacaatttcatgaaccgccagcacgtattgtcggccaatcgtagcgggtttactatcaacctgtcgggcaacaatgtagcgcacgccgatgaactggccgacctgaacatcgcccctgtagtgactattctcccgatggacgcggagaatgtaagctttacgccgaaaggacgtaaagtggtagcttgtccggctgagaaaagcgacaaggtgaattgtaagtcgtgcggcttgtgccaagtggccgaccgggagtatattatcggcttccgtgcccacggcacagcaaagaaaactgtcgatctcattgctaagggttaacacaatggacgaatctgtttacgcaccattcaatcagtgtaagatgatgggcctagaacgaaccgtgcggagcctagcggctcctaacgggtgcaaggtagtcttgtatcaggaccataagaacaagcatagaatcgtcatatacgatgccttagggcatggaatgtctggggtcatggtgcaagcggatggggaaattcactacaaggaaactcgcaaggctagccaagggcagaatctgacaaggcagctacaagctcagctaaccgcatggggagtgaagtggttcccctctcagtatcagacagcggcgggcgcggcctgctacaaaggaggcgagtgatgcggcagcttaacaaatcccagcttaaggccttggggcctaagatcgacctagccttagagctagcttctactggccgtggtggtctaatgaatggccacggctctacctgctacattgcaaacaaagccgggcataacattctgcgggttagctaccataactcccgattcgttgcatatggtgctgagagtgtccgggtgactgggaatgtcattgcagcatgggtggaatggaagggcattaaccgggctgcaatcaacgctctgagtgagtacgggtatcatcctaacctgagcatagggcacaacgatgctcttaagactctgcgtgatatcgagcgttaccagtgacggcctcttactcgacagagaaacggggccagaggtgggccatcatccgtactgagcccggttacagaggtgaccgggtgaccgtgctaggattctgtatcaatcaaacgcacgctcttaaaacggtagccaaattccgggcttggcaagcgctaggctggccctacacactgaaagatgacagaaaataaatgcttgacagcctaggccattccagtagaatggccctcaagcaaagggaatcaccctaagcaatcactaaaggcaggaacaatgaaaaccacagagcaacggcaagcaatactccccggggccgccggcagtcaagcgacgggcgcctactacccgatttactgggatgaccggggctacttcataggcccgatgcgtcactggaaaatttacaatcgctgcgtctgaagcatcaagccatgcttctaataaccaaccatctggagactcaaaatgaaagctgtagcccagttcaaaagtgaagactacgaaagcggtgatagccgtactgctaccgtctatgaggatgtttatggatgctacgtcgtgagcgttttcggaactagcttgagcgaacctgtcagctaccattggggtccgttcgagtataaagaatctgcaatcgatgccgctaagtctgctatctaactgaaaaggggccacagaatgaaaatctccgctattctgaaaaataacctgaagttttacaagaataattcgttcatgtgcgctctggcgttcgataatgtgtccagaaataaagctaccgaggtgcaagaatttatccatcagctactagggcccttcgttaccttgcacgctaagctcaagaaagagataccgggttacgaaagagccgtatatgatgatgagccagaggatgaaatgactttctttgtatcggatagggcctatcaaatgcgttgcttgtggtgggaaactgtaatcgaacaactagaggaacaagggcaatgactcaagctaactggagcaaaggcgtccgggttgtcggcggaaagcgggatggtgagattaccctgttcacaagcgcacacttcagtgaatcgctaggcttatgcgagggtgatccttatctggtagaggctttgccgatgcccgccgcgctccggctgctagtcaaatggaacaagctgtgcagccgaatgaagcttgactatcggtatgaactgctgtagtctgcaatctcaatcaaaacaggaatgctccaatgtcgattctagccttaaccctgaccctttgctctgccgttcaatgtgatgattacattatcgatcactcactcccgggacaagccgcagagtgtaatgctcggctggtggaggaggccgaggagtggggcgatgcttgggtatcaactaacgctgatgcccgactgacccgctaccttagccggttcaatattcaagttgaccctcgctttgttttcgactacgattttacctgccaactcatcgcagaggatgaactaccatgaacgcgccccatctttccctcaagcagtaccgtcaacgtgccgctgtcatcgtccgccgagtgaaatactatgaaaggcgctggctccggaccgtagagtttttctcaggtgctgccgctcagaacatcgcagaacgctttgcctacgctgggcatgctgaagagcaaatgaccaagctcaaggctgagtttgcagccttcccggtggaggtgaggctagatgctctaggttggatcaattggaatactcacaatgacggcctgctagaggagtggattcatcaggaaaccgaccgagccatcatgctcgaatatgacgaaaccacgtggcgtcctgtagcttgctgggaaaccactgtcgatgctcttcccaagctggcaatgctgtaaaatatcgcccgttaggctgaaataatgcttgacgggcgtttttgtacctgtagaataggcctcaagaaaggaaaacagccgaaaggctcaatctgaaacccggagatcgataaaatgctgctagttcatggaaccactgcaaaaggcctgaaagctatcatgaaccgtcgaggcaaggagggattggccgcaccttgggacgtttcggaccatgacggaatgtcctacttttacaacgtaggcaagatggagtggcacgacgaagaggagtatgctaaggcagaatgcatcgttcgttgcctagaacaggcccaattgcagcaggctatgatggccgaaggaggtaaaatctatgctctggtggttgacattcccgaagagtttcaggattgcgtagaggatgattattcgtgccctaacgctagccaccaagctagctgttttccagaggataattttgatccggcatggattgtagaagtgtatgaggcagatgtgagtgtatgggccatccctttcatcgtagccggagtctcaggtaattctatgttccaatcccaccaactacctgacaaactggtggcgatagcggagtcggtggcgcggtccagtgacatagacacatacgaagctttcgagatcgaccattcacaggtggagctatctattctcgaaaatttcaaagataacgcttgacagtctagccaactagcgtagaatgcctagccaaggggtgcataagcgccccacctcgaaaggatacagaaaatggccatcgttgatcgaaccgcaggtaatgaaagcccgaatcactgctacatcgttactggcagcattggaccagagtttgagccgaccctgttcactacccatgcgctggcaaagaagtatgcccagcagatagtgaaatacggtaaagcaaacgacgttttcccgccttttacgcctgttatcgagacccggcacaaggcagatatgaatcggttcactgttcacaacaaaatccccgaataggagacgtatctatgaaactttctgaaattttccaaaaaggcctgaactatgcaattgagtacggaatgccgtggtatatgtgcatccgtctccgggagattcatttgttcccctcgcccgttgaaatggcagttaactcggtcatgatgtctgccggtatctcatcaaccccagagggatgcgaattcgccggcgttgatgactatttcgaggaaagcggcctagcagccgcatacaaaatgaacaatcaggaaatgtccgaatacgggcgctcatcctacgcaatgtgggtgcaattttggttcttcgtaatctttgacttagcccgaaaagggcagtagaatgcattacaagcgtagaacagccagcaaataatgtgatctagagggacggtcatgggtgacaaaactgtagtttatcgggtggagtgcaggaacggcgagggaccgtatgttaactatggtatggagattgatacgtcctccactcccgagcggcccgtaccggagcatgacgggatacctgatgttcgccattttgagtatttcgccttcacgtctcctaaacaactagatgactggttcggggactactacagcaatctgaccgagcactccagcgcctcaatcaaaatgtatgaggtggacaggcagcatgtaaggactggtctccggcagtgtgtattccgcagagatgcggcggtttgcgtcaaggaaatgactattgaccaatgggtaggcctgcttaaggctggcatgatctctgcggtagtcgtacaagctctggccccgatcccagccgaacaactatccctagacctaggggacgatccggcctgtgaggctcagaaagaaattttgaaaatgttcagtttatagggttgacagcttgggccattcgcgtagaatggccctcaagcaagacaaaccacaaacccggagactcaccatgaacaagccaatgaatactttcgcatacgcccactacgtcgcccgcatggacaaggcctctggcactagcctgccctacgccaccctgttccgcatcgccctgcgtaacgcctaccgcaagccgggtgtccgccagtacgattgtgcagcactcgtcgaggatatcaaagcgcgtgaactggtccaaaagcgcattcgggctgaaaaagcagtagtgatggcggcagtaatgcgtgcaattcgtaccggcttcaccgttagcgtgaaagatggcagcgatggcgagtgggtagtgaaaaagtctaccgatatcaaggaaatctctgatagcctgcaatctaccgacgaggatatcatccgcttccgcaagggcgacggcccggacaacatcgtcggctctatgtgggcaatctacggtaacagcgccggcgaagtgatcgccgactggactgataatgccaccatggccatgattatggctccggctgagcggaagatggaaaaatacgctgaattaggtatctaatgcttgacggggcccgaaaagggccccataatgcacccataccagcaaacaacatcaggaccgccccgatgagccagatcaaaatccaagagtatatcgtagccgagatcaaggttaaccattgcgctcacctgcgcaagggccagaccatccaagcccgcgatgctcgtagcagtgaaaagtggattgcattcatggtggaacgcgggtatagtgcctctgaagccgctatcctgttcaaagatgcacatgatgtggcaatgctcgaactggcagcctgaaaaaatcctactaggagtactgacaaatgaaacgccaatatactgattcctaccagtgcaaagcaatcgacggcctgatgtctatctgcggtggtaagaaagctatcgtacaagtgtggccgtccttgaaagcctctcgaaaccgccggctgaaaaagatggtaaaatacattgcccggtcaggatggaaaccgtaaccaactgattatcacagccccggcttgccggggctcacaataggagataaaagcatgaataccctgattatccgtttggattccgcctacagcgttcaaactgtccgtagtttccttatggaagctgtagagagtattcgaaagcatatccgggactacgcggttcatgacgaatacgattcgggattgagcccggtagcacccaatcatcgacttgcaatcgtcaccttagacgaagattgccgagtgtttcacattcaatgcgagtcacctgatctttatctggcgaaccctcggatcgtgtttactgatgttgaaagcccggcatataccactcccgtgaacgagatcgaagagtatagttacatgaccgcatggcagcatatacgtcaaaaagatatgacagcaaaagactacctgtcggattggtctatccttttcgcctcaaaggagaatgccattgatatcgacctgcgccccaatctgaaaacgcaaatcttgcattaactgagggagctaggatgaagcttcgaaccatattcgaaacctacgattgccgagttaggtttgtcaccataaccggcgtgtttgtggaatctcaaattgtgcggagtttcggtcaagctcaggagattgtatcactcctctgcaatcccgcagatactggtatccgtctatccttcttcgacgaagaggagggctgcgagtcgatcctctgccgattcaactacaaaggagaaatcatcaaatgaataacaagtataaggataacatcattgcggaatactgccatttcgacggcagacggccagtcctttccttggcggcacgatgggtccaccacgacagtcgagttgtgaagctggcagcgctctttgcctgtgctggctatggccgtccttacaaagattgtattaaggcctacaaggacgccaagcagcgggaaaaggatatgcgaaaccctgccaaatggaagctgagccgagcgactaagcgggctctacgggctcgactagtggctatagaaaaactagaataatccggaaaatacctgttgacgtgaggctagagggttccctatactgtgcctatcgagacgcacaaggcgtctcctaagctagaaggactagcaaaatggcaaaggcaaatctgaagttctcccgcattggcaatgacggctacgactacgcccgcagggaagacggggtttggtttgtcagagaagggtactacgggcggtacggctgggctaaaaccaaatggactcaagttcaacccggggatggcatgactatagtcgatgcctgcctgaaggctcacgaagctggaagctccagcacatacatcggattcgggaatctggtggtattttccgacgggaaggggctccgtttaccctgaacaggaactcaaataaagttgttgacagcttaggccattcctgtagaatggccctcaagcaaagggaatcaccctgagcacctgaataggtaaaagacgatgcaagcaacctaccaagccctgaaaactctgcgcgatgcttgtgaagctgtcaaggatgaaaaaggcaccatcaacggaaacaaattgaatgcactgcgtaacaaggctgtcaaggaaatgcaagctggtggtgaaacctactctgacgccattagcatggctcacgacttgattaagaagtatcgcaagtaatcaatccgtaacaagccccgggtgaccggggcctctcataggagagaccatgaaaaacgttcaaatctgttgttcgaagtgtggagccatcaacggcggtaacagcaaacacaattgggttatcgcattaggcaagaagtggtgcggtcattgtgggtccaatctcacaacccttcgtcgctaaccattcactgagacctaatcgaggagagatcatgaacgccactctggcacgcctacagaacgaacgctgtgcaaccctccgcctgatgctgctgccggaacatcgtgggtatcagttctctggccatccttgggccgagcgcatccgcaatctccacgatgaagccaagtgcatccgcagccatcactaaaccgcactaatccattaaaactctaacagcccgccttgtgcgggctttgttctatctgcgaaagcgacagctttcaagtgtaattaacatgtaatgttgtaacactctgtagaggtaacaccagcatgacaagatagaccacttgtaacgttgacgttacatgtataacagcatgacagcgaaagctgtacagatagcattctgtccagttcacccctatcaaataaccccacaataacccacctaaaacctatcggttttaagcggcctgtaaggccgtatatgaagcgatagcttcgctatgttagtctgcaccatcaaggcgagagccttacagcatgaggcttgtaggaggttttaaggccatatgcgattagcataggatgttggttgttttaggtagatttttggtataacccctttcagcgctaccattgtcccggtgatgttaagcgacagcttacatccgctcccattttgcaatggaaattgcatacagttcatcatgcgcttcaaaagtgacttcactttgcatgcggatgcatgctatagtataccctgtgatagctccgctatcccgttttgcatggcacacgaattgcataagcatgacaagggtaaccctcgaaagcggagctttcaaagtgtaggctgagtgtgggctctacctctattatatttgcgaccggaagtagtgacactgaaaacgttgactctagcccagtaaatacgttaaactaaaaggttgatagctgccgctatcgagtaaccaacattcacacaaggaggcacaatgacaagcaacaatcatgccaagattcacatccattacgctaagcaaatctactacgccatgcgtaaacgtgccatcgcaagcgatgagatatgcaaggaatgggccaagcccaagacaggctttgaagcgttctatgattgggtggtgaatgtgtcagggtacgccgtaggctaccgcctagacaggaatatcctcttcccgggaaacaagctctatgctccgcatacatgtgagttcacacctacatacatgcatactctattcaccaactgcgacaagacaagcaataaccgtgccaacaatgatctacctctaggcgtccgcctagcccgtcatgacaagtacggaatgccagtatacgtctcacagtgcaggacactaggcaagcagtctacccttggatcgttcgacgatccgatgcaagcccatgcggcatggcaacatgccaaggtagcagccatcctcgaatgtattgatctctatcagatggaggatgttcacagtgtaaacgttgttcaagcgttgcttgaaagagtggacaaacttggcaaggatattgcacagggaaaagagacaacccttttgcaatgatttgatggggtcgatggtcaaccctctgagagtgcgagaactccgccagagtaatccgatagcgaagctatcaaacgtatatgcatattccatgccaacatgtggaaagatttcacccggcagggcgggagcccgttggcattagttttgcatagcttagctgtcgctaagaaggaaagaccacggccacccattattttggatttactaaggg

(The sequence listing continues in the following parts.)

What is claimed is:

1. A bacteriophage engineered to express an exopolysaccharide (EPS) depolymerase.

2. The bacteriophage of claim 1, wherein the EPS depolymerase is expressed from a nucleotide sequence selected from SEQ ID NO:20, SEQ ID NO:21, SEQ ID NO:22, SEQ ID NO:23, SEQ ID NO:24, SEQ ID NO:25, SEQ ID NO:36, or SEQ ID NO:59, or a sequence having at least 90% identity to the sequence of SEQ ID NO:20, at least 90% identity to the sequence of SEQ ID NO:21, at least 90% identity to the sequence of SEQ ID NO:22, at least 90% identity to the sequence of SEQ ID NO:23, at least 90% identity to the sequence of SEQ ID NO:24, at least 90% identity to the sequence of SEQ ID NO:25, at least 90% identity to the sequence of SEQ ID NO:36, or at least 90% identity to the sequence of SEQ ID NO:59.

3. The bacteriophage of claim 1 or 2, wherein the EPS depolymerase is alginate lyase.

4. The bacteriophage of claim 3, wherein the alginate lyase comprises Alg2A or A1-III.

5. The bacteriophage of claim 4, wherein the alginate lyase comprises Alg2A.

6. The bacteriophage of claim 4, wherein the alginate lyase comprises A1-III.

7. The bacteriophage of any of claims 1 to 6, wherein the bacteriophage shows improved host range.

8. The bacteriophage of any of claims 1 to 7, wherein the bacteriophage belongs to the Genus Phikmvvirus.

9. The bacteriophage of any of claims 1 to 7, wherein the bacteriophage belongs to the Genus Pakpunavirus.

10. The bacteriophage of any of claims 1 to 7, wherein the bacteriophage belongs to the Genus Bruynoghevirus.

11. The bacteriophage of any of claims 1 to 7, wherein the bacteriophage belongs to the Genus Pbunavirus.

12. The bacteriophage of any of claims 1 to 11, wherein the bacteriophage targets Pseudomonas aeruginosa.

13. The bacteriophage claim 12, wherein the bacteriophage targets one or more of Pseudomonas aeruginosa, antibiotic-resistant Pseudomonas aeruginosa, and multiple antibiotic-resistant Pseudomonas aeruginosa.

14. The bacteriophage of claim 13, wherein the bacteriophage infects and kills one or more of Pseudomonas aeruginosa, antibiotic-resistant Pseudomonas aeruginosa, and multiple antibiotic-resistant Pseudomonas aeruginosa.

15. The bacteriophage of any of claims 1 to 14, wherein the bacteriophage reduces biofilm mass.

16. A bacteriophage composition comprising one or more bacteriophages that express an exopolysaccharide (EPS) depolymerase, wherein the one or more bacteriophages comprise a polynucleotide sequence selected from SEQ ID NO:26; SEQ ID NO:27; SEQ ID NO:28; SEQ ID NO:29; SEQ ID NO:30; SEQ ID NO:31; SEQ ID NO:32; SEQ ID NO:33; SEQ ID NO:34; SEQ ID NO:35; SEQ ID NO:37; SEQ ID NO:38; SEQ ID NO:39; SEQ ID NO: 40; SEQ ID NO:41; SEQ ID NO:42; SEQ ID NO:43; SEQ ID NO:44; SEQ ID NO:45; SEQ ID NO:46; SEQ ID NO:47; SEQ ID NO:48; SEQ ID NO:49; SEQ ID NO:50; SEQ ID NO:51; SEQ ID NO: 52; SEQ ID NO: 53; SEQ ID NO:54; SEQ ID NO:55; SEQ ID NO:56; SEQ ID NO:57; SEQ ID NO:58; SEQ ID NO:60; SEQ ID NO:61; SEQ ID NO: 62; SEQ ID NO: 63; SEQ ID NO:64; SEQ ID NO:65; SEQ ID NO:66; SEQ ID NO:67; SEQ ID NO:68; SEQ ID NO:69; SEQ ID NO: 70; SEQ ID NO:71, SEQ ID NO: 73; a polynucleotide sequence with at least 90% identity to SEQ ID NO:26; a polynucleotide sequence with at least 90% identity to SEQ ID NO:27; a polynucleotide sequence with at least 90% identity to SEQ ID NO:28; a polynucleotide sequence with at least 90% identity to SEQ ID NO:29; a polynucleotide sequence with at least 90% identity to SEQ ID NO:30; a polynucleotide sequence with at least 90% identity to SEQ ID NO:31; a polynucleotide sequence with at least 90% identity to SEQ ID NO:32; a polynucleotide sequence with at least 90% identity to SEQ ID NO:33; a polynucleotide sequence with at least 90% identity to SEQ ID NO:34; a polynucleotide sequence with at least 90% identity to SEQ ID NO:35; a polynucleotide sequence with at least 90% identity to SEQ ID NO:37; a polynucleotide sequence with at least 90% identity to SEQ ID NO:38; a polynucleotide sequence with at least 90% identity to SEQ ID NO:39; a polynucleotide sequence with at least 90% identity to SEQ ID NO:40; a polynucleotide sequence with at least 90% identity to SEQ ID NO:41; a polynucleotide sequence with at least 90% identity to SEQ ID NO:42; a polynucleotide sequence with at least 90% identity to SEQ ID NO:43; a polynucleotide sequence with at least 90% identity to SEQ ID NO:44; a polynucleotide sequence with at least 90% identity to SEQ ID NO:45; a polynucleotide sequence with at least 90% identity to SEQ ID NO:46; a polynucleotide sequence with at least 90% identity to SEQ ID NO:47; a polynucleotide sequence with at least 90% identity to SEQ ID NO:48; a polynucleotide sequence with at least 90% identity to SEQ ID NO:49; a polynucleotide sequence with at least 90% identity to SEQ ID NO:50; a polynucleotide sequence with at least 90% identity to SEQ ID NO:51; a polynucleotide sequence with at least 90% identity to SEQ ID NO: 52; a polynucleotide sequence with at least 90% identity to SEQ ID NO:53; a polynucleotide sequence with at least 90% identity to SEQ ID NO: 54; a polynucleotide sequence with at least 90% identity to SEQ ID NO:55; a polynucleotide sequence with at least 90% identity to SEQ ID NO:56; a polynucleotide sequence with at least 90% identity to SEQ ID NO:57; a polynucleotide sequence with at least 90% identity to SEQ ID NO:58; a polynucleotide sequence with at least 90% identity to SEQ ID NO:60; a polynucleotide sequence with at least 90% identity to SEQ ID NO:61; a polynucleotide sequence with at least 90% identity to SEQ ID NO:62; a polynucleotide sequence with at least 90% identity to SEQ ID NO:63; a polynucleotide sequence with at least 90% identity to SEQ ID NO:64; a polynucleotide sequence with at least 90% identity to SEQ ID NO:65; a polynucleotide sequence with at least 90% identity to SEQ ID NO:66; a polynucleotide sequence with at least 90% identity to SEQ ID NO:67; a polynucleotide sequence with at least 90% identity to SEQ ID NO:68; a polynucleotide sequence with at least 90% identity to SEQ ID NO:69; a polynucleotide sequence with at least 90% identity to SEQ ID NO:70; a polynucleotide sequence with at least 90% identity to SEQ ID NO:71; a polynucleotide sequence with at least 90% identity to SEQ ID NO:73.

17. The bacteriophage composition of claim 16, wherein the EPS depolymerase is alginate lyase.

18. The bacteriophage composition of claim 16 or 17, wherein one or more of the bacteriophages are engineered.

19. The bacteriophage composition of any of claims 16 to 18, wherein two or more of the bacteriophages are engineered.

20. The bacteriophage composition of claim 16, wherein a second bacteriophage of the one or more bacteriophages comprises a naturally occurring phage.

21. The bacteriophage composition of claim 16, wherein two or more bacteriophages of the one or more bacteriophages are naturally occurring phages.

22. The bacteriophage composition of any of claims 16 to 21, wherein at least one of the bacteriophages target Pseudomonas aeruginosa.

23. The bacteriophage composition of claim 22, wherein the one or more bacteriophages of the composition targets one or more of Pseudomonas aeruginosa, antibiotic-resistant Pseudomonas aeruginosa, and multiple antibiotic-resistant Pseudomonas aeruginosa.

24. The bacteriophage composition of claim 23, wherein the one or more bacteriophages of the composition infect and kill one or more of Pseudomonas aeruginosa, antibiotic-resistant Pseudomonas aeruginosa, and multiple antibiotic-resistant Pseudomonas aeruginosa.

25. The bacteriophage composition of any of claims 16 to 24, further comprising a storage medium for storage at room temperature or a temperature at or below 8° C.

26. The bacteriophage composition of any of claims 16 to 24, wherein the composition is stored at a temperature ranging from −20° C. to 25° C.

27. The bacteriophage composition of claim 26, wherein the composition is stored at 2° C. to 8° C.

28. The bacteriophage composition of claim 26, wherein the composition is stored at room temperature.

29. The bacteriophage composition of claim 25, wherein the storage medium is for storage at 4° C., 0° C., −20° C., or −80° C.

30. The bacteriophage composition of claim 30, wherein the storage medium comprises a cryoprotectant.

31. The bacteriophage composition of claim 30, wherein the cryoprotectant comprises glycerol.

32. The bacteriophage composition of claim 31, wherein the composition comprises between about 5% and about 50% glycerol.

33. The bacteriophage composition of claim 32, wherein the storage medium comprises about 20% glycerol.

34. The bacteriophage composition of any of claims 16 to 33, wherein the composition further comprises a pharmaceutically acceptable carrier, diluent, excipient or combinations thereof.

35. The bacteriophage composition of claim 30, wherein the cryoprotectant comprises sucrose.

36. The bacteriophage composition of claim 35, wherein the composition comprises between about 5% and about 30% sucrose.

37. The bacteriophage composition of claim 36, wherein the composition comprises about 10% sucrose.

38. The bacteriophage composition of claim 30, wherein the cryoprotectant comprises dimethylsulfoxide (DMSO).

39. The bacteriophage composition of claim 38, wherein the DMSO is at a concentration of between 2% and 10%.

40. The bacteriophage composition of any of claims 16 to 39, wherein the composition is a liquid, semi-liquid, solid, frozen, or lyophilized formulation.

41. The bacteriophage composition of any of claims 16 to 40, wherein the composition comprises between 1×10⁸ and 1×10¹² PFU per milliliter of each bacteriophage.

42. The bacteriophage composition of any of claims 16 to 41, wherein the one or more bacteriophages of the composition reduce biofilm mass.

43. A method for treating a Pseudomonas aeruginosa infection, comprising administering the composition of any of claims 16 to 41 to a subject in need thereof.

44. The method of claim 43, wherein the composition is administered at a dosage of at least 3×10⁸ PFU of total bacteriophages per dose.

45. The method of claim 43 or 44, wherein the method further comprises administration of an antibiotic.

46. The method of claim 45, wherein the antibiotic is selected from the group consisting of fluoroquinolone, carbapenem, aminoglycoside, ansamycin, cephalosporin, penicillin, beta lactam, beta lactamase inhibitor, folate pathway inhibitor, fucidane, glycopeptide, glycylcycline, lincosamide, lipopeptide, macrolide, quinolone, oxazolidinone, phenicol phosphonic acid, streptogramin, tetracycline, sulfonamide, imipenem, meropenem, amikacin, ciprofloxacin, levofloxacin, tobramycin, azithromycin, aztreonam, colistin, inhaled tobramycin, inhaled aztreonam, and inhaled colistin.

47. The method of any of claims 43 to 46, wherein the method further comprises administration of one or more CFTR modulators selected from ivacaftor; lumacaftor and ivacaftor; tezacaftor and ivacaftor; elexacaftor, tezacaftor, and ivacaftor; or any other combination thereof.

48. The method of any of claims 43 to 47, wherein the bacterial infection has become resistant to one or more antibiotics selected from a fluoroquinolone, carbapenem, aminoglycoside, ansamycin, cephalosporin, penicillin, beta lactam, beta lactamase inhibitor, folate pathway inhibitor, fucidane, glycopeptide, glycylcycline, lincosamide, lipopeptide, macrolide, quinolone, oxazolidinone, phenicol phosphonic acid, streptogramin, tetracycline, sulfonamide, imipenem, meropenem, amikacin, ciprofloxacin, levofloxacin, tobramycin, azithromycin, aztreonam, colistin, inhaled tobramycin, inhaled aztreonam, and inhaled colistin.

49. The method of any of claims 43 to 48, wherein the bacteriophage composition is administered via inhalation.

50. The method of any of claims 43 to 48, wherein the bacteriophage composition is administered via nebulization.

51. The method of any of claims 43 to 48, wherein the bacteriophage composition is administered intravenously.

52. The method of any of claims 43 to 51, wherein the bacteriophage composition is administered at least once a day.

53. The method of any of claims 43 to 52, wherein the bacteriophage composition is administered for at least one day.

54. The method of any of claims 43 to 53, wherein the subject is human.

55. The method of any of claims 43 to 54, wherein the subject suffers from cystic fibrosis (CF).

56. The method of any of claims 43 to 54, wherein the subject suffers from non-cystic fibrosis bronchiectasis (NCFB).

57. The method of any of claims 43 to 56, wherein the subject was previously treated with one or more antibiotics.

58. An assay for determining alginate lyase activity of an engineered bacteriophage, comprising administering an effective amount of the engineered bacteriophage of any of claims 1 to 15 to a Pseudomonas aeruginosa biofilm and determining reduction in biofilm mass.

59. A method for treating a bacterial infection comprising:
(a) selecting a subject having a bacterial infection, and
(b) administering to the subject an effective amount of a bacteriophage of any one of claims 1-15, or a bacteriophage composition of any one of claims 16-42, thereby treating the bacterial infection.

60. The method of claim 59, wherein the bacterial infection is a Pseudomonas infection.

61. The method of claim 59, wherein the bacterial infection is a Pseudomonas aeruginosa infection.

62. The method of any one of claims 59-61, wherein the bacterial infection is characterized by a biofilm.

63. The method of any of claims 59 to 62, wherein the subject has cystic fibrosis (CF).

64. The method of any of claims 59 to 62, wherein the subject has non-cystic fibrosis bronchiectasis (NCFB).

65. The method of any one of claims 59 to 64, wherein the composition is administered at a dosage of at least 3×10⁸ PFU of total bacteriophages per dose.

66. The method of any one of claims 59 to 65, wherein the method further comprises administration of an antibiotic.

67. The method of claim 66, wherein the antibiotic is selected from the group consisting of fluoroquinolone, carbapenem, aminoglycoside, ansamycin, cephalosporin, penicillin, beta lactam, beta lactamase inhibitor, folate pathway inhibitor, fucidane, glycopeptide, glycylcycline, lincosamide, lipopeptide, macrolide, quinolone, oxazolidinone, phenicol phosphonic acid, streptogramin, tetracycline, sulfonamide, imipenem, meropenem, amikacin, ciprofloxacin, levofloxacin, tobramycin, azithromycin, aztreonam, colistin, inhaled tobramycin, inhaled aztreonam, and inhaled colistin.

68. The method of any of claims 59 to 67, wherein the method further comprises administration of one or more CFTR modulators selected from ivacaftor; lumacaftor and ivacaftor; tezacaftor and ivacaftor; elexacaftor, tezacaftor, and ivacaftor; or any other combination thereof.

69. The method of any one of claims 59 to 68, wherein the bacterial infection has become resistant to one or more antibiotics selected from a fluoroquinolone, carbapenem, aminoglycoside, ansamycin, cephalosporin, penicillin, beta lactam, beta lactamase inhibitor, folate pathway inhibitor, fucidane, glycopeptide, glycylcycline, lincosamide, lipopeptide, macrolide, quinolone, oxazolidinone, phenicol phosphonic acid, streptogramin, tetracycline, sulfonamide, imipenem, meropenem, amikacin, ciprofloxacin, levofloxacin, tobramycin, azithromycin, aztreonam, colistin, inhaled tobramycin, inhaled aztreonam, and inhaled colistin.

70. The method of any one of claims 59 to 69, wherein the bacteriophage composition is administered via inhalation.

71. The method of any one of claims 59 to 69, wherein the bacteriophage composition is administered via nebulization.

72. The method of any one of claims 59 to 71, wherein the bacteriophage composition is administered at least once a day.

73. The method of any one of claims 59 to 72, wherein the bacteriophage composition is administered for at least one day.

74. The method of any one of claims 59 to 73, wherein the subject is human.

75. A method for making an engineered bacteriophage, comprising providing a bacteriophage and incorporating an exopolysaccharide (EPS) depolymerase into the bacteriophage.

76. The method of claim 78, wherein the EPS depolymerase is alginate lyase.

77. The method of claim 75 or 76, wherein the alginate lyase comprises Alg2A or A1-III.

78. The method of claim 77, wherein the alginate lyase comprises Alg2A.

79. The method of claim 77, wherein the alginate lyase comprises A1-III.

80. The method of any of claims 75 to 79, wherein the bacteriophage belongs to the Genus Phikmvvirus.

81. The method of any of claims 75 to 79, wherein the bacteriophage belongs to the Genus Pakpunavirus.

82. The method of any of claims 75 to 79, wherein the bacteriophage belongs to the Genus Bruynoghevirus.

83. The method of any of claims 75 to 79, wherein the bacteriophage belongs to the Genus Pbunavirus.

84. A kit comprising a bacteriophage of anyone of claims 1-15, or a bacteriophage composition of any one of claims 16-42, and instructions for using the same.

85. The kit of claim 84, further comprising an antibiotic.

86. The kit of claim 84 or 85, wherein the kit further comprises one or more CFTR modulators selected from ivacaftor; lumacaftor and ivacaftor; tezacaftor and ivacaftor; elexacaftor, tezacaftor, and ivacaftor; or any other combination thereof.

87. The kit of any of claims 84 to 86, further comprising a means of administering the bacteriophage or bacteriophage composition.

88. The kit of claim 87, wherein the means comprises a syringe, a transdermal patch, a slow-release device, a spray, a nebulizer, an inhaler, or a respirator.

89. The kit of claim 88, wherein the slow-release device comprises a mini-osmotic pump.

90. The kit of any one of claims 84 to 89, further comprising a second bacteriophage or bacteriophage composition.

91. A bacteriophage composition comprising one or more bacteriophages engineered to express an exopolysaccharide (EPS) depolymerase, wherein the one or more bacteriophages belong to the Genus Phikmvvirus, Pakpunavirus, Bruynoghevirus, and/or Pbunavirus.
